United States Patent Application Publication US 2015/0315605 A1 - sequence listing, part 21

SEQ ID NO: 32220 - DNA, 2994 bp, Zea Mays
ctttgaaaagttgtagaatgtcacatttcaactaaataacctaattcattaagtagattccaattcctccaaaataaaaggatccaaacggctccttagaggaaactgtgattattcttcaaataaacagtacaaattaagttctgccacctgttaataagttgtatatatatatgttatgttgtgtgatctcaggtgagcaatggagcccgtggggttcctcagcagcagaataggttgctctcagtgcttgtggcacccaagattgcaggaatgagcaatgttgtggccctcaagctgatggatggtgcccttattggtagacgctatgaatcgagtgcagcagcagttgattctacggaccagctagctgagaagcacgagtaccaggctgaggtcaacaggctcatggatttgattgtgcacagcttgtatagtaacaaggaagttttccttcgagaactggtcagcaatgctagtgatgcacttgataagttgcgttatctgagtgtcacggaccctgagcttctgaaggatggtccccaacttgacattcgcattcaatcagacaaggataatggagtaataacaattactgattctgggattggtatgacgaaacaagagcttattgattctcttgggactattgcaagcagtggaactgccaagttccttaaagcattgaaggagagtcaagaagcgggcatggacaacaacttgattggccaatttggtgttggtttctattccacatttcttgtttcagagaaggttgttgtgtcaacaaagagcccaaaatctgacaaacaatatgtttgggaaggacaagcagattctggttcttataccattagagaggaaaaagacccagagaagctaattcctaggggaactcgccttactctctatcttaagcatgatgataagggctttgctcaccctgagaggattcaaaaacttttaaagaattattctcagtttgtttcctttcccatttacacatggcaagagaaaggcttcacaaaagaggtcgaggttgatgaggatccagcggaagccaaaaaaggggatgatgatatcaaaactgagcctaagaaaaagaccaaaaccgttgttgagaagtattgggattgggagctttcaaatgagacacaacctatttggcttcgaaaccctaaagaggtttcaactgaggagtacaatgaattttacaagaaaaccttcaatgagtacttgaatcctttggcctcctcacacttcactacagagggtgaggtagaatttaggtcaattctttatgttcctgctacaaggaaggatgatataactgataataggaagaccaagaatatcagactgtatgttaaacgtgtattcatatcggatgactttgatggagaattgggtgttgttgactcaaatgaccttccgttgaatgtttctcgtgagattcttcaagaaagtcgaattgttcgtataatgagaaagaggctagtgcggaaagccttcgatatggtacttggcatttcttgcagtgaaaacagagatgattacgaaaggttctgggagaactatggaaaaattttaaagctgggtgccatggaagacaaagaaaatcacaagagaattgctcctttgttgcgcttcttctcttctcaaagcaacgatgaattaatcagcttggacgaatatgtggaaaacatgaaacctgagcagaaggatatttacttcattgctgcagacagcctgagcagtgccaaaaatacccctttcttagagagactaacagaaaaagagtatgaggttctacttttcgttgaccctatggatgaaatggctatccagaatctgagctcctacaaggataagaaatttgtggacattagcagggaagatttggacttaggtgatagcaatgaggaaagagaggagataaagcagcagttcagccaaacctgtgattggataaagaatcgcttgggtgacaaggttgcacgtgttgacatatctaatcgtctgaggtcatcgccatgtgttcttgttgcagcgaagtttggttggtcagccaatatggaaaggctaatgagagcacagactatgggtgatacaaccactttggatttcatgcggtcaaggaaggtttttgaaataaatccagaacatgagataatcaaggccttgaatgcggcatgcaggaataaccccgatgatcctgaagccctaaaggctctggatgttctctttgaaactgctatgatttcaagtggcttgtcgcctgacaaccccgccgagctcagcgggaagatctacgagatgataaccactgccatcgcaggcaagtggtcctcacagtcgcaggcgcaacctgacaacacaactctgcagcacgcggcacctgggaggtcggatgagccgcttgaaggtgaagtggtggagccagagcccgttgaggctgatcagcataagtaaggggaaccccctttcgctttctcgtgctagctttgaaccgttgtgcacgtggcggagaattttgagtatttgttttgacggcctttagctttatcatgagctgtgacggacctaatgtttagaatttagaagattagggataagtggcggttgaactacttgaactggttatgtgatcctaggatcgtctctggactcattgtagattaattataacagttagaagcgcaggtgaggtgtctatcacggacacccaaacgcatcagagttgctaaatttggagctgaggcctgcggtgaatgagatcgtctcttttgtctcgacttccacgactttctttgggctgaggtctgcggtgaatttggagctgaggtctgcggtgaatgctattttcagcggtcttacttatttcatctcttactaggtgagtgtccgtgcgttgcaacggaaccgtataataacataataacttatgtatatatgtgtgttatattgttatagttatattcccgtgcgttgcga

SEQ ID NO: 32221 - DNA, 698 bp, Zea Mays
aaaaaatattatgagattggacagtccaaagaggcgggtatcccttgaacggagctgtcctatagctgctattttcttgttgtctgatctttgtaatttccacagaaaaccataacgagcgagtggtatgcgtgagaaatttaccgccagaggaaatactcctgcaagccaccaggctaaggaactctctgggcaggaaagtggtgaagctgcggaccagacatgtaacgaaacgccccagtgttcaggggacgtggacgacggaactgaagatgtgaagcaacaagccaaggtgtttcattgttctttggtggtctgattgcagaaaatgtcagctgtgtcgataactttggtagagctgccgttaggcttgcctgtttgaatagctaaaccgtttactccatttgttccggagtacaatctggtaataacataggagtacacttgactttcttagaccaggccgtcacatttgatatttcagtctggtgatatctgtctcctatattagaccagtacaatgtttcaactcgcgagatactgcgaacacagaattttgctatgctatggccattaccaaggttttttttatcactggtataagtgaaaaaaaatggaagacggaaactgtcatcagatgcagccatacaatatgctgacagccagccagtcaatcttgtgtacgaaccattacggtg

SEQ ID NO: 32222 - DNA, 1691 bp, Zea Mays
cggcatcacccatcagcccatcaccacctcaaccgacagctcgtcactctcctactcccgtcccacctcccatcatccgcgagccccgccaggccccagctgcagcagcggctatggcgtcgtctccgcccgacgtggacctgggcaagctgagctacgagatcttctccctactcgagagcaagttcctcttcggcggcggctccgtgccgggcacgccagcgcgggcggcggctccgggccccggggaggaccgcggcagggtgcgggtgctggcgatcgacgggtgcgggccgggccccggcgacgcgctgctggcggcggccgcgctcgcgaggctggaggcggcgctgcgggcgcgcgcgggggaccccggcgcgcgcgtggccgacttcttcgacgcggcggcgggggccggcgccggcggcgtgctggccgcgatgctgttcgtgcggggcgacgacgggcgggcgcggtacacggcggcggacgcgctggcgttcgtggcggccagcctcgggagaggcggcgggtggggcagcggcggcggcgggggcgtacggggcaagtgggccgcgctgttccggcgcggggggaggcggggtgcgccctcgccgccgctgcggcgggtgttcggggacgccacgctcagggacaccgtggcgccgctgctggtgccctgctacgacctggccacggccgcgcccttcctcttctcccgcgccgacgccgtcgggagcggcagcctcgacttccgcctccgcgacgtgtgcgccgccacctgcgccgccgccgggggcgccgcgcccgccgtgcggtccgtggacggccgcacggccatcgccgccgcgtccggcggcgtcgccgccatgggcaaccccgccgcggccgccatcacgcacgtgctccacaacaagcgggagttcccgctcgccgccggcgtcgacgacctcctcgtcgtgtccatcggctcgggatcgtccttcgcctccgccgccgccgcttctgctccttccaccggctggcggacgcccgtcccgccgcgctcgccgtcgcccgccgagatggtccgcctcacctccgagggtgtcgccgacatggtcgaccaagcagtggccatggcgttcgggcacacgtgcgggcgcaactacgttcgcatccaggcgtcgtgcgtcgggacggcgctgaggtcgctggacgcgaagaaggcggtggccttggcggacggcatgctggcgcagcggaacgtggaggcggagctgttccgggggcggcggctgtcggccaagtcgaaccgggagaagctggacgcgttcgcggcggagctggtgaaggagcaggagcggcgggaccgccaccgtgccgttcccggcatcgcagggctcgtaccagccctagccccagccattggcgatcgagtggatccgaggacgagctggtcaaagtaagttatactatacgatgcggtatgtccgccgtggctcgagaagaagggcggtagcgtggagagcaatgattagaggttacttttgcatggaaaaagtggatttggatgctaatggcgaggttagataggatgttaatgcctttttaatggagtacgtgcacttggattcgtatgtgcgagatgcaaagctcccgtttactgctctgccatgccatcttccctttctgccaacagtactctgcgc

SEQ ID NO: 32223 - DNA, 1488 bp, Zea Mays
gagagaccagcgaccgtttcactccccgcgccacgcgcctgactgggtgcactgcactggtggtgtgcacgcccctcgtcagtcgtcactcactcgctaccccatatcccattccccccgacggcgcctctggcagcaaggaacaatatgtccaatagggccacccattggtgttatgcctgtcagcgcccaattcgtcttcgcgggcaggatatcatatgtcccaactgcagtgatggttttatccaagaaatcagtgagatgggtggcgtactgaacacttatgggctaactgaaccggactttgaagagcgccaggccagaagatttggaatgatggatgccatatcttccctcatgcggcaacggctgtcagaaataggaagggatagtttgtttgatattcacggtagacaagggacagggaaggccgcagagctggcgctgcccgtccgaatttcagtagcttagttgttggtcccagtctggaagctctatttgagcagctactactccagaacaaccgtcaaggcccaccacctgctccacagtcagctattgactccatgcctgtggtaaagataaatcgcaggcatcttgacgaagatccacagtgtgcagtttgcaaagacaaattcgaggttggagcagaggcgcgggagatgccgtgcaagcacttgtaccatactgactgcatcatcccctggctggttcagcacaattcctgccctgtttgccgtcatccgctgccatcacagcgatcaggcagtagtaccagcagcgcccgtgtgccttcagcatactacaacgaaacagcttgccctcctgcggtcgccagggcagatttcgatcctgtgccttcagcatactacaacgaaacagcaactgatcctcctgcggtcaccagagcagatttcgatcctgctccaggaaactacggcagcgaaagccaggaaagtcacgtccccttctcctttctctggccatttggcccgtcgagttcttaccaatatgaagaaaatgttgatgaacctgcagtatacgatccaaaccagatagcatattctgcgtggcactatgaccactgactgaaaccctgagttaaaatcaagatatctgcaattcgtgccttgagctctcagctttggtgaggcaaagggctgcttgccgtataaaaaatggatggttattgtgttcagtgcatacccttgctacgcatgtccgttgtggagatatcagctgtgtatagaactgggcgcaataaactctgctgtaatgcccgtatatattccttttcggtatatcaagtctaaagctacataatcctgtatgtgcagtaatcggtgaactgagtgcatccagaatatcatgtcatgataaacatgattataattacatggttgtctttttagactgaacacagcatgtcttctgttccggctatactgaaactgaaagatacaccaggatgtgtttggttgaaatgtg

SEQ ID NO: 32224 - DNA, 2325 bp, Zea Mays
ggaatttcgaaatggcacctattttgttttttatcattttattaataataatattcctttgtttaaaaaattgttcgcatgcgcacaacggaccggaagaaacgagtgccatgtcggtctggtcagctatcactctatcagcagactcccactcccacggatcggatcatcggaccccacgtccagtccactgccaatccgaacccatgtctacccagcgagtgcgcgcaggccgcggcgcgcctccgcgtccggctccggagtccggcctgcccccgcgcaccactcgtgggtcgaagacgcgagacgactcccgagtcggacccgttcacacacccggtaacggacggccctccctcccggcgagtagcgacccgtttgtccgttctccccgagcgattatatatatcatatatgcgcccgcaaatcgctccggtcccctccccaccccagccttctctctcgctgcgcggcgcctcctcacgcctccgcacttccgcagtctgtccccaaatctgtgcaagacctctcggcaaatcccctcgcggcgacgagacatggttgggagcgtgggcaacgggctggcggatttggacgcaggggccatctccatgaacggggtggggaaggctctgtatcctgccaaggcggcggcggcggccgccgcggagacgctccctgtggagctggagccgccggaggccgtagtggcgccgacgggggaggaggctgccaacgggaagagggagatagtgatggggaggaacgtgcacacctcctgcttcgccgtgaaggagcccgacgcggacgacgaggaaaccggcgagagggaggcgacgatggccagcatcctcgcgctctaccgccgctcgctcgttgaacgcaccaagcaccaccttggttacccgtacaatctggacttcgattatggtgcactggcccaactgcagcacttctcgattaacaaccttggtgaccccttcatcgagagcaactatggtgtccattccaggcagtttgaggttggagtgctggattggttcgctagcctctgggagttagaaaaagatgagtactggggatatattactaactgtggtacagaaggaaatctgcatgggattcttgttgggagggaggtgttccccaaaggaatattgtatgcttctcgtgagtcccattattcagtattcaaagcagcaagaatgtacaggatggattgcgtcaaagtcgacactcttatgtctggggaaatagattgtgctgatttccagagaaagttattgcagaaccgagacaaacctgccatcattaatgttaacattggaacaactgtgaagggggcagttgatgatctagatttggttatcaaaaccctcgaggagaacggctttaaaggtcggttttatattcattgtgatggtgccctctttggattgatgataccatttgttaagaaggcgcctcaagtgacatttaaaaagcctattgggagtgtcagtgtctctgggcacaagtttgttggatgccccatgccatgtggtgtccagataacaagattggagtacataaatgccctgtctagcaacgtggagtatctggcgtcaagggatgcaacaatcatgggaagcaggaacggccatgctcccatcttcctctggtacaccctcaacaggaagggctacagaggctttcagaaagaagtccagaagtgcttgagaaacgcacactacctaaaagatcgcctcaaggaagcaggaatcggagcgatgcttaacgagctcagtagcacagttgtgtttgaaaggccaaaggatgaagtatttgtccgaaggtggcagctcgcttgtgaagggaatatatgccacgttgtggtgatgcccagtgtcaacattgacaagctagactatttcctgaacgaattagtggagaaacgggcgacttggtaccaggatggaataagtcaacccccctgcattgccagagtcgtaggctttgagaactgtctctgtggccgtcataagtagtgtgagccttttgcaaggggggtcattgatgagggagccattggcaattttgtcattatcatttgtgggcttcgccagtatgccatcggacccacaaatcatagacacagacggtcccaccagtcatagcaaatttctcttcatgaggtgcatgttgtactgtatccatgcgttctgtatgtgtgttctgcggtgtaggcgtgtagcttatttgttgtcatgagaataaagttccttctatcaaatttgatggatgcaagttgcatcaaggttggctcgtctgtgcggtgctaagaag

SEQ ID NO: 32225 - DNA, 4723 bp, Zea Mays
cgcaacgctttggtagccccattctcatgtattcgtgtgtgtaagggagtgggtgacatcatgggcgcgatccctgtgttgccgatcgccattgagctatgcattcgacaaccggcgtcaacaattggtaccgaggctcagtgtatattctacgacagtttcgtgagcccacatcggacgtagtgacaagaaggatcctgtcgtcaaggtgatgtccaagggaacgccaagacggaaggcggagctagaacatctggtgctcatgttgtccacaattaatgccatgcacatcgagacgaggtcgctcgacgtcatgacatccagggtgtgcatggctgatcaagttatgcatcttaatgagaagaagatgttccctactgatcacgacaaaggcaacaatgtatgggtccttgacacaggggctagcaatcacatgaaagggtgtctcgaggcgctcgcgccactcaacatatctgtgcgcgacacaatgcgttttggcgatggatcactcgttgagattgagggtattggctttatgatgctctagaccaagacaaagagctataaggtgctcgttgaagtctactttattccaaaattgaagagcaacattgttagtctaggtcaattggaggagggggctgcaagattgtggttgaggatggattctgcaatgtgtttggcatcgagcgctcactgctatggcatgtttgctatgaacacctcaattttcaggcactgagctcggcacaaaagagtaaagcacttcaccacgacgccatacataccacaacaaaatggtgtcatagagcaccataatcatacactaggggtgtaatcggatcggatacgaacggatactactcgttccatatttgtatccatattttctctcgaataaggatattatcgaattgtattgaataagatttaaatggatatcagcatcttaaatacccaactttgagtatatggatatggatataaagcggatactgaatacccacacttaaatacagatcgaatcttagcctttttagatggattgaattcgaatacagatggataacatctgtaccatttacatccctacgtatattggtgtagaagaggaagagtgtgcctagagagttcagggagaagcaatgtatgatggtatatttggtgaaccgtgctccaacaagaagcctccaagaaagaacactctattaagcatgacacaataacaacggtatgtatgtctatattcattatcatttatttgacagatggagtatctactttggagaaggtttgcattttcttttgagttgctctaataccgcttccggcttccctgttattttgaccagcgcaagtttgctgtttctccgctgacctctttgatcccgtcaggccgttaccatcagtcgacaaaatctaaacggatttgtagtgggtttgttagtttttggcacccaaaattcctatagccaccaggcccaccacccccttcctccccaaaagcttcctcaaaccactcgccatctcacctcaattgccaacagcccaccaccaccacggccagtctcgctttctagtcgcttccgcgtcctccactcgccgcgctccccatcccggagcgcggcacaccgtagccccgcgccgcagcggctggccggcatgaagagcatgtggaagcagagcggcggcctggtgtgcgccgacgccggccccctcagccctctcggaggccgctcgcggcgccgcacgaggctgacgctgtacgcggtcgcctttgccttcgccgcgttcaccgcctacgtcgccttcgcctcgcctccctccgcgggcgccggcgcctcgtggttcggcggagtgtacgcgtccacggcgccgtaccgctcgcagatttccagcctcttctcgtccatcttgcccgccgactcgcccgccccctcgccagagccgctgcgcgtcacgttcggcggatcgggcggaggcggtggccaggtgacccgtgatgcgagcactgtgcaagttgggagcgcggcggaaagcatcagctctgccaaggctgggtctagtaagcagctgggaactggaggcggcgctccgatcggcaatgcgggcgctcggagtgtacctccggcagtccatttgccaggcactggaattggcggaggcgcagctccaacgaacagttccgcctcaggtgtcggtgctccgaacgacgcggtggatctgaataaacgaagcgacggaggcgtttctacagaaggcggcagtggatccccggccagtagttcagccgtgcatggaaccgccgcggaggtccgcgagaatagcgttaatgggtctaataagcagtcgggaaatggaagcggagccctgagcaatgctgctaccggacatggcagcactgtcagagctgaggccaaagttgcaagtgatgtttcaaccaatagttctgctgggagtggtagcttggggaaggtagatttgagcaccggatcttctaataatctggcagggagtggaagtgtcgtttcaggcagtggttcggatgctggaaatagaagcactgtaaagcctcatcctggagatgctgttggggcagggagcagggggtcttctggaaacggcacaggtaccatggttgatctgaataaaggttcagatgcccagccaggaaatcgaaatggagatgcaagccatcaatcagatgtaagttctggtttcgagaagagtaaaggtgcaaaggttgtgacgacagatgctcaaccagacagtggaagtggagatgcaagccataaatcacctggaagttctagtccggcaaagagcattgcaggagatggcgaagttgagggtagtaagagaaacgtgagtgttgttccaactgttaatcaaactgggagtccggcatcggtagggcagaaagatgttggttctcccaggaacaacaacacagttggagcatcccccccagtgaagaacccggaacagacctggagccaagttgctcccggcgggagcagtggtacagtgaataatccgaaaggaaatgctgctgctcagggcagtgctggttcatcagagaaccattcggcccaagtaaactcctcaaaatctggaaataacagcaagggtagcaggtcatcaataacacaggatggtggttctggtggaaataagaaaggtgattggtacaaggaaatggctagttgcgatatgtttagtgggaattgggttagggatgactcataccctctctaccctgagggatcgtgtcctcacattgatgagcccttcgactgctacctcaacggtcggcgagatctagcttaccagaagctccgctggcaacccagtggatgcagtatcccaagattgaacccaaccgatatgttggagaggctgagaggaaaaagactggtgttcgttggtgattcgctcaataggaacatgtgggaatcccttgtgtgtattttgagaaattctgtcaaagacaagaggaaggtttttgaggcatctggcaggcgcgagtttaagacggaaggctcatactctttccttttcacggactataactgcagcgtggagttcttccgctccccattcctagtccaggaatgggagatgcaagtgagcagtggaaagaaaaaggaaactctcaggcttgatctggtagagcaatcgtcattgaagtacaaggatgcagactttatcattttcaatacggggcattggtggacacatgagaaaactgctcttgggaaggactactatcaagaaggtaaccatgtgtataatgagctgaatgtcatggatgcctttcataaagctcttctcacctggtccaagtggatcgatgccaatgttaaccccagaaaaactctggtgttattcagaggctactcagcatctcatttcagtggcggacaatggaattcaggcggtggctgtgacaaggagagtaaaccaataaccaacgatcagtacctttcaacctacccaccaaagatgagcatcctggaggacgtgatccacaagatgaaaactccggtcgtttacttgaacataacgagaatggctgactacagaaaggatgcacacccttccatctaccgcaagcagaacctgactgacgaggagaggagatcgcccgaaagatttcaggactgcagccactggtgcctccctggagtaccagattcctggaatgaactggtttatgctcaacttctgatcaagcagcatcaaatgcgccaacaataaaggcaactgcggttttttgctgtgtgcctgtatatgatctgttgttttctaggataaatggataatagtcaacacggtggtcgaagtaaagtcgacatgagaccgaggattttcttaaatcccggcttgttcgctgcggctttaatccggccgtggcttctacagtattttgtctctctatagattgcaactgcggctgccagccagctgatgaattcctcagttagggctacctcccaatacccacataaattcctcagtagaggtttctgggacatcatattgtaaagttcatgtctatcggtaatctgaaataatatgaagaatagtatagatgtgatgatatagatgcccctgtgtcttctgtgattctctacctgctctcatgtatgtttctgataatcaaggttcctatggtatagactttcattacagttaagcaggaaagaaggctgatggattg

SEQ ID NO: 32226 - DNA, 1693 bp, Zea Mays
ccctcttatccgttctcgtctcctgtcccggactcccgggaccggggaggccgggatcgagaagggcaacgagcgcgtcccgtgctcgccgctcctcgccgatggcgtcctccactctgccagcctaccccttccgtatgtctcttcccggactacgagccccggaccctgctaaggttaagcacgtatccgttcgagcccccgctcgccgtcttcccgttgcagcctccgcggcaccatcaggcgccgcggcggcggcggcgagggagcgcaggcgtttcctggagagctacgggctcaacccaaacgacttcgaggaagatgcagaggagaatccgagggaagagagaaaggacaggcggagacgtcggcagtcggggagaggggagcaaactgcggaagcggcagtgactccagcgaaggtggaggagcctcgggagactcacaaaatgctccaggtgctaggtggaaaagtccgcagaaggaaattactttcacccaaagataggaatgtccgtccaatgatggaagttgtccgaggagcagcctttgacattttacagtcagctggtggttctcctgcttcactcagaccgggtcggtggctagacttgtatagtggtactggatccgttggaattgaagctatgagccgaggatgttcagaggttgtccaaaaattcatactgaaacttcagtcatgatagtctagacatgaatgcagataatccctcaaaacacccattcatctaattaccttttatttttttatcacaattcaaataagctcattgttgacaaattactcatgatgtttttatatatccaagtaaggactactgcatacttgcaaacttttcatcattcgtgcccacaagcacatcaagtgcagtgtatttttatgttcaatttccatgatgatcttttcaagggttgactgagctaggtgtgggtaggcagaagtcttcttcttttttcccatgattgtcgcatgatgatctattttaggaaatgggcttagtcttctgcagtagtaactccgacaacctccaccacttaggcacatttcgttgagatggatccttgggtcatctctgaggtcctcaaaccaaatctggagtgtactggatttattgacgtgtcacagatacatatgctccgcgttgaaaaattcttggccaatgccgaaaaatctcatggtaaatatccttcattcgattatatcagtgtaacaccaccatatctggaggtcaactatagcacactgctcgcccaacttgcaaggtcaccattggttggaaaagactgcttcatcctagttgagtacccgctgaaaacagacatggctgaatcatgcggaaaccttgtacagatagctgacaggaggtttggtaggaccaacttgctgatatatgggccaacttggtcagagaaaaagaagaaaagatgatttctgaagggggggttcaggcaaggtttgcatgcagggtgtcatgataatcacggttgggaatggttaaggtttcaagatttgcacaggggatatttggcctagtgtaaggcataagaaggtggttgatcttggttcactgggcctatacctgaataacttgcacagcacagagagctcgcatttcgctttcctttgtggtcagagatccacatccgacaagagggggggggggggggggaa

SEQ ID NO: 32227 - DNA, 351 bp, Zea Mays
aaaacacagaaactgctagactactgctgttcacccaccacctaaaattctggacagccccccctctaccccaatcgcaaacgcaacctctaatcaattaaattgcagcgcaaatgaacaagggatgaacacaaaaatcaccttggattctccccctttccttcctcccttcttccctccaccaaaacgattgaagactcgcaccacaacgacgatgatccgagcggcaaggattggcaccttgggaggaggggattgagagggggggcggctaggttttggtggctgcaagaattgagagaggaggagatgggcagggggggcggcggccaagggggaagagaagtgggg

SEQ ID NO: 32228 - DNA, 1266 bp, Zea Mays
aagaaaaaaaactgcccgaggaaagaaggcggaagccgacgtgcaaccagcccagcttaaaaaaaactgcccgagcaaagaaggcggatgccgacagacgagtcgtccgtcccaggctcccagccccggcgccccgtctcaaatcaaaaaaattcgtctcaaatctcaaacccataaaaaatactgtattttccaaccaagccactcgcccgaccttcatccgcattccacgcgcactccgctgcctcactccgagactccgccgctgcttccaacttccgttgcgcacgagcgaaacatccggagctagcaagggaggaggaggaggaggcgatggcggggggcggggataaggtggactacgtcttcaaggtggtgctcatcggcgactccgctgtcggcaagtcgcagatccttgcgcgcttcgcccgcaacgagtttagcctcgactcgaaggccaccattggggtcgagttccagactcggacgctcgtcatcgaacacaagtccgtcaaggcgcagatctgggacaccgccgggcaggagaggtatagagctgtcacaagtgcctactacagaggtgctttgggagctctgctagtctatgatatcacaaaacgccagagcttcgaccacatacctcgctggctggaagagcttcggggccatgctgacaaaaacattgtgatcatgctggttggcaacaagagcgacctcgaagacgagcgtgccgtaagcaccgaggacgccaaggagtttgccgagaaggagaacctcttcttccttgagacctccgcgctgcaggcgaccaatgtagaaaatgccttccagaccgtcttgacagagatctttaagatccacagcaagaagaacatggcagcggacccaagggccaatggggccgcaccatcgctggcagggaagaaggtcatcgtcccaggcccagctcaggagatccctaagagcaagtgctgcagttccatgtgacatgttgcctgaattttatttgggtttgttcgtgtccgagggaccgatatcgtagtttagatttgtcacccgtcttcaagatgacgaggatagggagcgagaagaaaacatatgtttgcatagactttgttggattttacaaaaatagcagtgtaagcacattattttttccccgatgccttgaaacccttgtgtacagtagagatggatcctaaacatcttaattacaggataaatttaatatttgaaatagatatgtataaaatatgatgttaatat

SEQ ID NO: 32229 - DNA, 2091 bp, Zea Mays
catcgcatagcacacacacacaccctgcgccaatgccatttccgtgcttggatagatcgcagatctacgaggtagcatcagatggctctgtagggattggaggcaaggatggaggcgtcggcgggggtggtgaggatgaaggcgactatgatgaggcggaacccgggcgacatgatggaggcgagccggtgccggtgacgaggatcccacggccatggacgtcgtcaggacatagctgatgccggaggaggaggcgctccggctctgcatcggctgcgtccacttctagacttccttgcctcgcttgtcacctacaggaagcgatgcccaccttggaagaattttgggatgaggagcctagcgggttccaaaagaactagaagtacagattggttgaacttcaaacaaatacaaagagctatgcatacaagtggtggaggcctggtggatcaaggtcgttgtcgtctccaggtccatcaaatgcgacaaggtcgagcgcacgcaattcagctccgaagtcatctcctttcaacagaaagatgcaagtaacaccaagtcacttgcctttgatggttgatacatttcactgtatatcattgcacgacagatccatttagtacctttttctgagttaaactacttcaaacattgctgaagactacaaccagcctacagttgttgtaattgaagcgggtcaagacatagcatttgcaaagatttagttcattctcatcactctgcaatattcgggtatctcacataaagtttttattgcagttctatttccttttctcatgctgtgcatctttcttatttttgttcaaacaatataatgataagttcatttacttattactgtgattgtttggagcagcacacatgttattataagtcaaattttaagtcaaattattctcgacacgtgattcggttcatggcctatagtaaaaaggatagtttacagtaataacatgtgtgctgctccaaacattatgaggatagtaagtcagttcatttttagtttagaattggctctctcttatttttggtcaaattctagaatgatcagatgctcgacaatacttattattgtgattgtttgctcattttcagttcatggcctgtcttattttttcccctacaagtcatctacgacagtttgccagtagcactaaatcttttaactgtggttctctactatgtgtaatctcatatcaagattaatgagtatcgtgatcgtataattttgaatcctatcaacccatatggcaaggcaaagaaaaatgacagtggacatcattctagattttacaaaatcaaaggagcaaccagacatggctgtcatgatctaagatacttcaacgtgattggatcgaacccaaacatatgactaggagaagctccaaggccactttgtcaagggtctctgcaatgcacctactggtgcatgatttactggaggttgtgcgcatgaatgtgccacacattggtatgggggttggagttgaagcaggagacatgattgttattcctatcatgtgcacactgcctcctcgctgtcatttgtcgtcactctcgtagtcctgataccggagcatggttgccaggggagagcagtccaaggcaaatttgccatgttggagcagtcacaggagccaaggggctgcagtcacaggtcctgctagccaggatggagcaatcataggacctcctagcagtccaaggaaaatttgcgaggtggagtagttgcaacttttgaaacccacgtgataacatgctcaagcgttcgtatgataaaaaagatggcacataatcaaaagaagatctcatgttctgcgtttgtgaacctgtttgtattttttgaacttgttttgtgaacctctatttgtaaacctgtaaaatctgaggttgtgaatagatttgggtaacttcatacaagtggtggaggcctggtggtaatcctggatgcatataaagcgaggcatgcaatatccatagcactcgtttgacagaaggcaacaccatcaaccttgtcctccacctttaaactagcatgagcaccatccttcttcacatttatattcatgtccc

SEQ ID NO: 32230 - DNA, 1321 bp, Zea Mays
gttcaccgcaccccactcttcgcggcgcgttgcaggaacttcccgtattccccacgcgtccgagcgcacagcgtcacggcgctcaggccgtggcttactggcttccacccacagccttcgcacttccctccttcctcgcaaatggccgtcgccgtccccaacgctcccggccgcctcttccttctccaatccaccccgttcccgaaccctagcagctcggcatccgccgctcgagcccaatccttccgcgtaccacccctccgcctctcgctattccgacgcatggctgggcgctcgctgacggtgatcgcaggcgcctccggcggctccgaacgagatctcagcgcctccgcagtctccgtggaggccctggactccgtcgcctccgattctgacttagagacgaaggagcccagtgtgtcgacgatgctgacgagcttcgagaactcgttcgacaagtatggggctctgagcacaccgctgtaccagaccgccacctttaagcagccttcagctacagattatggaacttatgattacactagaagtggtaaccctactcgtgatgttctccagagcctcatggctaagcttgagaaagcagatcaagcattctgcttcaccagcgggatggcggcgttagctgcagtaacacacctccttcaggctggacaagaaatagttgctggtgaggacatatatggtggttctgatcgtctactctcgcaagttgtgccaagaaatggaatagttgtaaaacgagtagatacaacgaaaattagtgatgtggtgtctgcaattggaccctccactagactggtttggctcgaaagtcccacgaaccctcgtcagcaaattactgacattaagacaatctcagagatagcgcattctcatggtgctcttgttttggttgacaacagcatcatgtctccagtgctctcccgtcctatagaactgggagctgatatcgtgatgcactcggctaccaaatttatagcgggacatagtgatcttatggctggaattcttgcagtgaagggtgagagtttggctaaagaggtagggtttctgcaaaatgctgaagggtcgggtctggcaccttttgactgctggctttgcttgaggggaatcaaaaccatggctctgcgggtggagaaacaacaggctaatgcccagaagattgctgaattcctggcgtctcacccgagggtcaagcaagtaaactacgctgggcttcctgaccatcctgggcgagctttacactattcccaggaggactgtcctgatcagttatgcctgttacatttctctcctgctc

SEQ ID NO: 32231 - DNA, 2944 bp, Zea Mays
atacgagccccgcagcccccgtccccgtccccgtcctcctcctcttcttcccccttcctagcggcacggcaccaggcccgccctggtggcatctccgtaatttcgcgcctcttcgccgccaaggggtggggccgtgggggtggcaagaggaagaggtatgggcaacgccagcggccgcgaggaggacgctgcagctgttgacggcgacggcgccgacgtggaggacggcggaggggactcgtcggtccgctcgtcggagcgcgcctttccgccgtacggcagcgtaggagccaaccacgtgcggcgcgcgtgctcggtgggtgtcgtaggtggcggtggaggcgccggatcgccacccgggagtcctggccactcgctctcgccgcggatgttcgtgccccagaacgatgaggcaccttgaggaggatgacgagatagatgacgaactggatcagatcatggctcttatgatgggtcaatacaagaagaggaaaaatggccagcgtaaaaagcgtcgaggttcagtttttggacataaagttcatgaccggagtagacaagaacatgatagaaaattatttcaagattactttgctgaaaatccaacatatcccgagaagttttttcggcgtcgttttcggatgagttcctctcttttcaagcggatagctaaagccgtagagaagcatgatgaatactttgttcaagatagaaatgcagctggtgttctcggtttttcatgtctacagaaggtgacagcagcttttagacagctagcttatggtgttccagcagattatgttgatgagtacttgaggattggtgaaagcactgctattgagagcttacggaaatttgtcaaggctgtctgtgaggtttttggcccacaatacttgagagctccaaatgaagatgacacagctaggttacttagtattgccgaacaacgtggatttcctggaatgcttggtagtattgattgtatgcattggaagtggaagaattgtccaacagcttaccaaggcacatattgtggtcatgtgaaagaaccaactattatactagaggcagttgcgtctcatgatttatggatatggcatgcattctttggtctaccagggtcactcaatgatattaatgttttgcacagatctcatctttttgatagacttgttgaaggcaaagctccagcagtgaactacacaattaatgggcacaagtatgatatgggctactatctagcagatgggatctatccaaattggtcagcctttgtgaaatcaatcaaggctcctgcaaatgagaaggaccaaaattttactgctgcacaagagtcgctgaggaaagatgttgaacgtgcatttggtgtactgcaggctcgatttgccattgttcgaggtccagcaaggttttgggatgtagctacacttcggaacattatgaaagcatgcataataatgcataatatgataatagaagatgaaagagacgcaggtcgtcttgagccgccctatgagaagagcgacgctgagacaaatggttgggtttcacatgttggaacatcaaacttatcagcattcatcgacaagcacaaagatatagcccattctttctttctatggcttcatgacccctgtacctccactgcaaagggctgctgatgtaactccagtgttcaaccagatattgatgaatgatcaagaagaagaatatgatggcccccctcaaaaggaaattccttctttaattgtctggacccttggaggaaagaatgtatatgttgaaggatcatgggataactggaaatcaagaaaagccatgcaaaaatctgggaaagatcactctcttttgctggtactcccgtcaggagtttaccgatacagatttgttgtagatggagaaaggagatgccttcctgaccttccctgtgaaactgatgcaatgggcaatgcggttaaccttcttgatgttaatgattttgtcccagaaagtgttgagagcgtggtagaatttgagccaccgctttctccagactctagctacagtttccaggcacctgaggacaaggacttcgccaaggagccacctgctcttccagctcaactccatctcggcgtccttaactcacagaactcggaagaaagctgcgcgcggccgcagcacatagtcctcaatcacctcttcatagagaagggctggggcgcccaccccctggtggctctcggcctaacccacaggttcgagtccaaatatgtaaccctcgtcctgtacaaacccatcgaacgatagcaatagcccgcgcatgaagagcggaagttcaatgcttgacaactcactgcgggagcagcgatgaacagcgccgaggttgtacatgcttgtgaaagtggttgaggttcaggagtattttttttccgtgccctgcttgcagaacctctggtagtctggttgttagctgtacatgctgcgctatcatgatgttggccttctggtttgtttacagagagacaaggcgtccttacaatttttacatgtccgcttgtcgtcgtcgttcctctcccatcccatggcagattggcaggaatgaaatgtgttgaaatccacatgaatgttaggtgccggagatagatcaagggattcctagatttttatttgttttttgactggtcaagaagatgttgttgttatgtactaaactcaagaaatttttacaaatgagatactagtgttctcaggcccggagccatttttttttacaatgcccttatgcaacgcattcatggagtgagatttgccaaattctgcagaactctgcactattttttcttgaaagcgtctagacatttaggtagtagagtttctgtgattaatgacatcataaaattattatgattattgtgttttacaaaaaaaaaatataaactagatcatggcaatagaaaataaa

SEQ ID NO: 32232 - DNA, 2272 bp, Zea Mays
acacgcataagcaaaaaaatgttttcattacaacatgtacccctgcactaggaaaataaggcactcggcactcgtgagccgtcgcatttccccccgtgtgaccaattcctctccgggccgagcagccgttccaatccgctcacgccgcctctctcgctgccccgcttgaccgcctgctagcgctgcagtttgatgctgatgacctgatccctccgttgggtaggttcttgggcgcggaaagaacaaagaactcgtggtgggtccgggtccgcaagaccctaggtgttcgtcagcagcgaggatgcccggcctgcctctgcctcaatcgttaaatcagaatattggatgtgaatatgcctatcctgggtctacaggccaggccttccgtcagcagctaagaactgcattgtctccagatgagaaacttaccgctgaaaaagatttggctctgtattgcaagccagtcgagctctacaatattattcaacggcgagccatgaaaaatcccctttttattcaaagatgccttctttataatatacatgcgaggaggaaaaagaggattcagataaccatatcactttctggaagtacaaatactgagttgcaaacacattatgtctttcctctttatgttctgttagctagacccactagtaacctttcacttgaagggcattctccaatttatcgattcagtcgggtttgcttgcttacttcctttagtgaacatggaaataaggacaacagtgaagctacattcatcattcctgacgtgaagagtttgtcaacctcccgtgcttgcaaccatgatattatctttattagctgtgggcaagttggacaaagtaatggtgaagataactgctctgggaaccatgtggaagattcttctctccaaatgcttgaagggaaatgctcctggggtaaaataccaactaatttacttgcttcatctttggagagttgtgtcaatttaagtttgggacatattgtggagttggcatctaaagttacaatgagaccaagcttcttagagccaaaatttctggagcaagacagttgcttgacattttgctctcataaggttgatgctgtgggttcatataaactacaactatgcatgtccgcacaagaggctggtgcaagagatatgtctttgtctccatatagtagttactcatataatgatgtcccaccttcgtcattatcagatatcataaggttaagatctggcaatgtactttttaattacaagtactacaataatacaatgcaagagactgaagtcactgaagatttctcttgtccattttgctatgtacgatgtggaagcttcaagggtctaggatgccatttaaactcatcacatgatctattccactatgagttttggatatctgaagagtaccaggttgttaatgttagtctgaaggctgatgcttggagaacagaggtaaatttatgacagacataaagtttaagctgttttttttttcagattcaatttctgtttggtatatggagctgtagttgatgagtttcgtactttatatatgtgtttaacactttaacttaatatgtccctcagtgttcttccaaaggttcgtttaaatggaggctccacttagttgggcaaaccgaaggcattgcatgttccttagtccaggacgactccctgctttgtgatttccttcctttcttgagtgcagaagccaaggatgaaagagcattggctattctatatctccaatcaaattccttacatagtgtattgtgtacctcaatgattttttggtggataatgttttacatgcttaacaatgcatggttactatttctttaaatggaagcactcttaactgtatttggtaactaatgatcctaactggcagctttttgcggagggcgttgatccaaggcatcaaacattttcttatcgctcaaggtttaagaagcgtagacgatcaaagaacacaatggagaaaatcaggcatgtacactcacatattatggaatcaggttcacctgaagatgaggcaggatctgaggacaactttgtgcaaggggagaatgggacttctgtagcaaatgcttcgattgatcctgctcaatctttacatggcagcaatctttcaccaccaacagtactacagtttgggaagacaaggaagctatctgagagatctgaccctagaaatcggcaactcctgcaaaaacgacagttcttccattctcacagggcgcaggaaggtaatctgccaccttatcc

SEQ ID NO: 32233 - DNA, 4611 bp, Zea Mays
atgccggcgaatggcaagctctcggcgaagccctccccctcgccgatggttgctcccgcctcgcgccccaaatttacagctgttacctttctcggtgactgcgacgacgacgatgacttccaacctcctcgcccccgccccttgaagccttgcattggcgccgccgcacttcggttccgtaagaagctcaaggctccatcctccgggaaggagaatagttccgccgccggtggtgccgttactgtggtgggggtcgcttcgacggccgtgaaggatgccgaaaccctagccgccggctctagggttagtggcgacgttcccaaaacgaagagacgaaagaccggtgaaagttgcggcctgtcgaggtacggatctgatagcactaaactaagctgtaaaccgaagatagaattggatagatacggatatggcaaagggtgctgcagtttcttgcccagtgcgatagactcgacggttttggcgctcggtgcggtatgtgattttggagttaggcgttgtgatgaggctcaaatagctgtctccaggcattgtacctcagttcttgaggcggggcacgccacagaagagctgacaccgacaggctctgggtgtgatccacccaaaacggagaagaagccgggcagttctgaagctgtggagggacatcacgactccaggttgattgaaccgaggcttgttgaatcagatgcaaacctcgagtttgtaactgggattcttggctcactgactgataaacaggacacgaagaaagcaaacggggtggtatttggatgtggtgttggatttcagaatgggaactatcacttggattctctacagccagagcttctaacgtcgaactcaaagtatgattctagagtttgtgttagcaatgaaatccaagagcctggtttgggagcctgtaacttgatttcacaggagaggaaagtagcagctggacattctgcatgtgcaacccctgaaaatgtgactgcagagaataaatcaagtgcacctgaggcttgtaaggggcaatgccactccgattcatctgcatcaaagcttccagaatcccatatgatccatgactttgaagttgatggttgcgataattttgagattgggacccagctcagtgagctcattaacttgtgtatgaaggattccatagagggacaatcaaactttggtgcagctcccatggaacagaacactttagactctaagagactcagttcagactatgaagcgaaatgccctctatgtggatcggatatttctgatttaagcgaggagctccggcagctgcatactaacaattgccttgacgaaccagctaaggaatctagtcccaaccataaaaaagagcccagtgttggacaaaatgttgaaactggacgtgttgtcgaatggttaagaaaccttgggttatccaagtatgaggaagtttttatcagagaagaagttgactgggaaaccttgcagtggctcactgaagaggacctgttgggtattgggatcagctctcttggaccaagaaagaaaattatccatgctctaggagagttactgaagaaacatgatgatcccagtgaaatggaagctgtgttaaattcaggaaatactaagaagactaaacttccgatgaatggtaataaattaattaccgaatactttcaatgttcctcatttgatcaaagacaaagaagggtatgcaaagcaaacaagccatctaatctgaacgagaagaaaatttctagtgctaaagtacccactagaagaactgctggtaaaggaaagattaaggatacgcctctttggtgttgcatcccagggaccccttttcgagtggatgcatttcgctacttgagaggtgattgttctcactggtttctcacacactttcatgtggatcattatcaaggcttgactagaagcttttgtcatgggaagatatactgttcgtcaattacagcgagtcttgtgcatcataagattggtatcccatgggatagattgcatgtattgaccctaaatgaaaagctcaatattgctggagttaatttgatatgttttgatgccaaccattgcccaggatcaatcattattctctttgagcctccaaatggtaaagctgttttgcacactggagatttccgtttttcttccaagatggccaacaatcctgttttgcagtcttcctgtgtccacactctaatacttgacacaacctattgcaatccacggtatgatttcccaagtcaagaaatcgtaatacagttcgtcattgaggccatccaagcagaagctttcaatccaaaaacattgtttttgattggaagctacacaattggaaaagaaagattgtttatggaggttgctcgtttgcttcagaagaaagtatatgttggagctgcaaagctgcaaatactgaaacatttagagcttcctcaggagattatgcactggtttacagccaatgaagcagaaagtcacatacatgttgtccccatgtggactctagcaagcttcaagcggatgaaatatctatcgaatcaatatgctggccggtatgaccttatagtggcgttttgtcctactggttgggcatttggcaaaggtaggaaaaagacaccaggcaaaaggtggcaacaaggatcaatcattagatatgaagtgccctacagtgaacacagcagtttcacggaactgcagcagtttgtcaagttcatatcaccagagcacataatccctagcgtaaacaacgacggccctgagagtgcaaacgctatgcttgcccagctgttaaacgagtagaggaattcgttcgtcgcttcaatatcttcggcttggctacagttttctcttcgaaaaccatttgatgaaagggatggacgctggacgagctaacttccaaggactaatacagtgatggcggaagcattcctgatggtgccacccagagttctgacgtggaaatccagagatacagggtgcatagatgcgcacgcagacacccgttggcgccgtggaggtgctggttgacaaatcgtcagccaagattctgtactggaatgggtaccggcgatagcgtgtattgccgaaaccatgtgaaccgtgatttgtgactgtcaagccaagcgagtgaacttgcatgtcattatgagcccatttgtacacgaacttgtccagggtttttctagtgatggtgaaaagtcctgccatgagtgtcacctttctttaaaaaaaaacgtcgatcaaactggcaaaatccgtaggagacccacttgtcagctaaccaccccttgcagtcatccgcaccagggcaccaccaccactccagatgttctagaactatcaggcggcttcctccccctaaccgcaacagttaaaacgccgtagcaactagcaacgctaccacagtgcgcgcttgaagatagtgtcatttgcagttcccggtagcagccatggcgtcggtgcagctgtctgggccgcgggtggtggcggctgcgaaaccggctgcgttgggcgggctcctcctgacgccgtcccttgcggtgccaaaggggcggagggccaggggcctcgtggtgagggccgccacggtcgtgtcacctaagtatcagttcagacaagaccacaaggaggggagattgttgcggttggagaagggagaagttttggaagtaaccgcattgagatcagtgttccggttggtgcacaagttgtctactcgaaatatgcaggcacagaattgaaattcaatgacgccgaccatctcattttgaaagaagatgacataattggtattcttgacagtgatgatgtgaaggatatgaaaccactgaatgatcgcattctgattaaggttgctgaagctgaagaacgaactgctggtggtttgctattgacgcaggcaactaaggagaaaccttctgttggatcagtggtagccgttggcccagggccgttgggcgaggacggcagcaggaatcccctgtcgatcactcctggaagcaacgtgatgtattccaagtatgcggggagtgagttcaagggcgaggacggtgagtacatcgtgctcagggcgtctgacgtgatggctgttctttcctgatccccaaaccatacagcgccaggtgcgcgataggaagttttgatgttgaggccgaaccttatcttttatttgctcttgtttggaattggtggaggcttttgaactgtaatctggtgcgaattataaggaaaataagccgagttgtgtagacttgagacaggactgtgctgtgctgtttggctggtaggtgagctaaccagtgttcagctggtgggtgagctgaccagcacgtcgggttcggctgttcttcctgatgtcagcgttgtacgccaaggttggccaacggcatcaatattactaatagcatctaggctaccgtttgagtttttcatggattaatgacaacacaagatgtgactattatatacttcctctgtttttttatttgtcatgttttagttcaaaaataaacctgttttagttcaaaaatgaactagcggacgacaaatattcaagaatagaagatagtattttgcaaagataactaggcttat

SEQ ID NO: 32234 - DNA, 3416 bp, Zea Mays
ggatattctgttaggtcacttgcaatcttcatctagacactgttcatgactttgtgcaaaaattctcatgtaggattagtgatttttcgaagctttgccagtttagcacaaaatataaacagcacttgcagacgtatggtcctgtggggtgactctttacgtcatgcttgtgggagcatacccatttgaagacccagatgaccccaagaatatacgcaagaccattcaggtgaatgctatacgccaatactttagatatcttacccaatttctgctattattttctttttcaacatcactttaccctcattccagtcactcttcgcctgcagcaaataatgcaagtgcagtacaagataccagattatgtccacatatctacggaatgccagcaacttattgcccgtatctttgttgccaatccagtgaggagaatcacaatgaaggaaataaagagccatccatggtttttgaagaacctaccacgggaactcacggagactgcacaaggcatgtactacaggagggataacaaggtgccttcttattcagaccaaacgtcggaagaaatcatgaagatagttcgtgatgcaaggaccatgccgaaatcatccagatcaggctatgggtggagcgctgagtattcggatgaagaagagaaggaagaggaacacagactagaggaagatgaatacgataggagggtgaaggaggtccatgcaagcggagaactccgtatggacactcttcacatatgaaagctagtggaagaaagttacatgtagataacttgttgttgttgatctgaaggatccagtgggatgtatgcagttttggcttctgaattgcttgtgctcggtcaattttcatgtaacataattcaatacactgaggcagactaccatgtccttgtgttgacgtccaccacggagcgccgcacggccgtagccctagccgccaggcaccagcggccagccagaggcccggacgactggactgccaaagccgtcgtcgccacagggaagcgccggtacgccgctcggcccttctacaggtgttcatgtggcaaatggaatttaggatttggtagcaccatggtccatgtatgtaaatcacatcactgagatggaggatggtttaaatgatgatggaatggaatatccatttgagggtgatgctaataccagtaacaatgatcagatagtagaggaccatgctgatgatgcccctattgctagtggtgataatgccatcgtccaacagcaagttggtctgagaaagaagaaatacatgtatgtgaattaccatcgtgttgagcaacctgatggttccagtgttaagcaaaagtgggcaaaatgtcttcgatgttcacataaagctaagtctgatgcttcaaatggtacaaaggcttttagtaaccacttaaaattgaaacattgtcttgtgaagggtcaacaacagctaattcagagtggaaatgacatagcaacatataaatatgatgagaaagctagtgtgagacttctatattatgccatcattatgcatgaatatccattcactgttgccgaacacaagtattttgtgaaatttatcaaatcactacggccatcatttcctttcaagtctcgtatcactgttcgtaaagagatcatgcaactttataaagaggaaaagaatatgttgtatgcacagttcaaaaagctgacatgtcgtgttagttttactatggatgcatggacatctatacaaaacaaatcgtacttatgtgtcacagcacattggattgatgataattggaacatgcaaaaaaggattatcaattttatgcatgtagaagacagccatggtgggataaaattgagtgatattttttttgtaaatgtgctcaattggaaccttgataagaaaatgtttgctctttctttggataatgctgcggcaaacaaggttgcagttgatatagtgatagataatgctaaagacttgctcatatgtggtggaaagttctttcatgttagatgtgcaaatcatatattgaaccttgttgctaaagatggcttagcagtaatgggaaatgctattgcaaacattagaatgttcataacagctatcaagaggtcacctttgcaatttgaggcatttcaaaaatgtgctaaagaatgtgatctagacactaagaaagtcctttccttagatgttgctacaagatggaattctacatatattatggttagagatgctatttactataaggatgcttttgatcgtcttgctaaaaaagataaggatagatttggtcatatggctccttcaagtgatgattggttgaatgcaataaatatcaacaagtgtttgaaaaagttctatgatgtcacattacttttttctggcacttcatatcccactgcaaatcatttctttcgcaagttttctgagattaagatggctattgcaagatggtgtgagagcagtgatgtcataatttgtacaatggcattctctatgaaagagaagttcaataaatattgggacatgaacaatatggctttagcagtgggggcatttcttgatcctaggtacaaacacaaaatggtggagttgtacatgtctaagatgtatgatagtgagagggctgagctagagaagttgtctttcattaatgtcatcaatgagttatttgctttgtattcatcaaacatcaatgcaaaaacaaccaatatggcttctacctccaaggagagtgaacttgttccacacaaaaatggttctttcatggatgatgaggatgaggatgaggttgatcttgatgagttgtatgcagcagcaaacaatgtgaagaaggtttcagaattggatgtgtatatgagtgagggtttggtgaaggtcaatgaaggtgatgctccatttgatatcctatcttggtggagggggcaagtgacaaatcttcctatcctttcgacccttgctcgtgatgtgttatctatgcaagtttctactgttgcttcggagtcagcatttagctctagtggacgtattgttgatgcctttcgttcaaaacttaaacctgaaattattgaggccttggtttgtaccaaggattggaagattgcttcagagaaagatttagaaactgaaattagaaccataagtgaagatatgaatgcaatggacttggacgaagatgctattgcggcgacttgatacattgaaattagactcttcgctatgttgtttgcgcttttgtaataaactatgtagcatgttgtgtatctcttttaatgttgcggtgaacttgtgtgaaatatctactatctattatatatttgtggacttgtgaacttgtggattatacataaaagaggggatatgctgctgatttatttttaaaactgtgttgtttcttctataatgaa

SEQ ID NO: 32235 - DNA, 7579 bp, Zea Mays
cccttcaaggccataaaagcagcaaaaagcaaagcacatgatctaagatctaaatactatctatgatccactatgcctttcatcagcatagtgactacaagctaatgcatttcaggcatacctctagtgtgttccagatccaaaaacgaattatcaaaactgatcaagagtagataaaggatcaccagttgcatcatcaaatataacaagcggaactacagcagtatctttcttcggaaatgcctgtagagaagaatgtcaagtaatttgtggcaggtttagagctattgatgaagcatttcagtatcccaactaagccatgttcttgtaagctacttactgcatgcccaaccaaaatcaatgttcaagcttcaatgcaattatagaataaactacctactgctaattagtggaaactgcagaagcaggaaccatttgtggacaatttatcctgacaagttcctttttcctcaagtacgcaggagaactgcgataagaaacaaactaaaatcactttattacaaatttagagcacaataaattgaatttcaatgacaccatgttatataattgaaattagccctgttggtttccttaccttctaaaaataacattacagcgcagaggtcaaactaactcagatatcctccatctatcattctactgcctagttaatatgataccatccttacagtccacaaacaccaagtgaaccgacaaaaaagagcgctaactaaataacaatgttacattaggtgctaggcagtgaccttcagcctaaagcttaggcgaggcaagcctaggtgtttcacaaatagacaaacatatacaaatattacctcaaaggaaaagaaaaaacaggagattacaggcctagggttggatagaaaggcccatcaaaagcagcctagtccatcaaaaacagcctagcccaccttataccttcccagcttatccatccgctctctgccctgtcgcaccttcctctgctctcaggcgcctacttcctccctaccaccttgaccaccgccagcctcctctctgctgcctccagcaccacctgcctattccagccatgcctgccacctccaccactgactgcctccttccggccgcatctgctaccaccgccatcacccccgtccctgcctcccccgctaccaaactcagtgcccctgcctccgccaccggcactggcgcccactgctcccgccacgtccccatcaccaccctcttttcacctattcctgcctccttcctgctgctcaacatccctgcctgccgggatcggcacataggtacaccgggtcgctaccaagggctcacctacaccccaaggcgggtcgctaccaagggctcacctacaccccaaggcgcctacacctaaacctaatcgtgcgtaagtggccgcagaataccaccttttggaacactgctaaataatgatctaatactaaacaacttttaatcctgaaaatcaactgcggacaacatctatgccaatatagttagcctacatagcaaaaacaaaaaaaaataacaaacatttgcaaccataatatataattccaaccaacatatatgacatagtcctggctgtatgctcagtaagtggagcatgcggatgtgtgcccagcccagaccacctagattcaagttctcgtcaaggcaaatttatgtgcctattttcttctgaataataaaatggtacctaggtcctcctaggttgagctagtttttttaataatccttgaaataacttctctctgtgctcaaataaatagtcaaatacaaatcatgaatattttttctataactttgtgcttaggggcaaacccagtgccaaaggctcccacatattggcagagggataaacggagaagctgcttcaaaccagcgacctggtgaggcttgcccttctaatgacactactgtaactttgtgtttacatgggaaaactcttctgatagcacatctcaagtagcattcatgattttttaacaaaaataatttttactggtttctggggtgacgcgcacaatagttaatacaaactgatgtaaactttatgaaatggtactggtaatatttcacacatacccctcttttatttctttcatcacattctactgaggcaagttcacagttaaatggtggtttgaaaactaatttccagcaagaatataaatgctttgaatcacaacttctacaacaaatattacatcacagatattagttaattaaagaaactataattcaagtccaaaacaaactacaagagtaccttcaaaaaccggtcaacgtaggctgtaaaaagggcatagcatttcttagaagataccacatggaaaataaaaaaaaaccttcttgctcagaaacaatttaaatttgtagacataaagttacaaagaaatttgttatatcccatacattttttttacatgaaagacatgttgaaccttatatccttttcaagctcgacatatctaaagcgttcaactcagtttcttgggcgtctttacttgaggtcctgcagcacatggggtttggacgaaagtggtataacctgctctgccttcttctctccacctcctccacaaaacttctggttaatggtgtgcctggagaattcattctgcatcatcgggggctgaggcaagggggtcctttatccccagtgttgttcttgctagtcatggaggcattgaatgccttaatcactaaagctgtccaagcatatttcctacagccgctggctgttcagcaggctaagcaccggatttctttatatgtggatgatgccatcttgttcctcaggccaaatcgagatgatctgcttctcatatctcagctgttgaaggcttttggttatgcgtcaggcctccagaccaatctcgctaaaagctcagtgtgccccattaattgcacaattgaagacttgaaggtcatttctgagctcttggattgtgaaatcaggaatttaccttgcacctacctggggatacctcttactattcggaaaccaaccaagagtgcctgctgcctttgattgataaaatagcagcttgcctcccaaaatggaaggcttctctcatgagccgagccggttagcttgtgatggtccgtgctgttttttctgccatccctatccatgatatgctagctctggatctccccaaatgggtgatcaaagctattgataagctgtgacggggcttcttgtggggaggtcatcaaaatgctaatggaggcaattgccctgtgtcttgggagaaggttcaaatgccgttgcagtgtgatggcctaggggttctcaaccttgaaaaaatgggatgggccttacacatccgatggctttggctacaaaaaaaaaacagattcttcacggccttgggaagggctgcccattcaggttccctataaggcctgagctctctttcatgtggcggtgcaaacaaaggtcggaaatggtgttgataccaaattctggactgaccggtggctgcacggtagctctgtgggagaactggaccctaatctttttcagttaattcctaagagagcaagaagacaacgcgctgtttctcaagccctatctaacaggcgttgggtcactgacatccagggagccctcacagtccaggtgattgtcgaatacctgaagctttggatgttggtggaaggttttaccttgcaaccagcccttcctgatcatcacttttggaagttcacaagttcaggacagtattctagtaaatctgcttataacaccttttttcttgggaactgttacgattgaaccttgcaaaaatacttggaaaacttgggcacctctccggtgcaaattcttcatatggctggcaatcaagaacagagtttggacgacggatcgcttgctgaaacatgggttgccacatcctagtgtctgcctcctttgtgaccaggaagatgagtcagctcaacacattatagtgtcttgcgtcttctcccgggagacttggaccaaaatcctctgttttgttggactgcaggccgctgctccacaaattgagaaattttgctcgctggtggggatgtgcagtcaacaaagtgccaaagtagaagagaaaaggatttctctaatcattcttgttgcttggacaatttggagacataggaatgtgtgcgttttgagggtcttagtcctagtatttccttggtgtgtcaggaagtagcagaggagagtgagctctagtgtatggccacaaacacggccctccatgagctgctcagcaggaagccaaggctggaagcctgagcagccctgtgtggtcgttcttttaggtttagtgcgtggcgcgtatgttaccttttggtgatgtgttgcggggagggggggggcttctttccacccctcgggtgttgtatctttttcttcttaaatgaaatgacacgcaactctcctgtgtaattcgagaaaaaaaagatatgttgcagtgtgttaaccatagatgatttttttggggtagctgtacgtaaagctgcaatttcaaggaatacagacgcaactactgaatttaaacttgcaccttaagccacaatcgtctcatataacctaagtgattcacacacagctgtcagatattcaagtcgtatttatatctgtaatacttgcaaaatccaaaataatattgcacatatgtactctggaaaacagatggacaacagattgtcaaatagagctgaccttgtgacacattccagtgcaaatagcaactaaatcagcacaatttcattgttagcatcacagaagagttatgcaaagggtgcaacagtaaacatttgactctgtaggaaaaaataatgtagactgcatagtaaagcagatacttcccaccttttcttttcttcttgtagcctttgcgtatcaatagcattcttattctcttccaacccaaggtgggaactttgagatgcagtaactggagagctaatgacactcggactgctctttcttctgtaacgcttccgtgatggaggtggactattgcgcctcctaggagatggagaacagctctcacgccttctcggggatgggaaagggctcctccttctgcaagacaaagatgagcactgtaaggataaaattaggatcatcacaacaatagacaaggaattaccattatctcttgaagccctaaaacatgggcaaaagcagttaccttagacactgttacaggggtagagcattccacagcaatacagcacagagtaaaatctttgtagattccatgcgttttacgaaaacaactcttgttagtctgtataggcaggtaatgcaaaacatggcataactatatctaagcttcatctgctgatatattccatgctgcatcgaagcatttttattttaattctgtaatgcaaaagcatccaaatcattttccccttggaaatcagaaatcatggtgttatgaaatttgacgttcataatcatatttaattcaagtatgatatggcacaatatactaccacactatccacctctaacagtcacaaaccaagctatagtacaaaattcgaatgaaggcgatcagcatcgcctcaaattttttacagtacaaaccccaaaaaaataaaacgaagactcgccagatttctgtggcgtgtgtcgggagatgtggtcacctatacgaggggcgatagggggacctgctacggctagggcttcggtccctacggcccctccggccgcggtaccgctcgggtgatggcgaccgccgacgccggcgcggcggagacagcgaccgcgacaggtcgcgttgcatcgtgcgcgacgcgatctagagcctcagcggagccggatctggacgaaaccagacgatcggagccttcggagaggggcggagtctggcttgctggctggaaagcgggaggacgcaggccaggtcaggtagagtcgcccgccgccgcacgcgggggccgatgaggtgggggatgctcgcagcccgcggaatctatctgtgggaagttgtaattaacctccaaggctacgcccaggtatacaaggtgggcgctggggagaagcaaaagcaatcgggccaccaatcccacagcgtgatatgaccgcccggtccagctcagcccaggcccatgtgagtcgtccgacccggatgagtccagatccagacccaacgtgaccgcgagtccctcaagatcacacagtaccggcaggcggcagcaattggagtgtttacgccgagacttgaaaacggcatcagtagcaaacggaggcgaccacgagcgacggggccagccgcggtccccaacgtcagaggatctcgttccagctgcggcagggcggccaacaccggcacctcatgggcgccgacgacgaagccgccgccgccatggaggcgcaagagagggaggcggagatcgagaaggccatgcgcgcccgcgtcgcagacttcaagaagcaggccgactccttgactcttgaaggcgttaggagagcactggaaaaggacctggatttgaagatatattcacttgatgcacataaaaagtttataaagcaatgtgtagacaaagtttttgctgaatctgctgatgaaaatgcaaatgatgatgcattagaggattctgatgctaaagatgatcatttatcaaaagaagggacagatgttgctaaaccaatgcctgtttcaaataaaatgtcctccaatgctgatgtcgtaacatccagcaagacaggaaaggatcctgaagaagaaaagaatcaaacttccagcagtgatattagtgaagacatgataaaagaagccattgaaaaaagggcatcttattttagaaagaactctgatactcttactttacaaggagttcggcgtactttggaagaagatctcaagcttcagaagaaagctttagatgcctataagaattttattactacaggattagacaagattttgcaagaacctgcaaatgggacaaagaaaaaaagtaaaaatggatcttccaaggatactgacaaaacaagtaaaggctctaaaagagtccatgaagaatcagatagctctgaattaaatgatagaaagagtgatatggataatagcgacgtggattcaaggccaagaaagaaaagggcagaaaaggctaaagtcaccaaaaaacagaaaatagttacaaatgagaggaaactgtcaactccaaaggctaaaaaggttgcaaaacaagatttgggtagcagtactgaagaacagggtggcaattcagcagaagaggataattctcattcatccgctgaggaagataataagagaaaacggcaacagactccagcttatgggaaacaagcagagcatctgaaatcgataatcaagtcttgtggaatgactattccacctactgtgtatcggagagtcaagcaagctgctgagaacaagcgtgaggcctgtttgataaaggagttacaggatatacttgaaaaggaaggattgtcaaaaaatccttctgaaaaagctcggaccttagcctctgcgagcagccgagcacaaaccatgaacgtcgggctaccggtcaaaagcaaaaagtg

SEQ ID NO: 32236 - DNA, 1458 bp, Zea Mays
ctatcctctccctcagtgctcacgtctccaccggtccaccccctcggcagctcaatggcagctgcgacggcgccaccgccggcggcggttgccaccaccctctcgggcctcatgcgctgccagaacatccgtagcagcaggcctagagccttctacgcgaggtgcgcctcctccaacgcgagcgcggaggcggcggagagccggaagggaggccacggcgggacgcgcctggaggaagccgtgcccgtcggcgaggggcgctcgagggtagacgcctggatatcggcgcgtctcggcggcgggggcgttagccgcgcgcgcgtgcaggccagcatccgggccgggcttgtcgccgtcaatggccgcccggtctccaaggtttcgcatactgtgaagggaggggacttggtcagctgcacggtgtcagagctacagccgctgagggcagaggcggaggacatcccgctggacatcgtttatgaggatgaccatgttcttgttgtcaacaagccggctcatatggttgttcacccggcgccaggaaatgccaaaggcacattagtcaatgctatacttcatcactgcaagatctccacatttacctgtttagcacgcagctcagctggtgatgaatgcccggattctacggatgaagacactgatgtatttcatgtggatcagtttgctgctgaagatgtaagttcagaagtccggaatgctcttgtgcgccctggtattgtgcacaggctggataaggggacaagtgggcttcttgttgttgctaaggatgagcattctcatgctcgattagcagaacagttcaagctgcatacaatccgtagggtatacatcagtcttacttgtggcgcacctaatccaaattctggcaggattgaggcttctattgcacgtgatcctaacaatcggattcgtatgactgctattgctggatcaggccacagatatgcacggaatgctgctagtaggtacaaagtaagagaggtctttgctggtggcggatccgcactagttgagtggagactagagacaggacgcactcatcagatccgggcgcatgcaaagtacatagggatccctcttctcggcgacgaaacatatggaggtacccagagcatggcgttatcgctcctgagaccaaggagtccttcgaaatatcacagcggcctttcgaatctgttgtctaaagtggacaggccttgccttcatgctgcatcgcttggatggaaaacgaacaacaaacaagaggatcgctgggacctagtcaggcggttcatgtgaatgatagctattgtgatatatataacataaccagtcagtttgccagcaataaacatgtatttagatattacacttgttgtcttgttgatgcatctgagactacacctgcaatagctagctgaagttatgcattcgtgatgaacagaggtgcgaagggag

SEQ ID NO: 32237 - DNA, 3030 bp, Zea Mays
attagctgagctcgtacacggccggccctctctcggtgcgtgcgtttgcgtggctgtggcaatatacggtgcgtgtggggcggcggcgacgagggttttgctgctccgtacaccgcgtgcagcggcgacgcgaccgcagctggtcgccgccccggatcgaggagggggaggagccggcggaggcccctgtggtggctgcgggggcgggagcgggagcgccatgaggggcggtggccgtggcggcggcgggaggcagccttcctacgcggcgccggacggggcggatgcggcggcgatcccggtcgcctcaaggaagatggtgcagagcctcaaggggatcctggccgaccgctcggagggcgagatctacgccacgctctgcgactgcggaatggaccccgacatagccgtcgagaggctcatctcccaggatacttttcatgaagtcagaagaaagcgggataggaaaaaggagactaaagttaatcacgaaacaaggcctcgacctttccagaaatatacataccgaggatataaggctgtttcagatcgaagtgggcgagaccctacaggcggtttcaaaggccctgtaaaaaaggaaccagagatgcaagctccactaaactcatcagccttggatgtcaagacaagtgacactacagaaatattttctgctactatgtcgcccttccatggctgaaatagtgaagatgggcaggcctcaagctaaagttgggagcagatctgttgcaagtagcactgcgttgccaaccgttggtgattcagtcatttccaatacaccaaatcttgtgcctgaggaatataacagaactgtttttgcatcagaagcaggccatgtcgcagcagataaattgccaaacggtgctgttgaggtgcactctctacctaaagatgcttccgcatttgatatgttaccttcagctgagggaacagatgttgaagccccttccatgagtgctaatgcacaagggtcatcaacgccagatgccaatgaagatgacattgaaaaatatgcaaatttggaagagggcaatacagaaagcttgatatctcctggacaagtttctgcttctggtaaagatatacaatcagaatatactgaagttgtcagccatgtggatgaaggctcgatagagaaaacaaatgactttcagctcaatggccttccatttgagcacaaccaaaatctgaatggagacgtgtctacagcgacaacacaatttgatcatttgactctgcatgagggaccaaaattgtccgatgataatccggctgtaataattcctgatcatcttcaggtttcgaatgctgattgtgcgcatttgacgtttggtagttttgtgtctggaacacttgattcatccttgacaacaaaacctcttgaaagtcatggggatgctgcggcagttcctgatgatgattcaattgaccaatcagatggcaggatccatgacgatgaaggcaaggtgactttagctactgatgttaatgaatatgttacttctgcggcaaacagcaacgaggagaatcttgatattacatcagtacagcaatctgaagtcactagagctgatttcttggatgtcacaagcaatactgaatacaacctaacatcaactccagattatgcaacttcaagtgcaccgttgcaagattctgcttcacagagtttacaggaaaaccgacaattccagaacatctctcctttctcaagcttcatgcaaatgcaaaatggtctcctgccaccagcaattccaccattgcgtgaatttgatccagcattttcactattgctcacccatcctcctatgatgcatggtacaatgtcatcatccatgagcaatacaactgtttctacgcagccccaagagaatgccaatccagttggtttacccaaccctcaattgactcaatctcagcaaagcaccagcattgcttcagggcctccactccctcagcatcttcttcatccctatgctcaaccaacccttcctcttggctacgcaagcatgattggctatccatctcttccaccaagctatgcatatctcccgcctgccgcttttcagcaaccatacatgaacagtggcttgttccaccaggcagcagcggcagttcccacctcaagtgtgaaataccctctaccgcagtacaaaagcaacattgcccttgctagcttaccacagccaggctctttgctctcaagctacgttgggggctttggaactgcaagcaacatgcctggaaatttccctctgaatcaaagcacagcagcagcaacaacaactcttgggtttgatgggacggtcccttcacatttcaaagatggaaatcaatttatttctcttcagcagaatgagaaccctgcaatgtggatgcatggtgctagttcacgagggatgcccccacttgcagccagtaccatgtatggctatcaagggcagagtcatcaggccggccttcggcagggccaactaccttcacaatttggctctgcgcttgggcagtcacagccaggcctgggccctgaacaccgaaaccctagcgatagtaacctaagtggcgctgctcaggctaaccaaatgtggccaaatacctactgatccatcccccttgtcgacttctgtggaaggcggtcctgttgtgtgtgcaacgccggtgaggccatgcagtgcttgtgttctgatccaggcacgcggataccagctgtgcctgtgcgcatgagtcgctgtcgtgacattttgaggcacaagagacatatgttcgagcatgctctacctgtagggtttctaggatatggcaaaagaaaatgtagctcgatctatttattcaaattctgatagagaaaggacttcctcttttctattttattctcttttgtcattcacatatcatgtgacaaataaaaccgaaatatctaacagcagcgccattagttcccgaggaagtgaaactttacatcacaggtattgcgtgcctcttggcttcaattttatgattgaggtgatt

SEQ ID NO: 32238 - DNA, 855 bp, Zea Mays
gtagatccaatgcccagccctattccaactcaattcgccgcgtcacctcctcgtctgctttgacgacccgaccacgccagccatggacgccctgacgcgcctccaccgctccctcgtcggcggcgacgacgaggatcagccggaggactccatccttgctgataccgaagacctctgctccctctcccctctccagaggatctacgccttcgcggcatgtttggtggccggactcaccctcatgatcttgtcttttattgtcttcgcaagacctatcaaattcgcagtaatgtttacatttggaaacatattggcagttgggagcctttgttatgggccctcaaaaacagctaaggatgatgtttgatccagttcgtctgtatgcaacggctgtttatgttggatgtgttgttttggctctaatctttgctctttggattcatgacaagctgctaacactgatcgctgtcatatgtgagatctgcgccctattttggtatagtttgagctacattcctttggcacgaaggatggtttccgacctgatggtgaagttctgtgacactgaactttgagctgctgcacgcaataacaacaacaacaaaattcttctgtgtctgaagcctgataaacctatgggttcttctcatttgtccatttcctttgggtttaactttattttgtaaacaaaacgagttaatatgtactttttttttgtaaatgtatgtcagtgtatttatctgtaaatgtacactgcatctttgaatcagatattctgatcttgtagtgctgcaaaacgatgagttcacagattggggaactaatcacgggtgcaaatataagaaccactacatg

SEQ ID NO: 32239 - DNA, 3689 bp, Zea Mays
ctcgtggttcattcgcaatgccgcgccactgatttgtgggcggggtggcggggtccgttctgcttctgatccgtgctcttgcgatgcgaggagctgaacgacaaggattgcggccggtgctgcatctatacgagtgacttcgctaaaatgggtcatgtcctcatcatcaggaccacactttcaagtcaaaattgaagataccatcttccactattccactttcatgtcaaaactcaagatgacggacatgaggcgtcactctgtggatgtcccgctgtcaagaaccttggtgcagctcaagcgattgagatcgctgcgggatccagcgacaaactcaatgggcaagttcgcatctcctgccgaccacatggtgtgggagactgcttctagcaatggggtggctctggagctcggcaggtcggcacataatcaccaggttgaagaagacgaggacgtgggagccgagcctacaatggggtcggagcggagttttcggggaccaaacgcaaggactgcgtcctacaggagatcttctgctgtcaggatcagaggcttgaacccaccaagaaacaagcaggttcatcgtgtccgccgagacggtcaccgcaagtcagtggactctagccactcgaatcatagttctatccgtcaattggcgaacaatttggtcaacaatgtggatgcagaggaggaagtgaattcttatgaaaggccaaaatttgcaatgccaggtaaatctgacgaagacgaagtgaaaatgccaggccactccaaattcaggagcaagccttcggctgcaatgagccgtgtcgggagcccctgcatgtcagctagcgaggcaagatcagggcatggaaccgaggatacacgactgaggtcaaacgatgtcgtggggtcaaattttagtggctgtggtataagctactgctggtcaggagcgtcaaagtgccgagagctttattctgacagtgatggtccagatcagcctctcttatctacagatgggactgaggcagcgttccaaggcaacgtaccatacactgagacgcccaggtgtctaagccagaaatttcgccctcgttccttcagcgaattggttggactaaacgttgttgcccagtccctcttatattcctgctgcaaaggaaaagttgccccaatgtacctgtttcatggcccccggggcacaggcaagacatccacggcaaggattttcgccgcggctctaaattgcgtgtcccttgaagagcaaaggccatgtgggttctgcaaagagtgtgtcatccttttctctgggaagggtagagatgtgaaagagcttgacgtggcgaaaatgggtcgtttaggtcgagtgaaggcgcttctcaagagcgcatccctcgtaccctactcttcgcgcttcaaggttttcataatagatgaatgccatctcttgcaagaagacgcatggtcagcaatactgaagagccttgacgagccataccggcatacggtatacattatgatcacttctgacatagaaagcctgcctcgcgcttccatcacacgttgccagaagttccattttccgaagataaaggtggcagatattgtatacaggctggagaagatctgtataggagaaggattggaattcgaccatgatgggttgtacttcattgctgcaaagtctagtggttctcttagagattctgaagtaatgcttgaccagctcagtttgcttgggaagaagatcacaatttctcttgtgcatgaacttgtaggatcagtgtctgatgacgagttgattgagttgcttgatctagcattgtcatctgacacaaccaatactgtaagacgagcccgagaacttatggggtcagcaattgatcctctgcagcttgtttctcagctggccaaccttattatggacattctctcaggacgatgtcaatctgctgtcagtgaagtcagcaaaagtttcttgggtagatatgcattatcagaggttggaataaagaaattaagacatgcactgaagatactatcagaaactgaaaaacaattgaggacatcaaggaatcaggctacttgggttacagttgcgcttttgcagtttggcaccaatgaacctaaccttattgctgaaccgaatgatatgcattcacattcagtaactggatatacagatgactgggtttccaaggtgcactcaaacaccaatttttgtcaggcatgtaacagcagcaagtccaactgttctgagagacactgtagacggcttaagcttgagaacatatggaggagagccattggaaagtgtcgatcaagatcagccaaaagtttcctcaggaaagaaggcttcttatcatcggttcatgttaccgaagagctggctatagcagaagttggcttcggacacccagatcacctatcaagagcagagaaaatgcaaagcctaatagagtgctctttacagcacgttcttgggtgcaatgtggagatcagattcaaacttgtaccttgtccagtgagaaaagatgctaggttgaagagacactcgttcagttttctcagttgctctggccggaagcaagagctgtcagattcagtagtgactgatgaagacgaagctgtgaggcctggggcaagggagacaccgcttaaaggctacacctctagccagcaggagtcaccatataccatgcaacgtgtcgattcgaaaccaacagcctatggttgcgaggatgatggtcggagcaccttgacgtcgaacagatccatgacagatgacatgacaaggacgtgcaggtccgagactaactactcaaaggggggtgtgagtgatcagggccgctttggtagcatccaggagcctgacctacagccaagctgcttctcgcgaacactgaggcttcagaagaagctgttgtcttctggcgcagcgcacaccatctgtctgaggatccagccgcataacaagatggaattcctacctaagaaggaatttgatacgtacttctgcgcgtatgagccttacgagcagtgtccaagatcagtttcaagggctacttacagttcaagagatgatgacttgtggagcaagaattcacggttcggttcaaatctactctgctggaaagccccaaaacaacccatgtaacggaggtacattactctgtattttcacatcacttggtccgtcggaatagccatgtgaattcagcgtcttggctcgctcggttgctgtttgctagtgttcatattacatgttgaccccagttctgccagagcccagagcactttcacaccagcaagctgctttcttacaagcgtaactgcgacaaccagcaccagcattgctgccggggaaaagtgaaccatggtagcagaacattggcatgctgaaaaacagtgtcaaatcattcagtttttgctaggacatttaccaatttctcccgaagctggaggcatgggcaccacctgtggggacaattttcaaaggaaatcccaggaggggtctttgtttttattgttcttggcaggcagctgaggaactattcatcagtgatgtttcttggatgtgctggtccttcaaaatgctaatgggcagttgtacatgttacgttatatgctactgaactcagaggctataatacactttttttatgtcaacacatagaaattaagatctgcttggttctatgcta

SEQ ID NO: 32240 - DNA, 930 bp, Zea Mays
attttcctttggattctcgcaccagaaagaatggccgtgttccatttgcagcatgaatttcctcaacaaatattgcaatagaatgacagtacgataaaattagtcgacaatctcaaaactgtgatgcatttatacactgccctatccccatctgacataataatgaactatattggaccaaaaccgggcaagtagttcggtgtcaacatggcaagtccttcgctaaatttaaaagcataaaacaacgataacgctggcacctaaagaacagagaaataaagcgttgatgcttgagttgaaaacccaagcatatatacactatgtaacgcggccaaataaatcagtaccaaagtacaaacggcacgccactgtgtattgtaggcgatcagcaagatagacgacgtagtaatgtgggcagggacaatacctcagagctcctccgagatcggtcagaagaggagccgcgcggcccgcggtgcgcattgcatcggaatccgaggaagcgcgagcaggatcggtcgagcgacaggcgcgcgccgcttgctaatcgaggcaccgccacggtccacggaggaggggcccagaactccaccgcgcaaagatccccggtgtcagaatcctacgtcgcgccccgcacccgtgtcgcagcgaggcagcgggggcggggcggcagcgccgcgcgcgccgggcatttggcggcagcgccaaagggcacgcccggcgcggtgcggtccggtccgatcgggagaggagaggagcccggtggcgcggggccgggcaacgccggaggaggaggaatccaatcggaggagcggcagaagatcacagacctcggcggaggagcgggagggagggagcgccggggtgggaggagagagaaaaaaaggcgagtttgtttctatttttattattttggctgctgctcttttt

SEQ ID NO: 32241 - DNA, 223 bp, Zea Mays
catcggatctcgatttatttccatcttcaagttctattatcatgtgaggagttcaggctgctcataaccatgagcacggctgatatatcagttttacactctgcagaggtggcacatctttacccatgagtcgcgattcccttctagcccgggttagctagacccgtattcacttccaaggtgaatggctagggtttcactacgaggcttctccctagagtcc

SEQ ID NO: 32242 - DNA, 1847 bp, Zea Mays
gccagccagcttctgctggaacaagaacagtacaggtacagcctcctccctccacagcagcgacaccaatggcatcgtggtcgtggacctctgttcactgcagcagctaccccctaccggggccgtcggcacgcttcacgccttctctggtctccgcaacaacaccggcgctcaggcggacgagggcgagggggcagctgcagcgatgcctctgttcccagtacgccggcgaacgccagccgccgccgccgccaccgccacagccggagccggactcgccgcagcagctggagcgcctcttctccaacctcaaccagaccaccatgaagcacgagccagggagcgtcaccagcgccgtcttccttgtggctggcacaacggttggagcaggcatccttgcaatccctgcagtcacacaagaagctgggttcttggcctcggcagtcatatgcatcctctgctggtcatacatggtcgtcacggggctgttggttgctgaagtaaacgtcaataccatgtgtgagctaggatctggtggcgtctcactggtctcgatggctatgcgcactcttgggacatttggagtgagaacatcttgcttatcctatttatttatacattatgcacttcttgtcgcatacgtggcacgctcttcaaatatcataacaaactcattgggcattccaatatgggagagtgctaccctgttttctctagctttcggaggggtatgttactttggaagccagcgattgattggtgcagtaaatggagttctggtagtcggcatcctagcatccttcacttctcttgttgtagtggcaagtggaaacctacagtggagttctcttcttgaagcgaattttgctgctgctccacaaagtataccaataattgctctttcatttgtataccagaatgtggttcctgttctctgtacaaatttggagggagacctgtcaaaagtacgctattgtggcgggtactgccatacccctggctctgttcctagtatgggatggagtaatcttggggacacttccagaccttgcagggagcagcactgtttctgaccccttggaactacttagatcgagtaatgggatagtggggcctattgttgaggcgttctcatttctcgctatagccacatcatacattggatttgttctaggaatctcggacttccttgcagacttgcttaaactaccaagtggccagaacaaaccgctgccatacgtattgactctgtttcctccacttgttctgtcactgcttgacccggagatatttttcaaggcattggactttgcaggaacttatggagttctagtgctgtttggagtttttcctgccgctatgtcttggtcagagagatattcggatgagttggaagctccagtaccccctatagtccccggagggaaatttactctctcggctgtcatgggaggtgcattgcttgtgattgttccagagttaatcaaggatgtaatgcaactacaaggactacactgacaatcggtgcaagtgaaaggacatataacagttacagtaaaacggtccttgagatttttgttgcagtaacaagtacatgtagcaaaagcaaaggcaaaactcgaaagcaatcaagtgcagagattgcagtttcatcgagcatcgacgttggagttgaattgttttttatgagattagcacggggttcagaacttcggttaaatttctgcaaccgaaagaaaaatctaaaattccgtattacactaatatatgtgctttgttgtgaatatataactttgtaattatattttctattgtttatgtcacataaaattcttcttttcattaga

SEQ ID NO: 32243 - DNA, 698 bp, Zea Mays
cacacaccaacacataccaagctctctctactctctcaagatgtagctctagtagtagttagtcttggtgggagctctgctaggagtctggagtagtcttcaagagtctgaattatctacatgagcataagaaatatcaacagaaagcaggccctaaaagataccaaacctatagttgactcgaaagcaatgtctttggaaaatgaaagcgcactacagacggtgcacgtaagaagaggtggaagaaaatgtcaatcctatgggagctatcttactggaaagacttagaggtccaccacaacatcgatgtcattcacgtgaaaaagaatgtttgtgggagtttgcttgggacactcatgagtgatagatggaaaaccaaggaccatgcaaaagcacgagctaaccttgaagaattggacataaggcccgagctctatcctgacagtaccagtgcccaaccacctttatccagaatatattgccagaaaaaacccgaatggcaatcatgaacctctacttatttaatgtaatctctcagaaggtcaagaacaagtactgcaagatgaagactactacgatgagtttgatgagatctaggcgtcgtctcctagtcaactagggcttgtggaggatcatcgtcgtcatatggtgtaatatatttagttattttgtaaagaaactccgattatttaataaag

SEQ ID NO: 32244 - DNA, 2332 bp, Zea Mays
atgggggttgtgcgtgagagagacgcctgctgggagtactgcgacaagctggatgggaacaaggtccggtgcaggttctgccacaaggtcctcaacggcggcatcagcaggctcaagttccacctgtcccagatccccagcaaaggggtgaacccctgcaccaaggtgaaggaagacgtcgtcgacagggtgaaggccgtcatctcggccaaggaagagtacaaggagttccagctcctcaagaggcagcgcgtcgccgacctgtcgtcggctgctgccccggcgaagtgggcgccggaggctcctccgtccctgtctacctctccggggcgagtggcctctcctgctgctgttattactcgtgccgctgaacagagtcggcttctcgccccggaagcgtccgctccggtgcccagaccatctgctgctgcggcaaacaacaagccacgcgccgccgccgcttcggaatgggagacagaacgatgtatagctgagttctttttcgagaacaagttggactacagcatagccgactcggtctcataccagcagatgctcgaggcgctcggcggtccgggattccgagggccgccagcagatgttctgcgggacaagtggctgcagaggctcaagtccgagatcctgcagaagacgaaggagatcgagaaggactgggcgacgaccggctgcacgatactggccgattcgtggaccgacaacaagctgaaagccctgatcaacttctccgtggcgtctcccatgggcacgttcttcctcaagacggtggacgcctcctcgcacttcaagacgcacaggggcctgtacgacctcttcgacgaggtgatccaggaggtgggcccggagaacgtggtccagatcatcgccgacaggaacatcaactacggcagcacggacaagctggtcgcgcagaactacggcggcgccatcttctggtccccctgcgcgtcgttctgcgtcaacgccatgctggacgacttctccaagatcgactgggtgaaccagtgcatctgccaggcgcagaccgtgacgcggttcatctacaacagcaggtgggtcctcgatctcgcgaggaagtgcgtggcggggcaggagctcgtctgctcggggatcaccaagtccgtgtcggacttcctcacgctgaagtccctgctgaggcacaggccgaagctgaagcagatgttccacagcgccgagttttcgtcctcgtcgtacgcgagcaggtcgataccgtgcgtcgagatcctggacgacgacgagctctggagggcggtcgaagagatagccgccgtctccgaacctctgctcagggtcatgagggacgtctcaggaggcaggcaggccatcggctacatatacgagtcgatgacgaaggtcacggactctatcagaacgtactacataatggacgaagggaagtgcaagtcgtttctggacatagtggagcagagatggcagacggagctgcactcgcctcttcactcggctgccgcctttctgagcccgggcatccagtacaacccggaagttaagttcttccgcactatcaaggaggagttctaccaggtcctggataaggttcttacgacccctgaccagaggcatgatatcaccgcacagttgcacgctttccgcaaggcacaagggctgtttggttcgaacattgctaaagaggcccgcaacaatacccctccaggcatgtggtgggagcagtacggcgactcagcaccgtcgctgcaacgcgccgccgtcagaataaccagccaggtgtgcagcacgctgacgttccagagggactggggcgtgatcctgcagaaccactacgagaagcgcaacaagctggacaaggaggccctggccgaccaggcctacgtgcactacaacctcacgctgcactccgagccgaaggcgaggaggaggccggacgcggacccgatcgcgctggacgcggtcgacatgacgtcggcgtgggtggaggactccgacggccccatcctcacccagtggctcgacaggttcccgtcggcgctggatggcggggacctgaacacgagacagttcggtggatccatcttcggcaccaacgacaacctgttcggcctctgatggcttccggctccagggggtggggggacatctgcctgttctcatttgttttgattaacacgagagccatgaagctgctgaaaatgtgctaagcatccatttcttctgcagtcatcattgctatcttcttcagtgtatttacctggtgccttggtgggtgcacatacatagctgacacatgggggccactctacaagaatgactcggg

SEQ ID NO: 32245 - DNA, 909 bp, Zea Mays
ctgtgtgtggcggaggtccgaacctctggaggcccagctgggcgagcccgagtgctagcccaattcacccccaggtcacaccaaattgccaaccgccctcattccaaaccctagccgtcgccagccttggagctctcggacacggcggctcctcctccactccccctcgactcctcctccatccccgacgcgacggctccatccccgacgctgagctccatatctgcttgtccgccggcggcggctaccactcgccagcaagccatctcctggagctggaggggtctgcttcctccttgactgcccatcgacatcttcgccctcgtggccttcgcgtcggtgcccctcgcctgtgatgcaggggtctcatccatgtggtgccacactactggttgccaacgaccgggaaggaaggtggtgtggatgccgtgctcgtgtcttcctctacagggatgctcagattccccttcctcactgggctccttagattcgccaacacgaaggagtaataggagctaataatatccaaccatcaatccagcagaatttaataggatatgagttgatatcaaatgcagagtttacattttcaccgtggacaccttttcctaccaagaggttcaaattttactgcaaaatcaacgagttcttggtggtgttggtatggcatccgatccaatggtggcacgtagaagtaaaatctgaaacatttgttttgatggttagcttgcattttatgctataattacctcaaatcacgtgttgcctttttcaccaatttatgacatctattgacatgttttactttaatttacgacatttattgatgtgttttgcgacaacctcatgtggggccacatttgccattatgaaatagatcgatgatttatgctaaaattcatacccatt

SEQ ID NO: 32246 - DNA, 1344 bp, Zea Mays
actgtttctataagcgcagggaggcgaaagaggatggataattggatcggatagccgtcccctgggttctgtctggggagcaggagcagcagtcgccgagagcaacccaaagcaagctgcagttcgtaagaggatcaggggccggcgccggaggagatcccccgcgctatttggagctccccaagaaatgccgtgtgcactagaagtgattgatgcaaggttacagagcacatcacatattcagtgcagcagatcatttgaccaaaacattggaagacgcttttcaaagggccatctgatacaaaaacctgttgccatttgtcctgagaacagtgacacctcatcaacaatacttctgtttcggcacgatccagactggaaacaagcaccattcttgtctgacactcaagaggtcaacaagggtaaatgagctgattgccggtgcgaaaccgtcaaattgccaaatatctggggacccaaagaatctggaggccagcctgcatgatctccatccagcgtcttggtattgtgttgcatggtatcccatataccggatacctgatggaaaattccaggctacattcttgacatatcactctcttggccactggattcgtcggagcagctcagcaggtggggccgctgttttgccagtcatgggcctgcagtcttacaatgccaaggcagagtggtggtttgagatgagcaagtccgaatctgaaggcgggcagtcgcaggccagtgaagcatccgagattctgaaggagagatcgcgcacgctgagtgaggctgcggccgtgttgtccagggccagcgtgctgaagaatgggcagatgagtagaaacagacatccagactacgagttcttcctctcccggagctgatttggaagtgcctcttcgtactcggatttagttaggtttcagtgtatgtatgtgttgttgacactaaagcttattctgcaaccgatgactggaagctgtttgcttagcttagcttagcaatataataataatgctagtcagttctcatccaagtgtcatgtcactgttattgaagtagatcagagatgaaacaggaaggaccacgaagatccatcggaactgcaccaagaagtccaccaaagccttcttcctcttgcggcgcaccaaaggttcatgcatgtccgaaacagcaaactacatatatcatattatggaagagcttctacactcgatggaagaaacgactgaaggaaacacattgttatctttgactgcaaggagatatctcaccaacacctagctgtaatgataaagctacaccatcacactctcattccaccatatactaatgtttcaggaa

SEQ ID NO: 32247 - DNA, 1606 bp, Zea Mays
gggattcttctatatcatgactcggtcatatgcttacgttgatgttggattatttttattaaagcgattctcacataaaccaattgaaaaaggtactgtatttgagaatgtacagcagcttctggcaacgataatcagaaaaaaaaacaaacaaacacggccaatggacgggggccacggggcttccattggaagcgaagagataacgtgggtccaaccggaactggctcactattctgttcggttccttccgaaaacacaacaggaaaacacacgcacaaaattgccgtttccgaatggccacggccgtgctccgccgcccattcctcgccgcgctcctcctccccgccgccggaggggcgtccgggacctcctcctggttccgtccccggagacgtaggtcctctccttccgtgcgcgcggtgtcttccgactcccccaagcccgtcgcctccacttcctcccccaccggcggtgacagccccgacgaggaaccaccggtcctaccgctcctccaggagcttgcggattgcttgattcttccgcccaagctcctcgctcagctcccgagcgaccttcgtctcgacctcaatgacgctgcgtttgatctctccaacgggccagttctcgacgagtgtggccaagaagtgggtgatctgctcctgaacctggcaaaagcatgggagttagctgatacgtcaacatcaaatagcattgccaagcagctgccgttgatggagccctacttgacgcgcagcgccaaatcagcgtttggcaagcggctggtgtcagctggaaggaggtttcagtcaatgggacagtacaaccagggagaactcaaaaagattgctgaaacaatgatcaagaatggtaagctgctatcgaaacacccagtggttcaatctgatgttcaggctatgaaagaaaaaaggagactaaagtttggagaacttgagttcggagtgactgctcaaagtgccactatcggttctgcagtagcggcaatttttggattaatctcatggcaactagcacgaggcgtgcaaagtattcctgacaatacaacgcaatacacaaatgacaatgcactgcagttggccaagtcgctcaagaccgcactgcttgttcttggctacacatctaccggcctatccttattcgcggcttttgggctgctgttgctagcccagcagattaactctgagaacaaatcggagtaactgacaggcactcgctgaagttgtggacctcatgccttgcctttctatgctccaatgaggcaaacgttcatagggaattgcatacactgggaccttgtgtgtatcagtgcatgcaatgttctgtataaaaataaagagccaattgtttgtgattacggataaaataatcggtggagatattgaagcaaacatggaagtcagcctgggactgactgaagaacaaattgttagtgaacgcaacagggaactgcttgtattcaaaattgtgctttcggagtgtgagcatgatctttcctatgaatctgcaagctcaaaaacaagaaaccacgcatgaagcaagagttgacggtatctttttttaatccaaagctgggtaccacgtatcc

SEQ ID NO: 32248 - DNA, 1674 bp, Zea Mays
tcactgctgcctaacactaaacaagatctctctctcaggcccccgaccccgatggtttcctcgcacacccatcacatggccgcctcctccccttccacctcctcccctaatggcagatgctaggcggcggcgcccctcttgagaagtgaaagggaaagatttgttttgccgcccgcgccctgctcaggcgctccgcctcggtcgggccacacaagaccgacgccaggcgcccaggccagtggtcgacgcctgtggtgagctgataggcgatgtcgtcaccgtctccggtgctggcaagggctgcgcgtctcacgtgtaggtaaggttgtgatctttctgcccagagatgtgcgatttgtcttcgcttgatctgagtgacagtaaaacggagaccggctagtgttgttcctgaaacctgttgatttatggggagccagacaatcgcatcacaggctgggggaggtggaagaggcatgggtagtagtggtggtgccggtgcagcgcaacgcgggcagatgcagagtctggcaagacaagggtctctgtataaccttacccttgatgaggtgcagagccatttgggagaacccctacacagcatgaaccttgaggagctgctgaagagtgtctttcctgatgacctggaccctgatggtggcactaccagccaatatgagcagagttcgggcctcttgcgacagggaagtatcacaatgccgcctgagctcagcaggagaactgtggacgaggtgtggaaggacatccaggatgcaccaaacagaaatgttggggagagtggtcggcggaagcgggagcggcagccaacgcttggagagatgacgcttgaggatttcttggtgaaagctggggttgtcgccgaaggatatctgaaggacttgaatggcataggcagtgtggaacaggttggtagcactggggctgcgggtttgacagcaggggcacaatggttagaccactatcagcagcggattacagctatcgagccccatcagcacaggcaacatagtttgccaggtgcttacataccgggtcagttaagccttcagtccctgaatgttggaccaagtgctattttggagtcatactctgatggccacatttcttcaccgatgatgggtgcactttctgattctccgatgcctggtagaaagcgtggttccccaggagatgtggctgataagttggtggagagaaggcagaagaggatgatcaagaatagggagtcagctgctcgttcaagggctaggaagcaggcatacactaatgaactggaaaacaaggtttctcgattagaagaggagaataagaagctaaccacgttaaaggagttggaaaatatacttttctctgagcctcttccggaacccaagtaccaactgaggagaaccggctcagcgactttctgattgtatgcagaatatcttgttttgctgtaggttgtaagtcctgtagcttactagcaggagccgagcatgtgctgtccgaggccttgctaccagtatagtatgtaaaatcttcaggacacatgtaggtggtcggagcttgtttacatggtgtgacttaacagatggatacatataactatgagaagtatgggagccctttctttggtaaccggagttaaatgacttgactcttctggtcgttgttctt

SEQ ID NO: 32249 - DNA, 755 bp, Zea Mays
tgcagcccgtatctccgcctcccgcggcccgtctcgacacttccatcaccgcccatcgaaatccttctaccgccccgctccgtcatccatggctcgtctgctcgcggcgcgagcccttgcgctggcccgcccctcggggacgccatccgccctacgcttctgcccctcccgtgcgctgtcggacgaggtggagttcgtcgagatcgacctatccgaggagtcccctgcctcttcatccggaggggaaggcgagggcgactcagccacggttcaggcgcagatggggtcgcggcgcctggaggacgccatctatggggtgctcgtgcgccgggcggcgcccgaatggctccccttcgtgcccggggcatcctactgggtcccgccgttgccgcggccgctcggggtggcgagtctcctcggcgcggctgtgtacaccgcgaggggcgccacggcgatgacggaggaggaggcgttcagcttcactaccgtacgggggtgtccatccgcggcgtactttgtgggaggtttgagcgggttcgcaaaccaagccgtgtgcatgtactctggtctgggttgggtagctctgcacaggtggtcagagtttttggtctccttaggctccaaagtgtccagggccagaaatggaaaatttctgcgtccagtgaagaaatcaagggaagatgctactcaaactgacgatgatgatgaaagctaattctatgctgcttcacctggggctcctaccgaagagggct

SEQ ID NO: 32250 - DNA, 1302 bp, Zea Mays
tacggaacaatacaaacaaacgaagatccgccatccggctccgcttatgtgatagcccggcccaacactacaactgcctctcggccctctcctcggcgacgccactactcctgcctcacgccgccgctcaaaccgcagaagagagaagagaagcacgcccaaaaattccgaggttttcacctcttggagcgcaccaacaccacccggagaccggagcgactcgccaccggcgcggaaaaggagggcggaggctcgatggcggatgagaatgctggaaagaaagaggaggaggaatttagcacaggccctctgtcagtcctaatgatgagtgttaagaacaacacccagcttgaggataccagattgagattaagacacctttcgattaagacaccagcttgaggtcctcatcaattgccgcaacaacaagaagctgcttggccgtgttcgtgcttttgatcgccactgtaacatggtgctcgagaacgtgcgtgagatgtggacagagatccccaagactggcaagggcaaaaagaaggctctgcctgtgaacaaggatagattcatcagtaagatgttcctcaggggcgactcggtcatcatagtgctgaggaacccgaagtgatcgcccaaccagtcaccttgcagcagttatgccccttctctgggttcacggaatccgtgcctctgttgaaaaaaactgtagcttatgtatgtcttggcggattagctggttatcttgaactgacgttcatgtgacatggcaatggcacatgaacatacgtttcatgagtttggttgttaattggcgcttgcagtactttgatccctgaatgttgagattgcacttctgcttattgtcttgccccattgcgtgacgtggaatacttgctaaatggcttgtatgacaaagtcggtgtggctgcagcattggggcgaacgagcgcagaagggagcaggcgacaaagtggagagcacagaggctggcgctgacggagtctagcgctccttttttgtgtgacttgtgtccgttacagcggtaacataaacagaattagggtctgtttggtttgtggctaaatatgccacactttgcctaaggttagtcgtttgaattgaataactaatcttaggcagaaaagttaggcaaagtgtggcaactgagtcagtgaaccaaacatgcctaggctgttttagggagccgtggagttgaattgttggacgggatgatgtatgtgtgctgcagttttgcctttatatacttactattttttttccaattcacatcatattcaatgttca

SEQ ID NO: 32251 - DNA, 1773 bp, Zea Mays
aattattctcacacaaaaatgtattttctaaatgaattcctttgattttctgttctctggaccgagcgcactatttacagaaaacacagggactacgtcgcaaatattccaagactcagtgtacagccgcataggacggcgggtttatttttaaactaatcagggactcttttgcaatgttacgcagccgaaagggtttcgtgggatctcggtcgcacagattacaataaacggcccagattaaatgatgaatcggtacgcacccggggtcactggatttcgatccaacggcccaagatcgcccggatgaaacggtacagggccgactaatcttggtcgttggtggcttgatcggcggctaggatcggaggggccaacaggtcactactaactttaatcgtgaccacccctctacaatccaacgatgccagggtcgtctccctcaccagattcaatcctagccatccacagccgaacgaacggccaagaggccatcaccgacctccggccagatcctctaagacgcgcaggcatcccacgatggcgctagccgccggcgaggccacggacgacgccccgctgctcaatccacgaaccaacgaattcaatcgccacaagaaggacaaagcgaaggatgcagagagggtcttaccagacatcagagctgtgaaaccgttcgccgcgcagagacagccagtggcggcgcaatccttccccagatctcgtgctgtggtcgaggacgagcttggccaaaccgatccaaacctctgcgtgaatcatggagaaccggtgaagccgccctcactcagcccaccgccagaagcgaagctcgtttcgagtcgtggcttcgggaagaggacgacccgtcaggaggggcccacgcgccagtggtgtgagacggaagagcacgcgtgcggccggctgacacggcggactcaatctcgcccacgcacctccctcccccacagcggcgacggcgacccggaagttctgccctggcgcacgcgcgaggatagggaagatgttctgggcgaccctgcgacacctccaaacctgtagatgtcttggatgcttctcctcaacccagcgcccttccgcgagaccgaggttggcggcccctcattgctgcagcggtgctgcacggttcatccaaggagtcgccatccaagctctcaccccgcgcggcaaggagctctcggcggccatccaatcttcctccatgtggtgaagcagcaccgagcggcacacgcagttgactatgacccctagcggctgatctgtcccttccccgccatggcgcacaatggtggtcgatgaagacaggatggaagagatcatggcccaggttttatagccaagcggcggagtccgatacagaagcccggagtccgcggagtacgtccggcgggggcggtcgagttgttgcgtagcccagatttccggcaagctgttgcaaggcttcggttggggaagaaaccccgacaagccgggcccccgcatcagtgaaaaaaagatgggcaggctgaccagtgtctggtaagtgggccccacgtcaacacgaagccgaggctggcagtgggacaagccgcgacaacgggaagcgcaagcgcgggcggaatcaagcccaaggctgaccggtgggttccacccgccagtgtcaaacgcgtggattgggctggttgaaggaggaaagggagtgggctgaagggctaggaattcggcccatcaggagaaaactgttttcttttttttttctctcttgttcatttctat

SEQ ID NO: 32252 - DNA, 931 bp, Zea Mays
tcgaaagggtgttataaacatgttcagacttcagagtgtaaaattgtagatttttggggggtaatatcattttctcctggcaagatgtggctacgataatctaaagccatcgcacggcaaattggccagcggcggcggcaggtggtggtgtgagcctgcgaggcttcctacctgcgctggaagtttaggtgcttgatggcgaggaagaagagaaagacgaagaggccaatgatggcaagatggaggcaggtcaccagcacaaagtagcgatcctgcaggcccaggtacccctctaggaactcacgcaccgtctgctccccgagccccggcaccaggatctgctccgtcctgtctgcgagctgtgagaacattagcccataaaccgtccatgccgccggatccgcccagtacacccaccgccaccacacaggcatcatctgcagcaaatttactcaactcgtcagccgattcagatggggggttacctctctcacgattatgaagccagagaagacgttccaaaagataaagatgaggaacgacagccccatggcgatctcgatgttgggggtcagggccaccgtcatcatcccgtatagagtgtagtacatgaagctcatcacctggtataggaagaaccagaagaatttgctcgctgtcacctggaacccaatcattgggtacacgattgatgagaagatcatcacttgcaccaacatgtaaggtgaacggggacgtccaatatccccagcgcaaccatggttggagatcatctgtttcagtttgcagaattggttaacaacttgttgcacaaacttttagtaaagattgtatgtcttgtactcatgcatgtttcatggtgtatgctaagctacattcatctaaccttttgatatgacgaatcctccaagtatgtagattgcaataagag

SEQ ID NO: 32253 - DNA, 1712 bp, Zea Mays
aaagcctcatatcatttttggactgtccagattggtttggcgctgaagaagctatttgaagagggtgtagtgaagcgagaagatctgtttatcacctctaagctatggaatgatcatcatgctcctgaagatgtgcctgaggcactaaatgacagcctgaatgatttgcagcttgagtacctggatctttatcttatccattggccatttagagtcaagaagggaacaaataccagccctgaaaattttgttacacctgacttccctgctacttggggggcaatggaaaagttatatgatgctggcaaagctcgcgctattggtcaaactaagctccatagcttttgtcagtcaactggtgttcatctaactgcttactcaccactaggttcacctggtacaacttggatgaatggtaatgtccttaaagaaccaataatcatctcaatagctgagaaactcgggaaaacttctgcacaagtggctctgcgctggaacattcagatgggtcacagtgttcttccaaagagcacgaatgaagaaaggataaagcaaaaccttgatgtttatgattggtcaattccagatgacttgcttgcaaagttctctgagattaagcaggtatctgtgtcctgagtacccttcacaatactttaatgaggataaagttgcttgatatttgttgattaataattgaactttataggataaaatacatttcaaaactttaccgtgttatgtgctcttcagaaattcatatgatttattgtgataaacaaatcacttaaagcattctaaattgctaggattgagtagcatttgcacttttttttagcttccttggagcttggagcaccactggtgctgtgacaggaatctagtaaaggtgtctacttatttttcaaagaaataaacacagctgcaatttttgttataaacatatcattacacatttaagtcgagttatgtttcagcgagctgcgctgtcccctgcccttagacacccacacgcagtagttgaaaatttggcctggtgctgtggtcacagttctctggcagcctatgatgtttttagaataataagataagattatcaaccccatgaccggattgccccttattctttttcataaccacgctcatccttgatctatggtgctctatgtacaaactccatgagaactagtattgcatcacacctattatctgtaacccccggccccagtggcgaaaccagactataatagaagcctgggcaccacatgcaaatcagcatgatgccactttctatctctcctttcgcaacgcatccagctcgatcccgatactgctgcacagcaacagaagcgaggggcacgccgtggtctagaggagcgtcaagtcctcgctgtgctgctcttggtgctctccaccatcttcgttttctctgtcttgtactcgtcacactacagctaaccaagcaccgtcagataagagttcaaacatctcgttgccgtcagcaaacactttagcagcgggatgtaccatcacgcagggcaagcagtgccttgccaacagcggagcccccgggcacatgcctaggctggctggaccgtggctccgccgctgcccggcccccttgtttatggctcgccaattctttcttgaaatgctgccacaagatttacttatgcttcatgccttgattactgaacctttccctctgagattct

SEQ ID NO: 32254 - DNA, 1241 bp, Zea Mays
ctttcatcaacaaatctggggtatcttttgtagctaatacctgtcatacatcatgacaaatctggatcatcttttatagttaatacctgtcagtacatgtactacatcggaaggccaacttgatgatcctggaagccttgaacattgccagccctcagatccgcagttggttcttactctacgggctcgtaatttttaggataagaagccactgctcatcagcaagttttcccagcttcctgtatatgtccttcaactgatacgaaggtgcatacatcagccttgaaaagcaaaagcataaaaatgaaagaaaggtgcagtagccgaccattttccaatcgcaagaacggtggagttccattgctgtgcaaagctgatcaaaggcatcttcgtttgcttactcagttggctacagtacatttaaatgatatgtgacaatgccctcagccccaccttctcttttatggtgcttggtactcaagaaaagaacaacaatcatctgctccaaatggttcaatactttacatatcgtttctcttggacaagagtggggttcggcgacgctgtcattgacatggcgtttctcttggacattatgtcgaacagtttgagggcattgcggagaacagcgaggagcgctgactatgggctgcaggaaatggtggtgttcgccgcgggggacctgcgcaggcggatggtgaggatgacgagagaagttggcgctatctttccagaacgatgacgagggaaaagggggcgttcggacttggcgcaggcgagctgtagctgggccgtcgaagggagctggccatagcacgtcggctaagggcgagctcgccggcattgaggtgggagcagaggcacggctctctggcgacctagcccagccccgactcgctatggctgtgacggcttgaggagagatggtcgaccgtgtatggaggacgacgggcacggttagcacagtcgccgtcggagggggtggcgcatggggaaagtgccatggatgggggacggcgtcggcgtccacggccaacagggaagggcgtgacgcctgccatggagggggagtcgtgagagcttcggcagggggagaaagagggcctgctcgccggcctagggaagaagggcgccgccaagcagggccagggggacggcggcagagggagaaccgagagggaggttgtcgcgtggagcggaaggtcggggagtggcgtgggtggacagagtcacgaacgaac

SEQ ID NO: 32255 - DNA, 1418 bp, Zea Mays
ctgaaccctaacaaagcaggcgcctttttgctcctccctcccttccacgcaagcgactgctgctgcttccccacaccccccggtaggctcaccgccggcgacgagcacgcgtcccaccacacccaaacccaccgccaccggtgctcgctccgcccaggaccagcgggggagcctccagatctcggcgcgccgcgcaggccagcatggcgtcgtcctccgacgagcagtccaagccgccggagccgcccgccgccgccgccgtggtcaccgccgcagcaccgccacagacgcacgccgagtgggtcgcttcgcttcaggcctactacgctgccgcggggcacccctacgcctggccggcgcagcacctcatggcggcggctgcggcgggggcgcacttcggcacgccggtgccgttccccgtctaccacccaggcgccgccgcggcgtactacgcgcacgcatccatggccgcgggcgtcccttacccgacgtgcgaagctgtccccgcggtggcgctgcccactgtgccggaagggaaagggaagggtaagggcggaggcgcgtcgcctgagaaaggcagctccggggcgccctccggcgaggacgcttctaggagcgatgacagcggcagcgatgagtcatcggagactagagatgatgacactgaccataaggattcatctgcgcccaagaagaggaaatctggtaacacatcggctgaaggtgagccgtctcaagctactgttgtgcgatatgctgcggttgagtcaccatatcccgcaaaaggaaggtctgcctcaaagcttccagtgtctgcacctgggcgtgcagcgcttcctagtgccaccccgaatctaaacattgggatggacatttggaatgcttctcctgccttggctgtgcctgcagtgcagggggaagtgagtcctgggttggcacttgcccgacgtgatggcgttactcaactggacgaacgtgaaataaagagggagaggcgaaaacaatctaacagggagtctgcaaggagatctagattacgcaagcagcaagagtgcgaggagttagcccggaaggtagctgacctaacgaccgagaacagcgctctcagagcagaacttgacaacctcaagaaggcttgtcaagacatggaagcagaaaattcacgtctgttgggtggggtggctgacgcccaggtaccaagtgtcacgaccacactgggaatgagcatcgagccgccgaagttgcagctgcagctgcagcagcatcatgatgaggagggccagctccacaagaaatctagtaataacagcaatgggaactgtgctggaggcagccacaaaccggaggctaacactactaggtgagatacagaggtggatgaggaagtgacaaagatgagatgagatgagatgaggtcc

SEQ ID NO: 32256 - DNA, 2562 bp, Zea Mays
taaaagtgtgttgttgggctgggttgggctacatgaagctcattctttatggagtgcctgaagaacaactgcaagagcaccaacaaagcctagtccagtacactgaggagcacaaggagcagatacctgatattgtaagacatatcttgtcagcaggtactgatatttcagaggctcggaaggtctcaaagaaggatgcaaatagcagcagcaacggcgatgcatacagggagagtttgtcttggttgcagtggctgatgttcaaaaatgaaccagcagcaatgcttgatgacctggagcgttccaatgcaggggagcgtgctgtctgtgggtctgtctgggggcacaatgacgttgcttatcgctgccggacttgcgagagtgaccccacatgtgcaatttgtgttccgtgcttccagaatggcaatcacaaggatcatgattactctatcatatatacagggggtggatgttgtgattgtggtgatgcgactgcttggaagcgcgagggcttctgctcaaagcacaagggtgctgagcagatcaagcctcttccagtggagcttgcgtgttctgtaggacctgtcctggatgtcctcttgcagttctggaaggagcggatatgcctgctggaaccacaccatgcaaagggtagtgatggtagctcgtgcaagaggattgccgaagagttgacaacttctatctctagcatgctgcttgagttctgcacacgcagtgaaaaccttcttagttttctgtccctaagaatccgcgagtttcctgatatgttagatgcattaataaggtcagacaggttgcttgacaagaaggttgccagaaaattgcatgagtttttattgaagcttatcagtgaccctgcttttaagtatgagtttgccaaggttttcatacactactaccctatcacatttggggaagttattaaaggctgtaatgattcactactggaagactatccactgatgacaactttttctgtgcaaatattcactgtgcctacattgactccaaggcttgtgcgcgaggttgatttgttgggtgtcctccttggatgcttgacagatctgtttctctcttgcatcggtgaggatggtcgtttacagacaaacaaatgggggaatttatttgatgcttctattcgattactggatgatacacgctatgtgttgagtcatgaagaggtgtctaagcatgttgcttatgggaggcctgatctaactaggtcatggattaaactcttatcacttgtgcaaggaatggatcctcagaagagagtgacaagtattcacgctgaagatgagaacgagcatctatctgcgccgtttgtgctggggcactatcttggaattgtccagaatcttctgatgaggggatcattttctcctcctgatcaacatgaatcaactgatgtgacagtttgctccactgcgataaaaggtgtggaaagtgctgaaaatcagcggcatgcaaaagttgggagggtctcccaggagagttctgtatccgatctaagtagcagagacagctctttgtgctgtggattgccatcacctgctgcctggttagttcttcaatgcctgaaagccattgaaagttggctctggctggaaaacgatatagctctgaggagcaaactgtcatcccttgatgctagcagcaatgattctcacaaacttatggctttgcttgaagacccgttgacttctcttacgggaaacagttcaaatacaaatatgtgtgtgatggacgtcaagataaatgaaggatcacaaacagattgtactgcagattattatgaggcatctagttctcctgttcaaggtcaaggccaagaagcgatgcctctggttagtaacagtacaggcaaagggaagatgcatggcagcagcaacagtacagttgtacagttgcaccctgaggatgccattacttatactctgactgatggtagcattttgtatgctcatccagattcaagaatcgaggaactaggaatactcaatacaagaggatggcctcatgttgtctttgatgtcagttcacaagaaacatctttccatatccctttgcaccgtatgctttcattactactgcggaaggctatgaagaaatgttttggagaggatggacattcagatgtgcaatccaatgagttctttcctcagatacttagaggttgtgagccctatggatttgcttcaattgttatggagcatccactgagagtgagagtattttgtgcacaagtgcgtgctggaatgtggcgcaagaacggtgatgcagctatcctgagtgcggaatggtaccgctctgtgcaatggtttgaacaaggtttggagtcagatctgtttctgcttcaatgctgtgctgccctatcttctccagagttatttgtgcggacaattcaagagcgatttggtttgtccagttatacagatttgggacttgcagagcaaaatgagtaagcccaaatctgcttgtatgtttctgtttctgctttgtattttttgttcaatttatggcattaccatccatgtattg

SEQ ID NO: 32257 - DNA, 3138 bp, Zea Mays
cctctcctctcctcctgctcactcctcgccatcattcagctcttccccaaccttttccttctcccccatagggagcgcggcgcgggagggcctgtgctcctgcttgctttcgtggtgttgctgctgcttttcctctttgttaaaaggctgctccctccgtctcctgtcatctcccctttctctcttctcaattctcatcgcgctggcttcgcttggctgctaaggtcaaatagccatccatctgtccatacgcctctttccctttctctttcctctttaacccccctacgaggctccggtctcagggcgcttcgcatggccatggcctccgcggtggctccggctcctccccttgccagcgacgaccaaaccgggcaaaagcgccgccaaatctgcatctgacctccccaccaccaaatacccaaccagcaccacccaccgccttctgctttctttctttctcgctccttacagcaacacatagcgctcagctcacacctcacagtcagctcaggctcatcttctcagcgagttagcagcagcagcttgaggcccagccgcggctgcctgcgcgcaagcataatggagagcagatggcggaaggccaagatgtcgctagggctcaacctctgcgtctacgtgccccggacgctggaaggcgacgacgcggccagctcgcccgacaccgcctcctccacggcggcgctcgtgtcgccggtggcctcctcctcgtccgccgcgacgagcaccaacaccacccccacggccgcttcggcggaccagagcagcgccagcggcaaggtgctcatgcccaccaccccgacgccgacgtccgccgggctccgcctctccaaatccggcagcaaatcattcaagaaaacatgtgccatatgcttgaccacaatgaagcctggtcagggccatgctctcttcacagcagagtgctcacacactttccacttccattgtatttcggcaaatgttaagcacggaagcagcagctgcccagtgtgtcgtatcaaatggaaggagctcccatttcgaggtcccttgcctgctgaattacctcaaggaaatgcgaggattaatccagttaatgggtaccaaaatggaggccatatgaacatattgcgtccacttcctcgtgcacgctcttctggccggcttcatcatctggccacgttgctgcctgacactgaccctagtactttcaacgatgatgaacccttggacttgtcgtctgaagaggctaatgacaatcatcagggctgtttgagaacagtagagataaaaacatatccagagttcactgaagtacctgaaaatacatcagaaagaaacttcactgttctgattcaccttaaggcaccggttgctcagcacctgcagccatccagcaatctcggagatggcaacgggctaagtacagcccgtgcccctgttgatctcatcacagttcttgatgtcagtggaagtatggctggtaccaaacttgcattgttgaagagggctatgggatttgtcattcagaatcttggatcctctgaccggctttccgtcatcgccttctcatcatccgcacgtaggctcttcccactccgtaggatgactgagtctggtcggcagcagagcttgctggctgttaattcactgacgtcaaatggagggaccaatattgcagaggccctcaggaagggctccaaggtgatcgaagagcgacaggccaagaatccagtctgcagcatcatcctcttgtcagatggtcaagatacctacacggtctcaccaactgctggcgtacacaaaggagcaccagagtattgtgcgctcttgccgtccactaacggtaaccagcagaggccgctatccaagatgcatttgctcagtgcattggtggacttttgagtgtggttgcacaaggtctgcatgtaaaggtggagagcctccaccccgacgtgcactttggctccatcagatcaggcagctattctagcagggtttcagatgataagaggaatgggtccatagatgttggggacctgtatgctgaagaagaaagggattttcttgtgtctgtaaacgtcccaccaggctacggggaaacagcactcctcaaggttggctgcgtctacaaagacccactgatgaaggagaccgtgaatatggctgatgtgcaagtgaagatctccaggccagcattcgtctcggtacaaagcgtgtcgatcgaggtggaccgccagaagaaccgcctccatgcagccgaggtgatggctgaagcaaggttttctgcagagcgcggtgacctgaccaccgctgtttctctactcgaggactgccggaggatgatcatggggtcggcgtcaggacagtctggtgaccgtctgtgccaggcactggatgccgagctgaaggagatgcaggatcggatggccaaccggcagaggtacgaggcgtccggtcgagcatatgtgctctcaggcttgagctcgcactcatggcagagggcaaccgcccgcggggactcgacggacagcgagagcctgatccaagcctaccagacttcgtccatggtggacatgctgcttcgctcgcagacaatgagccgctcatcgactcctcgaccaacgccacagatgaggcacgctaagtcattcccggcacgcccgcagccaaggtaactgctatttggtgtcaccaaggatttgcctgaagcctaatttgcttgccgatgggcgtagtagcgccctctaaattcttagttttgtggcgggaggacgggaccagggtatagtttgtgtgggtacaaggggatgtaatggtgtaaatttgatctggggtggtggaggtaaatggtgagaggggtaaggtattttataattgagggggtcggggatggtatacgtcctggggagaattgggcaggagggtggtgaactggtatactctagtattgtactagctccttcgtgtggtgatgtacataagggaagggtatacatttgtggactctttgaggagggatggatacctaatcctgatcccgatccttgcaatgtttgtttcctcagcctggaaaaggactaaggtttgttgcctctttctggaaatggaattgatgatgatcctgggtattttttc

SEQ ID NO: 32258 - DNA, 3070 bp, Zea Mays
gtatcaccccacctcgtctcgtcgcctaccctcccaacccgcattcgcggcgcgggcgccttggaaccctagtcacccgcgccccccctccactgtccactcaacccccgtcccctccctcggcggcggcggcatcggcgtcaaccaagatgtcgggcggcttcttccgggggacgtccgctgaccaggacacgcgcttctcgaataagcaagccaagctgctcaagacgcaaaagttcgcgcccgagcttgaccatctggtggatacgtcaaaggtaaagatggacgtgatgaagccctggattgctaagcgggtcactgagctccttgggttcgaggacgaagttctcatcaacttcatttatggcctcctcgaggagaaggaagccgatggaaagaagattcagatccagctgacagggttcatggagaagaacacagtgaagttcatgagggagctctggaccctccttctcagtgcacagcagaatgccagtggggtgcctcaacagtttctggatgaaaaagaggctgagatacagcagaaaaaggcagaggatgataggattgcacaggagattcaaaagaagcgagagatggaggaaaatgattcagaactggatggggatgctggtaactcaagatcctatggcgatccagttggctctgctttaaatagtacaaatttcaataccgaggaagaaaagaacaatgatttcaagcgtagcttaagagcaaagaacaggggaagtcgcagatccaggagcatatctttgtcgccacgtgctaggcaaagatccatctctcctagaaataattctcgttctcctcctaggcgttcccactctattgatagacaccatagatcatcatggcgttcaacttcacctagacgttctatttctccccgaaggcattctccaagaagtaccccttcaatttctagaaggagatcaccttactcaaggagagggtcgccttccttgtcaagatatccatccccatttacacgccggagatctcctcttcgcagaaaatcaccatcatctgggccactaaggtcactttctcctcgccatcgccgctcaccagctcgtgtaccaaggaggtcaccatctcctgcaagtcgaaggtctcctgttcgacgcagattctcaccaggtagacgtacatctccatctccagtaaggcgcaggccaaggtctccatcacctgggaggcgtaggccaaggtctccatcacctgggaggcgtaggccaaggtccccatccccaagaaggcgtaggccaaggtccccatccccaggaaggcgcaggccacggtccccatccccaggaaggcgcaggctacggtccccatctccaggaaggcgcaggccacggtccccatccccaggaaggcgcaggccacggtccccatccccaggaaggcgcaggccacggtccccatccccaggaagacgcagacctttatcgccagagggaaggaggagtaccagtccgtacaatagcaggagtcctaatcgctctcgccagagtttaagtaaagatactgagaaagaaacaaatggcaccccttccgttaaggacagagttgtgcactcaagggggcaagaacaaaaatcagatgataataatagggatggtgcaaggattgttggcaataattccccagattctgagcatagattgtcaaagtccttgaggcctcctaactatgaagaaaggaattccacacgtgacagttcttacaagaactcagacaaacctatacctagtcagggcagcacagatacaagtggagatgaggaacacagtcgtgctagagaaaatgcccggaaagcaaattcatgtcgtaggaaaacaaaggatctctcggcaggtctgcaacctaagaaaatcagtgctggtgactcaagccccagagacaaatctccattcattttacaacagagtggcaaggtcgtccaaaagaaacaccccgatcaattgtcagaatcatcagaagatgagcttgctggtagaagaacaaagcatcaaactgattcacctgatgattctcgtcgaaaacagcattccccgactagaattgaaaatgatgagtcttattcaaagggtggtagaaacagtgagcatgtcatgagaggtttgcgtgatgattctgatgatgctattgatacaaagaaatatttgtctaaagtcaatgaggactcccaatcggacgatggaagtcctttgaaaaaaactaagaaaaaaacagatggtaataggcacattgattctggtagttcagggtctgaagagcctgacaaacatagaacccactcggagaagcgaaggcacaagaaaactcataagcataagaaacagtatgatgatagttccgagtctgattctgagccagatggcaaagacgcaaagaggaggaggaggaaggaagagaagaggctaagaaaagaggaaagacgtcgaagacgtgaagaacgacaccgcagaagggcagaacgccatgccagcaaacgaaaattaaagaacaccgatactgttacaatgccttcagactctgagaaggatcgggattctgattcagatggtgatgttaggaaaagagtttcaaacgctggaagagaagagtctgatcagaagaaactagaaattgaactccgtgagaaggcccttgaatctcttagagcaaagaaagccatcaacaactagactgagaatttttttgtgacacatttgagtttctattttcaagtggaagtgtccttatatgatactatttaatgttctgtgtgtttatgtggcagttgatctgatgattcctgagctgtttacttgatgcagctgaattcaggcttagcagccagttatctgattagctccatgtgcacaagctttttatgttcctcaggatgatatgatcaacgcctcaacaaaaacaagttggtaacatattgattggaaaatctgctaaagcattccttcttagtttcagtaacttatttatgatattgactgaagaaaaagaaatcctgtgccaccttctttcacatatggaatcagcaaac

SEQ ID NO: 32259 - DNA, 3322 bp, Zea Mays
cgcagcgcagtaaataaaaggcaaaaaataaaaaaaaagcacccaaggaaacgccagaacatcaaccaggccgcggccgcggcacttacttcatccgagctccgcccacctcggagcaccgcagtcagctcaagcgcttgaagggacccacaatcttgcaatggaagcacttcagccaaacatccaggctgggatccatactcgtaacctcccagtaaaacagcttggagggatgatctttggttgcaagcctgatacaattgaagaatgcttcaaaaaacagctctttggtctgcctgcagtccattattcatatgtgaagaatgtaaaacctggtatgcctttgtttctattcaattatattgacagaagactccatggtatttttgaggctgcaagtcttggtcagatgtctattgatccatatgcttggagtaatgaggacttattaaagacaccttttcctgctcaggttcgtatttgcataaggactcggtatccaccaatgttagagagcagatacaaaacagtgcttggtgctaactattatgatcgtcatctattctactttgagctggaccatacacagacagaagctttaatttctttgttcaagttgctgccccttgttaataatcaagttccagctgctccaagagaaaggagtattgctgtgtctttaccaccaactaaaaggaaggcaccagttcttcctgacccaaagaaagtcaaagaaaattcaaaggatatcaatccatttagtgttttatcaaatgcaagtgatggtgctcaagaaaactgggttgattttgattctgacgtggaaaatgctagcatcaatgaaaattcacacagtgacactgatgagaaggaatttgaggagccagtttctgattgggaagatttggatgacaatgctcttcaataccaattcagtccttattcaaattcagatgaggtcagtcaaaactcctcatacaaaacagtttgccaagaagtggagcttgctgaatgcattcctccagttgtcaatcctgcgagtgaagaaaaactcaccatgcttgtacataatgagcataaagctgctgtgtgtattggcaaaatagagagtgaagttaacagtatcatggatggtgttgggctacagcctgaaagacacactatcctgaaaaagctgaaagagttattttccatgcgacagcaaggggtttcttcgcaggattgtgttgagtcaagcccagatcaatgtgtacctgaagaaaccctttcctgtgacccattagatgtcactgtggaagacaaaacctcttttcaggaacaccttggagaatttgatgagcttcgacaaatcattgctgatttatccaagagggctgaagcattggagaagaagcagaaaggatcagatcaagatctactttttttgagggaagttgttaaagattcaggaagaaaagtacagcaactggaatatcttgtagatgagttacaattccgatttgactcttcattgtctcttcctggaagcatgcacaatactttagccaagccatcgatatttctgatcggtggctacaatggtgtgacctggttatcatctcttgattctttttctcctgagaaagacacaatggtgggtctcacaccaatgagttttgcccgctcatatgcatctgctgctgcattggatggtcacatatttgcttttggtggtggaggtggcaagtcatcatggtataacacagtggaatgctatagttcgaggaataacgagtggatagaatgcccctcgttgaaccgcaagaaaggaagtctcgctggtatcagtcttaatagcaaaatatatgctattggtgggggagatggaaatgaaactttttcagaagttgagatgtttgatccataccttgggaaatggttatgtggtccatctatgctgattcctgtatgatctcatcctctctttgcttatactatttatctaacttgatgtcttctagcccattacaacttagtgcttggaccttgagtcagctatgtttgtattctgattaacttggtgcccttaaagaaataagaacagatgaagggaataggtttatttttgtgtagagatacataagatcagttatgaattatgatgctctcacttttatatatacttgcagcagcatatggtgtcatcctctgtataaaaattctgcttcatataataattcacctgatcattgcatcattatttgcatagtttgcccagacttttgtttataattgagctacaatactgcagctatttactcttatatcttcacaataatttcttacatcagttgcaaagcacctcaaagggttgaatagtcttgacaccaacatgctaccttattcacaatatatgttgcagcgatttgctcttgccgtggctgaattgaatggaacaatctacgccactggtgggtatgatggaagcatgtacttacaatcagcagaacggtatgaccaaagggagggtgtctgggtccgtcttcgaagcatgaacacaaagaggggatgtcatgcccttactgtccttggagaaagcctatatgcaatgggcggatacaatggagacaagatggtttctagcgttgagatcttcgaccctcggctcaacgcctggaggatgggagatcccatgagcgccccaagagggtacgccgctgcagttactctggatggaagcgcgtacttaatcggtggcctggagtccaatgtgcagatcctagctaccgttgaagtttacaacgcgagctccggctggtcagttctcggtttgagttcactcgggaagaggtcctttgcatctgccgtagtcatgtagttactgatcacgatgttaactactgtcgataacatcaggtttaacatagtcgctgcgttatgcaaggagtagttagggtaaggtgggtggggctagatcacccttccgatgtgtaatgtgttgagatcttcatcaggggaaattcgcatggtatgggagactacggcccgtatacctttgaaccctcgtaggaagtcttgagaacccttgcatgcattcgctgttgtatgcgtgccatgctgttgaatttagctgtactacaccagatagtgatacccgaactcacggagtttaatggaaccggatagaaagctgcccatgtagtttggtgtttgttgcttacgttgtggattttactgtagtgacttgtctaatgctccgtttctccgtttggttatcgaccatattggagggcatggaattaaaataagttcaataccaaatcaaatatagtattgaaatagt

SEQ ID NO: 32260 - DNA, 1808 bp, Zea Mays
cccacggcccacggcaagtctcccgcgaagtcgcaagtctcccgcacgaaccacgacaaatgtcaaccccgattcctcgccgtcgctcatctcctctctcccatctctgctagggttaggtcgtctcggcaagtcgccatgatgcagcagcccccgcagccgcagccgggtatggcgctacctcctccccctcagaccggtggcgggcagccaccgcagtggggcgcgatcccgccgccgatgacgcagcagtacggcgcaccacctccgcagcagcctccagcgatgtggggccagcctccgtcgcaggcgcactacgggcaggcgccgccccctcagccgtattatgccgcgccgccggtgccggccgcccccgctgcggcggacgaggtcaggacgctctggatcggggacctgcagtactggatggacgataactatgtcttcgggtgcttttcgaacaccggcgaggttcaaaatgtgaagctcatccgcgacaagaattcaggacagcttcagggctatggttttgttgaatttacaagccgtgcagctgcagagcgagttcttcagacatataatggacaaatgatgccaaatgttgacttgacatttcggctgaactgggccagtgctggtgaaaagcgtgatgatactcctgactatactattttcgttggtgatttggctgcagatgttacagattacttgttacaagagacattcagggttcattatccctcggtgaagggtgcaaaagttgtgactgataaattgacaatgcgtaccaagggttatggatttgtgaaatttggcgatcctacagagcaagctcgtgcaatgactgaaatgaatggaatgccttgttcttccaggcctatgcgtattggtcctgcagcaagtagaaaaaatgcaggtggtgttgttcaagagagaggataccaacaggctctattcgtataggggtcttggaactgacctgagctgcaatgcatttcttgtttaatgtgtggcctcatttagatatttgttggtgggcttgaccccaatgtcactgaagatgtcctaaaacaagcattttctccttatggcgaagtcatccatgttaagatccctgttgggaagagatgtggttttgttcagtttgttaccagaccttctgctgagcaggcgctgctaatgttgcaaggggccttgattggtgcacagaatgttcggctttcgtggggtagaagcctgtcgaacaagcagactcagcctcagcaggaatccatgcaatggggtgcgggtgcgcctgctggtgttggtgattactatggtggctatggacaaggttatgaggcttatggcagtgggtatgcacaaccccaggaccctaacatgtatggttatggcgcttatgttggttatcccaattaccaacagcaaccagctgcacagcagccacagcaacaacagtgaggcctctttgctcgggtaggtcattgggttgtctgagatgggatcaattagtattatttctaggcattcatatattgatttcttgaaaatagaggtggtttcgaaaatctcctgattttgatggccccatggcatgttttcttcgagttatatcatatatatatgcactatgttatgtctatgaacaagtggtgctcaactgtgattgctatgttgaggcatgcttcgtagtttccttccagacttgtcttatatattgttctctcttttactctgtattgttatctctattagtgtgtattgcatatctactgcgatgctatatatgcgctgtgccgcctttcgtt

SEQ ID NO: 32261 - DNA, 1905 bp, Zea Mays
actcgcatatgagtcgttgcctcgcagtttatatccctactgtttcggactttcgggttttggccgacacccgacaatcttaacatcaaactcgtcgtccacgcctcctcggcaaggttgcgtacggcgtggccctaaggcataccagcgggatcaagctattttgctggccaaccgaacggtcaagccgacgatgacgctcggatcggcggcacacaagatcccgctggaggttgcgcacaccctcgtcgagatcgccgaggtcgcgcgctacgcctaccaccaccgccccggccgccctgcaacccacgagggggacccgactgcgccgcccgcaggggctgatagcagcgggggcaccaacgaggatgccgcgcggctgctggaggagaacgccatgctccgcgcccgactcgcagatgacctcgcgctcctgcgtgagctccacggcgcgccctgcgtctccaaggagtgccctcctgatctatacaaccgattgatggcggcggtcaacaatgttagcttccttgctcatctcgagaaattacaggatgagtcagcacgtcaacttaatgaactaacttctggcgacatgacagaggtggaagctgcagacattccggacaaagcgggtaacgggaagaaaggattgtgggtcttggtcccttgtgatacagctggagctaatttggaggaaattagtgggattgatgatgaaaattatgtcatagtaaatgaagacgatatagtcgatggtattgccgcctttgttgctaggtgcattcttgaagatccaaaatccaagtcgttatcgccaatgcagctccaaaagggttcgtctatcctccatgcaaccatgctgcactcaaacattgcaccgttaaatagctagctgtctgggtttctggggttcatcatttctgaatagttacataaattctcaactccgctactatatatcttactatgcattgatgatgattgtagccttttgttttatttatctagttttctgattacttgatgatatgtgagatatagtgtattgtacaagatgttaatccttatggtacctgagagtgtacacctatggtgtatgatggacaacgttgctaagttttgccactgtttaaagatccattgctgctttgacgaggttgcatatgtgatgattgattaagttgattttaagattgctatttgatgaagttgtactgtgtaggacatgttgggtacttttttctttcaatttctcattaaattaaccccactgggggtgtaacatgaatattagacagtatacatgaggttgaactttgtatttttttactcgccaacatcagtttcttattcatggctgagcttgagctgtgttcatgtgcaatctgatattttgttggatttaacttgtaagcagctgttgcaaaggcattagatagcatgaaagctcgatggagatggtcaaccttttgggaggctggacagattatatatatcttggctacttggggcatcacattagcagggttgtacaagagccgccatgtcctgaaggtggcagcaaagggtgctgctgtgtctgccagatttgttatgaaggccatttgagtgtaagaggcactcatgtgggatcagcaatttgcaaaatgtaaatacaaaactcgtcccgtcagttgtgcatatggttgtggcatgtttatcatgatgaagttatgatcatccagacatgaaaaactgtttcatttattttcgttgtatggacggtggtgtgattgcagaaaaaaaaaagatacatatgtgattacttgtaggatcgatactcgggccatgtttgtttccctcctaaattatacggagtataagctagactatggagctagactatggtgcaaaggtagtcctaaa

SEQ ID NO: 32262 - DNA, 226 bp, Zea Mays
gagcaaatcatcgacttcattatgaaatcaagatttatcaaaaaccactactgacaacactaaacggcagacgagttaactgctaaatttattctttgtgttaccagtttttagaagaacctatcgacaagtcgttagagacactagacctattcctcattttattacttcgaccactcatcggatacaaaacaccgatttaatccttctcgcataacctatgtcg

SEQ ID NO: 32263 - DNA, 2892 bp, Zea Mays
tctagtatcaatcaaaatattcgggaaggattgcttgaagtattctatggagtttatgaaaaggatcctgacaaagtgcttcaagcaatggttcaaatgggtgtccttgttcctactggagatatgactgttgtcagaagaaccgctcaatttttccttaatagctttcaagagtgcctaacagcacaaaggaaggagagagaaatggcaaccgcagaactgggtttcaaaaagcaattaactaaggaggagaagtttgaaaagaggaagcagagacttgctgcaatcggagaggatcttttggcgattgctgctgatcaaccatttcgcttccctgccacatttacatttgtggtcagagcattctcagatggtactgggaaaggccttgatcctaggtttcatattacagagattgctaagccaaatgccaaggaattgctaagatttaatgacgctggtgttgaaatagttgtgaaggcaagtttcaacatttggtcaaagctgttaacctatctctatgatagcacatctcctaagggttagggcttgtttggctaggagcggattgaaggggattggaggagcctattaagcattgaacaatttacccatgcttgtttcctattctttggtcgtgataacgtttgcaaccatgaatagtacatattgcttttccaggtgtgtggagagacatgtgtattcctcctatgacgaattccttaggctccatgaagtgtatcaatttgtcttagtatttttattcgtggggatgcctgactcaaatgaactcatgttcaacactgagcaacctacttataattttggagcctataaaatttctaagctaaaaaaggtaataaaaaggaatgatattatagtcacatcatctgaacaacagtgaagggaagggagggatagatggtctgaatgcctataaatgtcgttcccttggtctgcttcttaaatttgaaaccaagatactatagtcaaatacttctaaacttgaagcctgtaaattggaatcaccaagttaaataagaacaggggtaactattcatagctcagatggttgtcatccaatacgtgcgctaaggcacagacaggtgaggttgcatattcaatccccaagacagtaaaccattgaggcatattaaaacacattttccatgaggtttcctaagtgatcctttaggtaaacagaaccatacctagctccatatgaaactatttcccgatttgaagtacacctaagttaaggttcatacattggagctctggcagtaaaacaatagtccttaccttgagacagcttagattagaatgaggtggatggtaatatggcatgagcaacataccacagttcatgcatggaggaaatcatttttactttctttcctagccatggtagttgtgttgctccttaccaaggcactacatggagcatcatatggttcatgatgtaaacatggttttagatctgtctatactcacactcaagaaccagccaaaatgtgatattccacaacctgagagaaatcaaaatgaaatcatgtacaacatagtacatatgatgatgtgcggtgatgcgggtgcatgtgtgttgtgtgtgtaggagaggagggcgcagcttgattcaatccatgtcaagtcagaggctgctgcgaggtttgcacatgcaagtagaatttagatgatctctgttaggcatctaactgaataaatgatctccattatggactggttatattattttctgtgcgatcggatgggttaaagaaaagacgtgaaatggtattttccagtatggactgtataaatgtaattatattcctatgctggtcctgcttcgctttcatgtggatttatcttgcaaatggtatgtggatccgttccagaggcaatgagccttgcagccagtttgcagtataaaaaacccaattatgtccactgttggttcgacgcagcgtgtgccgaggatttctactgccaagcataagaaagagattgttcttgtcaccccaaaaatgttcccattctactttcgggcaggtgaattgcagataaatggtctgttcgcaactggtgctctcgggcgactccatcactgagcaacccttcgccccggtggctgcggtgtcgcactggctgacacctgctcgcagttgcattacaagttttactgactatgtattttcaggtttattcaatttcagttgtaatgcttctgacagcagttgtatcagtcctcttgttcagcttccataataatgtactaaacttcagtttggtgtctatctcagtgtacctacactcagttggaaaacttcaaccacactgcaacaaggtttataaaaggtttgctatgaggaaaaacaaatttatgggctcaaacaaagtgtgatagtgaaagtcattttgcttccagcttaagaaccaagccaagaaaacagatatcaactgtgacgccacactcaaaagcttgtttggtgagagggataaggttgggatgctggagatctctaagcttttgagccgtggcttcccgaaaatctccaagcttttgtggtccatggagccagggatggctctttggtaaaagacttcgttgtggatggcctcttttatggtccatgttaagtcccaagtcccactaggtggttaagcagaaaaatcttgtgatggcattaagactttcagactttgtttttgggtctgatgcatgtaaaaaggattcccagtgtttctgttgctcttgcgatcctgtgaggacacatatgagagaaatatttagtttgttgatggcaaatcttgtcttatgttcatgcctgtacctatctgatcaagcgttatgatatgatcccatgcgtggtactgtgttctttagagatg

SEQ ID NO: 32264 - DNA, 1543 bp, Zea Mays
gcacttcgcttcgcccacgtctcccgctcccctgcttcgtgtctgctccgatcggttgcgccctggacgagcgggttggggcctggttcgtgcgttctggagagcatccaagtttccacggtttgaatctagcgtagcatgccgaggtttaaggccttttggcatcggatctgcttcgcctctgcgagatctccggattttgatcaaagttgcttctcgtcgaagtttcgctggatttcctctggattaaacaagcgagtcacgtggctcagttcgtgatcacgttatgatcctttcatatgtacctttccgaactgctcgcggagaggcacaagcttaccccgttcatcccagtgatcccacatagtgtacggttgctgaatcaagagttctccagcttatagctggcttggaggatctcaaggcagctcctctggactcattgtcaagaaaacaatgaaggtcgatatcccagtagacaaatatccaacagtaagtgtgctatttcacaaattggtatactctttaattgctgcatcatcatcttctgtttatgtctattctcctagtacaattttgttggccgcatccttggtccaagaggaaattccttgaagcgggtggaggcaaatacggattgccgcgtgctaataagaggtcgtggcagcatcaaagatccagcacgggaggaaatgatgcgagggaagccaggatatgagcatctgaatgaacctctccatatattggttgaggcagagctacctgttgacatcattgatgctcggctgatgcaagcccgcgagatccttcaagatctgctaaagcctgtggatgaatcccaggacttcttcaagaagcagcagctccgggagctcgcgatgcttaatggcaccctgcgtgaggaagggatgcagaggttcggttcagcgtcccctttccacaacagccttggaatgaagagagccaagacaagggggtgatgaagaaagtcgcaagcatcatgaagggagaacttaaatcatcatctattctgaggccaatcctgtgtacgaatggggggttgccttgctggctactggcccaatacggtctcgcgccaccagcatcgcggcgcgggcggccgtgcacgataaaacatatatctggagttgtgtctactgggggagttgagtttggttatgcgccatgggttgttacgctatatattgggctgtgcaggcttttgtagcaatgtggtttgtgtaaatgctcatttggagcgtttggaagctctcggcttgtatttctttcttatcgagatagtattcaaggacgctgtttgggatttgaagcaatgctctaaactgcgacaagcatggaggcttgatctgtttcattcgaatctcttgtttgacactatcaataaccagtgcatacaagtagtgaactggcgtcttaagttgcatcttcaattcggattctgctttgttgatgcaggataatctaaattaatgcatgtaatgcacttgaaattaatatatcttctttttccaaaaaaaaagaa

SEQ ID NO: 32265 - DNA, 3005 bp, Zea Mays
ctttagatagattccacgggcgcgcttgatgcgagtttttgctccacccacccgacccattgctatcctacctgccagcgaacctgtctcgtctccttgttgcccacgtggcctcgccgtcgccgcgagctccaccttcctcagctctgccccgagcgcgatgtggcgagcgacgaggcggtctccgccgttcctgcgatggctatcgtcggacgcagcctcctctaaggcgccgcggcagcgcgtagcggcgctgtgggggaacggtgactacgggcggctggggctgggctcgctggagtcgcggtggagccccacggtttgccccttcttcctcgcccgcgccgccgacccgcccgcctccctcgcctgcggcggcgcacataccctctttctcacccagaatgggcgagtgttcgctacagggctgaacgactttgggcagctggggataggaacctctgttacacatatgctggagcctgttgaaatttctggatttcacgaaagagttgtagaagtttcagctggcaaccatcattcttgtgcagtcaccggtaatagaaaataattagattctcttaagtgcccggttttattcactataatatggtgaattcgttaaatgataagagcagccggaagggaaggtgccatcttcatcttctatgttactgtatatttttaatggagcagcagatacttcatgcttctcgggtgtagaagttagtgattgtgattccttgcttcttgtttgtgtgggcctaaatacacaacacaagtatgggttgaggaaacattttttttgcctttctggttggttgaatattgatctagtgttgaatgttcatttcaagcaaatttccctttatcgcatgggaaactacatgtgtatggtgttgtaatatgttaattataatattttttattatggccccaattactctactagatattgacaatgggtttgataaaccaaaatacatattgggtaggttgcacgttcaaacaaaaagggccatatggaattatggatttgtgcactctccctaggcctatgtgcgatcacaacttaattgaaatatgttattgctcatttgctaattgagatgtcatatgctctgtaaaatgtattaattttgtaaggttattgtcactgaatgctgcactgcagcatacagcacattacaccataataatgttttactggtatctggataagtataacagaaaagaagtgtgataaccatctcttctatttatttataaaattgatttgtgctgcacatatgtgcattataacaattgtattatcaattgttagagtggacgcactaaccaatcaaacacaaaagcttaagctgttaggaaaaagtaggcaatctacttatacacttcaatactctcactcacgtgcaaccagagagaaaggtgcaaacatgtaaataaaggggcagagacacaaataaagcctctaccaggatttgaactcaagacctctggctttgatactatgttagagtgagatgcactaaccagttcaacccaaagctcaccatatcaaagtggacacactaatcagtcaaacccaatagcttaagctgttagaagaaggtaggcaatccacttatatatttcaacaccaatctccactaaatttttgtatttttactttcttgaacagcggatggtaagctctttgtttggggcagaaactcaggtggccagcttggccttggtaaaggggcaggtaaagtagtttctaccccaacaaaggttgattgtttgactgacctcagagtaaaaacggttgctctgggatcagagcattcaattgctgttacagaggaaggtgaagtcttgagttggggagctgctggttctggtaggctcggacatggccgtcaatctagcatcctgggattttctctgacctcaactgaatatactccaagattgatcaaaaactttgatggtatcaagattaaaaagatagctgcaggaatgttgcactcagcttgcattgatgaaaaaggtactttgttcatatttgggcagaagactgagaagggatttggaagaccgaacgaagaattcagaccaaatattgttgaagagataccattttcagaagaagttgcttgtggaggttaccatacttgtgttgtaacagatagcggtgatctgtattcttggggttcaaatgaaaatggctgccttggtctgggaggtacggatatggtccgctctccggaaattttgaaaagttctctatttaaacttcctgtatctaaggtatcttgtggttggaagcacacagctgtagtttcaggtgatgacatctacacatggggttggggaggcgccaatgggacttttttcgaagagggccattcttccggtggacagctgggacatggaaacgacgtagactattttgagcctatgatggttccctttggcacgaatgcaagagccgtccatgtatcgtgtggcttcaatcatactggtgcaatttacgagtgctccgaggactttgactgacgtgccacctgcagacagcagatccgcatgtcttggagacttaggttagttatcaaattatactcgctagaagtgcatataaacagcataaataagctctgatgttggacctgcatttatgtgaagagaaatatagaacaagtgataacacccctgagagggggatgtaaattaaacagaataagggatgaactggatgcattttgtgatgcatcagagttacttgccagtgtatagcatttcttcatttattggctggttctgtattattttgccaggtactaagaaatccattgcctgatgtctcagcaggctgtttgtgtacattatgattgcttgactgcttggtgtcgatgcttgctgtgttttttgtgtgtaaataatacatgaatcagttaatcgtgcttgtacaattaaatatgtacatatatcagtgcatcacttattatatgtacatgatt

SEQ ID NO: 32266 - DNA, 1894 bp, Zea Mays
cgacgaaataacattttaacatgttggcaacattattacaaagtcagccgaaacgagtttataacgcaaaatttattgaataaataatattttgtgaattaaacgacgtgacgcaattttattggtgaggaacttgccatatagagaaccacgtgggacacaaccatagacaatcgatctattgcattaaggagaatgtgaggttgcatggcatgcaggtgggggccacatgatgcacgacctctggtggttgagcggcatgcaggttttttctatgtctggtagcacgcgtcgtgcgtgtggccgtgtgggtgggcccctgtggcgtttttttggctttcactgcatgcagatcatgcgcatgggagaggggtccccaagacaatttcttcctccacttttcctgcaaccgcatgctccatttttccttgtaaccgcatgcttggcgctcgctgggcctgaaccaccgtgaggaggggctaccaggtgctgggaaaaggaggccaggggcggcaccagtcaccggttgcctggcggccggtggtgactggtgaggcaggacagcaggggcacggggaggtgcgccgccgggaccaggcggagcttgcgggccggatgcggccagcggcggcggaggtcggggcggtgctacagtgcgtggctggggcaggacgcccgtgagtagcggctccacggcgacgctgccgttgctcggctcaccggggcgagacggcgatgcgcgaccagaccgcaggagcagggacgcacacgtgcagggaaggaagggagagaggagagctcacctcggcaacagcttcacgcaggctcctcggcggacgacggtgcgagctcggcgcggtggggcactaggtgacgggcgatggcacggctgcagatgcagcacggcgcgaacgacggtggcagcggaggtgtgggggtgagggagagggagagggagagggaaatggggtgctggggctccaaatggaaccggcgtgggggagtcatgcgtgggaggcggtttggagaagagaaacaggagatgggggcgtggggcagactggtcggctcttgcgggaggcgcgcgggagtgggccgggggcagagaaggggagctgggccttttctattttattcttttgattatttttttatcactacacgacggttgatctttagcgacccttattagggaccgacggttggtcgctaaaagttatggaccgacggttggtcgctaaatgcttttataacgacggtctgtgggtcgctaaaagtttagaaatttaacgacttatggtcggtcgctatagaggtaagtgtgtgactgatggtgggtcgctataggggtacgtgatttttgtgtttcttatttactccactctaaagaaccgaaaaaaccggaaaaaaactgaaatacggccttgcccacgtgtcaggcagcagatgaaccctaaatccctaatagcaatccagcacatcacccttctgtccttcagtcttcacggccgtctcccccagccgcccaaccccaccctcactggctcgcccctaggccccagccgccggcagccgcccagccccaggccccagcccccatccccccagccggccagccccaaccctgcggtcggccacctccaggccccaccgcggtccacgcctccgccggccgccgctccgcggcaccgtctagcttgcccactgccggactgccccagccccaggcgccccgccgccccccaccactccaccaggccaccaccaccagccggcaggcaccaggcaccaggcaccaccgctccaggcaggcacagctgcatcggttgcttcggagttcggttgacggacaccgcctcaccggattcaactcccacgataccggttcccaaag

SEQ ID NO: 32267 - DNA, 7315 bp, Zea Mays
gtttggggtggggtccgcctcctactgtgctgaagcagcctttcttcttggcactacgcccgcccgcccaccggaccctgcagcagagtccactgtccacggccaaaggcgagagagagagagagagagagagagagagagagagagagagagcacgggatgggttgaggaacgagatggagggagaaagtgggcagcctgctggatcttggcatctcgccgccgccgctcacttccgctccacctggtgcagattccgttgatcccacatctgaaaagcaggggagtcgacgaccctcatggttttgaggataatatattgcatctctgcactgttctaagcgtgaggaagtaaagcattatttattggttggagtagtttctgttgctatccggcaccaatggcgactttggttcgtcatgattcaaggcagtactcttggtggtgggttagccatatcagccccaagaactcgaaatggctccaggaaaatctcagcgacatggacacaaaggttaaagcaatgatcaaacttatcaatgaagatgctgattcttttgcaaggagagcagagatgtactacaagaaacgtccagagctaatgaaatttgtggaggaattctatcgagcataccgtgcgctggcagaaagatacgatcaggccactggggcacttcgtcaggctcacagaacaatttctgaagcatttccaaatcaaatgccgtcaatgtcagacgagtcaccctcttctttcagccaagagatggagcctcatactccagatatgtctacttttacacgtgcggcatttgattctgatgatcttcagaaggatggagttggtatgtcaccacagcgtttcacctccaagagaaatggtacacaccctgaggaaacaagtgcattgtcaagtagaaaaggtctaaagctgttcaatgatttgtcatcgagtagtgaaaatgctcctcgtgctggttttgatgggaaagtacggaaaggcctaacctttgaaagcccagaagttaaagggaaagatggtatcagcaatgagatggcaaatttgcagcaagaagttgcaagactattatccgagagccagaatctgaaacagcagatgctgtcagaatccgagcgggcaaacaaagctgaaaatgagatgcaaatgctcaaggcaacagtattgcaattaagtgctgataaagacacatcacttacgcaatataatcattcctctgagcgaatatctacgttggagtccgagctcttgaaggcgcaggctgacctcaagaagttaactgatgaaatggctgcagatgtccagaagctaattaatgctgaaacactcaatattgctatactgtctgaggctgagggtttggatcagaagatgaagatgcaacaacaagaactagaacaaaagcttaaggaattggagagtttccgctcaagcttccaggaggagcatgaaaagcgtatgcaggctgaaagtgctctactttcccaggggaaggaacttgctcaatctcatgaagaagtacagaggttgactatagaaataaagatggcgaatgaaaagttgaatgagctcaagcagaccaaggaggaccttcatgacactgtttgtgagctgaagagggatgttgagcgccttacagaacaaaaccagtcatctgaggtgcttatacgggaacttggtgacgagataaatacactcaaggattcaaaaaatgaactccaaagtgaaataaaaagccttaagagcaccatttcacagctaaacactgagaagaatgcagctgcgcttcaacaccagcagtctgtggagcaggtttcggtaatcgaatctcagctgtcaaagctacagtcagagctagatgagactgagcagaaagtacagttgctgacacaagatcttgaaaagaaaaaagaagaagcggagaatatccatttcaagctgcaagatgaatgccataggcgtatgcaaattgaagcaactcttctcatgacagagggtctacattcccagttgcaagaagaaatgaaaacactgacacaagattttgacggatcaacaaagaagcttagtgagttagaaaataataagttagacctggagagcacactgaaagaactgaataacaccattttaggtttgaactcggagaaggatgcagcactccttcaacaacagcagtctttagacaaagtatctgatttggaattagaactctcaaagatgcagttggaaatggagaagtctgagcaaaaaattctcttactggagcaagaaattgcacggaagactgaaagtgtcgacagcttggagataagttttaaagatgaatgtgagaagaggctacaagcccaaacatcgcttgtgtcattggagaaaatgtattgccagtcacaagaagatgttagaaggttgcagatagagattgagaagcagaatgacaagttgaatgagttggagaacttgtcatctgaacttaacaacaccatcctacttgtaaacactgagaaagatgcaaccctccatgagaaccagcagtccttagcgagaatattggatcttgaatctgaactcatggtcttgaaaactgaactggagaatgttgaaaggaaagttcacatgatagagcaagaactcatatataagaaagaagaagcggataacctccaaattagcctacaagatgaaactcaaaaacgggttgatggtgaaacatctcttcttatgatgaaaaatcttcattcggagtcacaaaatgaagtgagagggttggcactggaactcgagaagctgaatggtaatttaagacaggtggagaacagtaaggttgatcttgaaaacattgtaaccaagcatacggaggaaatccatatccttcgtgaacagaatctttctactgagcttatgataaaggacctccatcttgaattggatgtattgaaggatttgaatgtgaaacttcaagcagaaatggatttacacaaaggtgaaaaagaagtacttcagagagagtttacttctcaaagggaagagaaggaaaatctagaggggatacaccacactctggtggatgagatggataccctaaaaactactacaacaatgaaccagaagttgattgaggaattgcaaatcacaaacttaaaactgaaggaagtgtgtgcaaggagtgaagttgagaaggcacttctctcagaaaaactccaagaggtggagaagctatctgaagaatattcactcttggagaactcactttcagatgcaaatgctgaaatggatgcattgagggagaagataaaagcacttgaagcttcagaaagctctctcaaggatataatttcctgtcatgtttctgagaaggctgttcttgtatcagagctagagatccttggtaaaagattatctgatgctttagagaacaaatctatcttggatatctcattatctgatatgaaactagacctagaagatttgagaacaaagctgaaagattctgaagaatcctgtcagtatctccttgcaaataactcagcactttctggtgaactggatgcattgagggagaagataaaagcactacaggcctcagaaaggtctctgaaggatgaaatttcctgttatgtttctgaaaaggttgttcttgcatcagaggtagagatccttggtaaaagtttatctgaggtttcagagaagaattctatcttggatacctcattatgtgatatgaaaactgagttagatgaattgagaacaaagctgaacgattctgaagaatcctgccagactcaccttacaaataattcagctctttctgctgaaaagaacaatctgttctctcagctggagagcattacattggccatgaaagcactagaaggtatgcacaccaatctggaacagatgcactcctctgtatcaagagagaaggattttgcatatgatcaagtaagggaactgcaggatcagttgagaattaagaatgaggaatttgaagtgttagcaaagtcacatcaattgcaagcaaacagctatgagatacaaatttcttctctgcaagagaaaaaccattatatggaggaggtgcttgaacaggaacagcagaaaaacgtaaatgcttctattagtacagttattttggagaactgtttggtcgatgagcaagacaagaaggctgctcttttcactgaatgccaaaagtatgctgtggaaaatcattcagccaatatgttggtttcacagttgatgggggaagctagatatcatggggaggagagaaaaacattgctaaagcacaatgaaaaactgaggcaagggatttcaaagcaaatgaaggttctgaatatctgcaaagatctagcacctgctgatttagctgaggacgaagttctgttgcagactgttttagatgaaaccattaacactctgagacttaaggatgaaactgaagatgtgaataggctcatgaacactgagttctcagttctctcagtagttttgttgcaattagggatggagctcagagatctgcacttacagaagtgtgccattgagaaagaagtggagagtggagaaacagagttgctttgtttgcaaaacaaaaaccaacagatgttggaacagaatgaacaactaaggaatggattacaggaaagcagtgaaagggaggaggtgctgaaaactgaagtattcatcacacaagagaaactatcttgcttgagagagtcctaccagacatcacaagatgtaattttcaacctgaccgaaaaaaatgagtccttgtctaaggaataccagtccttgagtgagaagtacaattccttggaagatgagaatgatactgttcttgaagaatgcatgatgctcgagaacctgtgcctgttctttaggggacataataatgagattgcatctgcattggcttctcttaccaatgagatggctttgttgagtttggctaagagcgatcttgatcttcaagttgatgagctgagcagaaggtcagtggcgcatgaatcagaaaatagtcacttaaaggagtacatcatatgcttggtagagattctcagaactcgattagtcctttcagagtttgatttggacaccaatcaaagtgtctgccaggagttggttgttaaacttgagaattgcatgacacagctggcgcagaaggatggtgagctaatggaagcagaggaggaagttcaactattgcaagaaaagaaccaggaactctgtggagttgttagatctctacaagttgcaactgaaggtgctaaagtggtggaaggagaactggagaagaaaatcacaagactgattgaacagtgttcttgcaaggatgtcgaaattttacttcttcaccaagacaatgaggcattgcaatcagaagttgagcaatgtgagagggaatttgttgttctgatggatgatgcaattacctcttcagtgaattctgcggtgtatgaagaaacagcattcaagcttatgatgaatggtaaagctacagagaatagagcaatatccctaaaggagttgctaatgaaggaggtctcttcccgagatgctcacattgaggagttgcagaaaaagttggctggcattcaggacgaacatgcagaactaaaagctgagttgaacacacatctagctctcgtagcatcattggctgatcatgtcagtgtgttggaagaagattgccgttctctgtcaaaaccctgtagtacagaagacaaagaggaaaccgcatgtgtacatcatgttcaagagggcaatgatgggctggaatctcattgcttacccaaaggaactccagagttacaagggttgattgcaagaatagaagcacttcaagtagttgtatcaaatgctaaagatcgtcaagatcaggagtcagctgagtctgcagctaaattggcggcagtaagtgcagaaattcaagaccttaaagcaagaggtggctcacgcatggagggaaaagaaatatattctgatcatgagaaacaagatgttgagatctccaaagggaagcaagtccagatcatgaaggatattgagctggaccaaatatccacttgtccaccatatggtgctcgagctgccctctatccgcttggaactggtgcaaatgccgaactcgatgacgatatgcttcagctgtgggaggctgcagagaggagctgcaagaaccaaacggccaagtcctcgtcatctgagcacgacatacaagccgtcgaggatctgaagagtgagcacccttcgtctgagctagcaaggggaagagaccttggaatcaataagctagaagcgtcgaagggagctgcagagcctcatgaggcgtggagcaagaacgtacttgagaggctcacttctgatgctcagaggctgttgagcatccaagcgagcattgaagagctgaagcagaaaatggaggggcagtcaaagggaaaatcccctatgaactctgagtacagcagtgtgagcgctcaggtgcatgagacagagggccatgtcttggaacagatcaatctgaacaacaaattgactaggacggctgagaactaccccacactgtcagataatatgagcaccgagcgagaagggtattccagcaggaggaagatctccgagcaggtgcagaaagggtcggagaatgtggcaaggttggaactggagcttcagaagattcagtatgtcttgctgaagcttgaggaagagcacgagtacagaaggctcaaagtctctgataagcgcactcgcgtgcttttgagggactatctgtatgggaggaaggaccgcggtggcgggcagaagaaaaagaagagggtcccgttctgtggttgtgttcgtccgaaatcaagaacagagccgtagcctttctttttgttcgacctgcacctccaagtggtagccgtagtccgaaatcaagaaataaaacaaaatcgacctgcacctccaagtggttggctaagtgtcgcctgtgcattggaagaggaggtggtgttcctaggatccctttgtaattgagttagcattttagtatcttttttcttttatttttgaaactagcattatagtatcctgatgaagaagcttatgtactaaattttttgttttcctgtctaaatgaggccattctggctagtttaatgcgttaatactgtcgtatatcaaggcgttctctttccatctataatagcttcgtgtttacagcccaagcagtgcattttgcttccaggttcagactgcagaagcaaagcaccgggactagtaagtcatttctttaatattgatgaataatctca

SEQ ID NO: 32268 - DNA, 403 bp, Zea Mays
aatcaagcccatttagaagtataaacattggaattcagaataattctaccacaaagtagcagtggtgcatcacattggtttagttgtgtctttgaagtactagcaatttgttttttacatttactccaaggaaaacattcctagccatctagtagttatgattatgaaaaacatagacaaagcctgagtcatccagaggtgtgcaagaaaactgccagtttaattggtgtgcaaggaaactgccagtttattagggtttaatggctttgttggtcatgtgaataagtttaatgtgatcattttaatgcagcattaggtttagcttacttccattgaatcaacactcctgccactacttgttaactggcttgtgtgattagagcaatcctagccaacactgtca

SEQ ID NO: 32269 - DNA, 2458 bp, Zea Mays
ccctcttctcttctcgtctcccctccgccgcttccgttgctcgcagtgctgcctcccctcctctcttcactcgtcaggcccttccgccgtcccggaggctcgaacccctcggcccgcggacgggaccctaaacccgccccaccactcgcgcggggttcgcccgcgacgcatgcgcggcggcggctggtaccctcggcagccggcgatcgccggaaatctgcggggacagtgcggcggcttgcacgagtgccggacacggcgggagtggggaacgtaggggagatggcggcgggaggaaagggctgggcggagcgggtacgccgcggggcgaggaccgcttggttcatggtggccatggtggcctcgctgctcgtggcgtcgtcgccggcgctggtggcggcgggcgacatggcagtggcgctctggctcgaggcgcggctcggctgcttccgaggcgacggcctgcggggccacctccagcgctaccgttttcggaactcgcttgccgacatacctctcgtctccgtcgttcgatccatcgtcatcacctgtgtgtacctcatgtctgatacttctggcctctctcatgtccggcgcaggacattgggcctgagctctcgccgtcgttaccagatcacaagctcaatctcaagaatctatggggaatgcctgtacttttcctgtcttccttggtgtttgctcttggccatgttattgttgcttacagaacaagcggcagggctcgacggaagcttctcattcaccgcattgaccctgaatcgattttagcatacaagaatgccttttctggatgctacaaggttccacggtctcctacaccatacagcggaaagctttttacaaggagtgaaagtgagactaagagaaaatcacttatccaggacgatcgtgatttgccaatcagttttcttgcagacagtgatagcatgttcattgcttgccaggggatcactatacactacaaagtttccgatccagcagccagcctaccttcatcccctggcttcttttcagagagagatactcatcacgatgtaatttcatcaagcatttctcctagaagacagaggcatgagagtccaccatctgcttcctctaatacccgtcgcgttctgaataggagctttagccatcaataccataatacttcgctatatgcaccactattggtagaaccagtggcatctccaactttgttggatgatattcctctgatgtgtattgatgatggcaatgctgatggatgtctgagtcatgtgggctttgaccttgaggctggagggcagggtaaattcgctgtagttttggtgcatggatttggagggggagtattctcgtggagacatgtttccaatttgttagctcgacaattgggatgcactgtgatggcatttgatcgcccaggatggggattaacatctcgacctcgtaggaaggactgggaagataagaagttaccgaatccatatgagctggagtctcaggttgatcttcttatttcattttgttcagagatgggcttgcactctgtggttttagttggtcatgatgatgggggcttgcttgccttgaaggctgcggagaagctgcgcacttatggaggtgacagagaggttgaagtgaagggagtagttcttattggtgtgagcttatcaagagaagtcattcctgcatttgctcgtatactcctgcatacacctctgaggaaaaagcacatggttcgaccacttctacgtactgaaatcgttcaagttatcaatcggcgggcatggtatgatgccacaaagttgacgacagaaatacttaacctatacaaggctccgctatttgttgagggctgggatgaagcacttcatgaagtaggccggctttcgttttctactgtcctgccatcaaaacgagcagcggatctactaagatcagtggaagaccttccggttctggtggtagcgggctccgaggatgctcttgtttctctgaagtcggcacaagccatggcttcgaaatttgtaaattctaggatagtaattatatcggggtgtggacatctgccgcacgaggagtgccccaaggcgttgctctcggctcttgctcctttcatctctacattggtaccctcagaagatttgttgcaaagactgtagaatatactcgttcctttttcgtttttttaagaacttttttctagctggtgagtttgtatgagcccattgtagcgcgaagtagtagtggagcctgacccaaaatctcaagggttcctagagctcccctgatttttttgtcacatgttaatggttccccctgaacgatttcaattaagcaagttgaatgtgtacagcacatgctttgttctgttccttgcccagcctaggtggggagaacaggcttagtacaatggcgatagctatcttggtttgaagccatctccgtggaagcc

SEQ ID NO: 32270 - DNA, 2226 bp, Zea Mays
aagaaagcacgtgatgcccctgctcgacttcattttcactgtcggctaccaaaattgtggtcacaacttatcctacacatcgtagctccgcgacctgttcggcaaaatgaggccttcagatggcaggacgcagctttcaggctttgcacaatcagatgaatcaacacttgatgtggaggggcattgctaccaccagcagtcattcccttcctctccatcgatgcaaccgattgcttctggctgcacacacacagagaacagcgctgcgtacttcttatggccaacatcaaacctgcagcattgtgcagccgagggacgcgcaaactacttcgccaacctttcaaagggactgttgcccaagtctggccggttgcccaagggccagcaagcaaatagcttgcttgacttgatgactataagagctttccatagcaaggtgttgcgttgctttagccttggaacggcggtgggcttccgcatcaggaaaggggctctgacagatatccccgcgattctttgctttgttgctcgcaaagttcacaagaagtggcttaatccggaccaatgccttcctgccattgttgagggtccaggaggtatttggtgtgatgttgacgttgttgagttctcgtactacggtgcaccagctcaaaatccaaaagtgcaaatgttcactgagcttgttgataagttgtgtggcagtgatgaatgtattggctctggctctcaggttgcaagtcaggacacttttggaactttgggcgccattgtaaaacggcgaactggcaacaagcagataggtttcctcaccaaccgacatgttgctgttgacttggactacccaaaccagaagatgtatcacccattgccacccaaccttgggcctggtgtttatcttggagctgtcgaaagggcaacatctttcatcacagatgatgtttggtatggaatctatgctggaacaaacccagagacatttgtacgcgccgacggggcattcatcccatttgctcacgacttcgacatctccacagtcacaactacagttaggggtgttggtgacattggggatgttaaggttatagatctgcagagtccacttaatagcctcatagggaggcaagtatgcaaaatcggcagaagttctggtcacacaactggaactgtggtggcttatgcccttgagtacaatgacgagaaaggaataagcttcttcactgacctccttgttgtcggcgaaaaccgccaaacttttgatctagaaggtgatagtggaagccttattatcctgactggccaggataatgagaagccgtgtcccattgggataatatggggtggcacagcaaaccgtgggaggctaaagcttaggtgtgaccatggccctgaaaattggaccagtggagttgatcttggccgccttctggatcgtcttgaacttgaccttatcataaccaatgaatcactcaaagatgccgtgcagcagcaaaggctcgcgttggtggctgcagctaactctgctgttggggagtcgtcgacagcagctgttcctgccccagaagaaaaggtggagatcttcgagcctctggggatcaaaatcgagcagctgcctcggcacgacgtttcggcgacgacggaaggggatgaggcagctgtgatcaatgtggaagagcgccagttcatctcaaactttgtcggcatgtcccctgtacgcgacgaccaggatgctccgaggcaaatcgcgaacctgaacaatccgtcagaggaagaactcgccatgtcgcttcacctaggtgaccgggaggccaagcggcttcgcactgacacagaatccgagcttgacctggagaagtgacgcactcatttcagcgtctccgcattgagtcataaagtagtccgaagaaggtgacctgtggttcagcagactgaacctgcagccgtagctgcagtttcctggcacaagccttatcatgtactatggtaaaacttgattcagcaattgtaggatgttaggtggtatcccctgcagttttgttgtgagacttgatatgcacaagcacaatgctgaatccccctatatcaaaacaatgcaggtagcgataaagtggtcttgatcagttttctctgtccaaccattaacggagttgtttcaagatcactagatcagcttccgggaaaccttgtgttttcaccttttgaattattcttacggaacgtttggatgca

SEQ ID NO: 32271 - DNA, 1265 bp, Zea Mays
cggcaatcgccaattcgatcgccatgcagtaaagtttgaagaggtgcggcaagagctgccgcctccggtggctcaactacctccggccaaacatcaagcacggcgggttctcggatgaggaggacatgataatccttagcctctacatcagcataggcagcaggtggtcgataatagcggcgcagctgccgggaaggacggacaacgacataaagaactactggaacacgaggctcaagaagaagctcttcggcaagcagtcgcgcaacaaggaccagcggcagcagcatcagttcatgcgccagctggcgggatcagcggcaagcgatgggatggtgaagcaagaagcagcagcaggtggggatgcagatgcagcagcggccggaagcagcagcgtggcagtggcggccacctacaactggcaccaccatgccatggccatggccatgccggtgcaaccagtgccaggtagtacaacgataatggaaggccatcgcgcagaggcggacgaggtagatgagtcgattcggaagcttctgtacaagctgggaggagctgcaggcccttccacagcactgtcgtcggttcctcagtgtgttcgtccaatgtacgaggagcgaagtgcagcaagcctcatgccgccgccgccgccgccgccgtcatgcccggcggtggtggacgccagcagcagcgcctcgcttgacgaaggcggcggcgtgcttccagcgctggagctggaccagagcttccacttcggccaggttaagctggatggcctagaaagcttctttggcatgggtggtcagagcggcatgaggtggtggagtgaggcgagcccattggtttgccctagtagcacggtggccgcggcgtcttcgagctcccatgggatgcaaatgcaacagtactgcgttgttgttgatgagccgggaaagcttgggatgaattagtagccactgctggcccctttatgtttccatcttcatgcatgattgcggtgtaaatttgtgctagcattgattgggaatggtgaaacatgagagtttctttgaattaaaatcaataaggtttctcaccattttcatagatgagagactatgaggagatgcatggtttcgaggtagttctctttctacgagtttctttaaatgaaaatttcatctactcagcctactgctatagaaaatactactctatttgcaattttggcttgtacgaactgtattgttcgatctgttactttatctgatgtgaatatagtattt

SEQ ID NO: 32272 - DNA, 875 bp, Zea Mays
cctagctcgcagcgcgcgcgcgatttcgccgagcacccgccccgagccgcctctgcacgccaaccgagccgacgccgcgaccaagctcaagcatcgacgcgcagccacggaagccgaccgcgcccgcgtgctggacgcccgagctcctgcgccccgcgcgcagcgccctgttccgaccgagcgagcccgcgcgaccgaccgcgccaacaaccgagcagccgaaaccgcccgcgatcgtttccgcgttaatggtgattcaatgcgtttgtttctccccgttactccctctcctctatgaacgacattcatggtgccttgaagtcatggccggccacctccccgagcgtctcttactcttccctctctctataaaatggatgcccgagccctctcccttccctgtccaagcttttccccatcgctacctcgcccggacgtgttcgtcggccgccgtacgtcgttcgtcggagctcgtgccccgtcatccgctctcaaccccagccacctcgccccttcctccttctcgcagtggagcacgttccgtcgtccgcgccgtcgccgattcgctggaccatccactgccctgcagtgctcggaccgcccgtggagcctcgccggagcgtacctcgccgtccacgcagcacctctgccgagaccaccctgcccttcctcctgtacctgagcaaactcaagattgaagacaacccaagattgttgatgtattttctaaatcctgttttaaattactttatggatcttgtgatttatcgtggtattatcgatgcgattcacatgtatgattttagaggttcgatatatacgtgtaactaaaatcgaaccccgtgacaatattttgaaaatgcgtatgattttat

SEQ ID NO: 32273 - DNA, 654 bp, Zea Mays
ctgcatgcctccctcttttttttcccgatcaagcggttgtgccgtggaccatgtcccctacggcagggcgtcttcaatccatggttgcctcccgtgtgtgctccctctgtttttctcggtcggcggcgtggtgtggccaggcccgacgtccccgggcgcggcgtcccagcgcgggtgcacgcgagctcggtgcagccagcgtggctcgcccagcgcaatgcagtcgaccccagcgctccggcgtgcaggacccgcgcgccctcgccctgctccctcgctcggccgagctgtccctacgcaagcccctgtaggtgcgtttggacgcggctgcattctccgtgcggctgctcaccgcgccgtgctgccccctgcggtgtttgcctctcctggtagcgcggtggtccaaggctcccggcgagattccctggtggccgatttcttggtccattagtgcgtaggtcggcctccctcctccccttccatgctgctgtcgagggtgtttttttcttctttgatccatcgtgaggagagaaaggaagaagctagacacatgagatcccacccctctaggtcctatgtggctgtgtcccatgtgtcccttcgtgtggtttcgtttcgaccaatagaatcgcgccacgtagtttaaattcgaga

SEQ ID NO: 32274 - DNA, 2839 bp, Zea Mays
gccgtctcctctgctccaacacccacatgccacggcctcaccacctggtcaggccacgcgtagccgtcggcactactcgagtcggtagtcggtagcagcatccgctccatcgatcggccatgccagtgccagccgagctctcgccgccgtcccctcacggcgcgccgcggaccagagccggcgagcaggacgacagcacgcttcctccgacggcggccgccaccgccacggccacgcggggcggcactggcaggaagcgccggcgcggggcgcgggacccgcgcgccagctgggcctgggagacggagtgggaccgcgcgtacctgctcgcctgcgcggcggggctcctggtggacccgctcttcctgtacgccgtcgccgtcagcgcgccgctcatgtgcgtcttcctcgacgcctggttcgcggccgcggtcaccgcgctccggtgcgcggtggacgccatgcacgcatccaacctgctgctgcggctccgaggggcgtgctcgccgaggcgggaagacacggacgaggaggaggcgcagccggggcgcgacggcggcgtgccgggacgggggacgaggtccaaggagggggttttcttggacgtgctggtcatcctaccggtgatgcaggtggtcgtctgggtggcgacgccggcgatgatacgcgccgggtcgacgaccgacgtcatgatcgtgctgctgacggcgttcctgctggagtacctgcccaagatctaccacgccgtccgcgtcctgcgccggatgcagggcgtctccggctacctcttcggcaccatctggtgggggatcgcgctcaacctcatggcctacttcgtcgccgctcacgcggtgggcgcgtgctggtacctgctcggcgcgcagcgggccaccaagtgcctcagggagcagtgcgcccaggccgggagcgggtgcgcgccctgggcgctggcgtgcgcggagccgctctactacggcgccaccgccagcagcgtgggggcggccaggctcgcctgggccggcaacgccacggccaggggcacgtgcctcgacagcgccgacaactaccagtacggggcctaccagtggactgtcatgctggtggccaaccccagcagggtcgagagggttctgctccccatcttctgggggctaatgactctcagcacctttgggaatctggagagcacgacggagtggctggagatcgtgttcaacatcgtcaccatcaccggcgggctgattctcgtgacgatgctcatagggaacatcaaggtgttcctgaacgcgacgacgtcgaagaagcaggcgatgcacacgcggctgcgcagcgtggagctgtggatgaagcgcaaggacctgcccaggagctaccggcaccgggtgcgccagtacgagcggcagcggtgggcggccacgcgcggcgtcgacgagtgccgcatcgtccgtgaccttccggaggggctccgccgggacatcaagtaccacctctgcctcggcctcgtgcgccaggtgccgctgttccaacacatggacgacctggtgctcgagaacatctgcgacagggtcaagtccctcattttccccaaaggagaagttattgtcagagaaggggacccagtgaagaggatgctgttcatcgtgcgtggccacctgcagagcagccaggtgctccgcaacggcgccgagagctgctgcatgctggggccgggcaacttcagcggcgacgagctcctgtcgtggtgcctgcgccggccgttcctggagcggctgccggggtcgtcttccacgctggccacgctggagagcacggaggccttcgggctggacgccgcggacgtcaagtacgtcacgcagcacttccggtacaccttcaccaacgacaaggtgcggcgcagcgcgcgctactactcgcccgggtggcgcacgtgggcggccgtggcggtgcagctcgcgtggcgccgctacaagcaccgcaagacgctcgcgtcgctgtcgttcatccgcccgcgccgcccgctctcgcggtgctcgtcgctcggcgaggagaagctacgcctctataccgcgctgctcacgtcgcccaagcccaaccaggacgacctgctgtgactgagatgcatgcctgcagtctgaacaacgcgcgtctgttcagcggagttgaagcaaaatgcagcgagatggaagaagctggttctctatagtaaaagtgcatgtcagaaagaacttgttgggccgtgtccctccgtgtatgtagagcccaagagacatgtatatttatgtgtactgtatcagctgcaatagagagggttctagagacttcaaaaccctacctcaacatgatatcagagccaaagcgcggcggcgtgctactgtagcagcgacgacctacgcggagcaggcgtggccgacggcgagcttcagactgtgcaggacgcgagtagagcggtctgccgtgctgaaggaaggaggaggtgaaggtggggcggcaagcgcagcaagaagcaggcggggaagacagatatctggcaccgcgtggagcttggaggcaccaccagcttggacgcagctgccttcgccggcgctggcatcgactagaaggagacgtaggccagctcttgctctggaagaaggctaccgccgtcgagggccagctcgacccggcagctgctgccatcaacttgctctgctccaactccaagaagactgctgtcggctttgggttcttacccatcggaacacaagagaatgggagagaatcaagggattgagcaagttcttggtaagttggttgaattgttgtcagcaagaagggacgaagctccatcttcaagtaagga

SEQ ID NO: 32275 - DNA, 2268 bp, Zea Mays
actcgacttcccccacctccctcgtcagctgcagtgtcaatccctcctctccgccgcctacagctgcggggagctcgccagtcgccacttcgccagtcgccacttcgccagaatgttccatcagtaccaggcagcgggtcgcgcgctgccagtccccgctgatgagcaccccaagatctaccgcatggagcttgcgctaccaacgaggtctgctccaaatccaagctctggtactatctgaggaagctcaagtctcaagaaggtttaagagcaacggtcagattctcgccatagacgagatctttgagtgtaaccctacaacaatcaagagctgtggcatctggctgtgttaccagtgcaggacaggttaccacgacctgcacaaggagtaccgtaataccaccctgaatggtgccatggagcagatgtacaatgagacggcttcctgtcatcgtgtggtcaccctacatacagatcatcaagacggcaacaatcaactttaagctttgcaagagggacaacgccaagcagttccacaattcaaagttcaagtttcctttggtttactgcaacaagtcaggccaccaaataggaagctgaagaccaccttcaaggctttaaggcccaacttgttcgtgttatccaacttgccctgacaccctcccaaatctgtgaggctgtcagtctggtggtttgctagttcagggtaatgcaatctacatgcaacctattgtttctaagttctagttggaggtccatgaaagggttcttagtgtgatggcaaaggcttccgagtagcaccctagtgacccgggtctggtgggttgctagttcaggatgtctgaccataggcgtagaggagggagacgtacccagcaagagcaacatgattcgtaggatgaggcaccccattcgcagttgcctcccccatccccgatgacaatggagaagatgttcctcatgcaaactcaagcagttcagtcaattgtgcagaccctgatagccatccagcaggtgcaacaacaacctcagccacagatacagatatcgtagatgccaagagataatgtgcggagtttatgagaggtcatctcctgtgttcgctcagtctgctgacctcatggacgtcgaggattgcctgcgtatcgtggagcgtgagttgcacatcgcccaatgcaacgacagagaaaaggttatgtttggtcctcgcctgttaaggggagtagctcagtcctggtgggagtactatctcgctatccacgccgagcccgagaccattacttgggaggaattcagggataactttcgtcggtgtcatattctagaaggtctaataatagtgaagaaaggaaattctgacactaaagcaaggacccatgtcagtgagtatagagatatgtttctgcaattgtctcgctatgctactgaagatgtcaacactgatgccaagatgcagtaccgtttcctaagaggctttgttgatccccttcactaccaattgatgaatcataccttctccatctttcagcacctgatcgacagagctatcataattgagaacaagcgcaaagagatgaaagatcaaaaacgtaagattggtggacctcagcccgagagcaacaatcgtccccgtttctcaggtaatccacctcagcagttaaaacaaaatcactgtcagggatatcaacagcagaactagcgtctgcatcagtagcaattccagaggcagtaaccccagcatcagcagcagtatagttagaacagtcaatcgggaggaaatcagttctagaggcagaataatcagtcacctcgtcttcctgccccagcaaccaactagagtagtcaaccagcggccgatgcactgcacctgggatcttttcagatactgtaccatgacgatcttcttcagtgtgcctgacataccaacttcagggcacttgttcttcgatttcatgcaacaaaccactaagccgactgtaccaaagttgttcccctatataccagcttaaattttgttacaaagatcttagtcaaacattcactggatcgagcactatttggttttaaagttgattcgatgccactgttagtctaatttcagagtgatactcgactgaaagcccatcttctagtccattttgctacaatttctgtacaattatatatctcaatcacttaatcaaacattcactggaagaaaatgagttgtctttgtaagccggtgcactatgacccaaatagagtcacatcttttagatgtcttgggta

SEQ ID NO: 32276 - DNA, 2737 bp, Zea Mays
atgcctgcgacagtggtcgcgcttgtcgtcctctcccgctcgatcgtcgtcgccgaccggatctggttaccgccgcaaatgcatccacaccgcaccctgcgcttggggaggagggcgcgatgggatcaggagaactcggccaccttccatcgacggcgtggggaggcggatcccctgcgcttggggaggagggctcggatgacggggaccgcggagcagagaaaatgggagctgaaagtgttccgagtgccaaccgcaaccgtaaatttcacaagtggagagggcatgagcgcaaaaggcaacaatcttagcacagcagcaccaaagcgcgtcgtgtcgtgcaaatccaactttgataccactcgctgcctggttatggactccaccaggagcaaccaggtcgccggcagatgcaacagcaccatcgcgtcaagggctgccacggtcccgccgtcgctgaccatgccgcgcggcgaactcgctgacgccatcgtgggcggaggcggaggaggaggagcggacggggacccccgggccgccctcctccgtctgtctgctctcggggaccgcatggccgccgtccggggccgtatctgcgcctctatctcgggcgaagcccggcctctctcctacgccgacatccaatctgtctcctccgagatctccgccgctgcccagctcgtcgtcctcaacgccgccgagctcctcgcttcctccgtcccctttcccgccccacctccacctcctccttccgccgctccctctcccgctcccgtccgagagatcccagttgtggccgcttccgcccaagagcaacccctggaggccgccaaggacgacggtggctacgaggtcgtggagctcgacgccgccgagctgctagcggagcacgtccacttctgcgagatctgcggcaagggcttccgccgcgacgccaacctcaggatgcacatgcgcgcccacggcgaccgcttcaagaccctagacgcgctctcccgccctggtcacggccagccgaagccgcccgttggcagcaacgtgcgcttctcctgcccctttgcgggctgcaacaggaaccgcacacaccgccgcttccggccgctcaagtcggcggtgtgcgcgcggaaccacttccggcgcagccactgccccaagctctacgcctgcgagcgatgtggcggcaagaagcgcttcgctgtcctggcggacctccgcagccacctccgccactgcggcgaggaggcacagtggcgctgctcctgcggcaccaccttctcccgcaaggacaagctcttcggtcatctagcgctctttgaaggccacacgccagcagttactaagccaaacaaggatgtggtgacagggcctacagagtccaccattgatgctatggaggaagggggatttgaagaaggcattcctgaccgggaggaggatgaagagggcggttatgatccagagttcttcaaggagtggatggatgagctcagaggtggtgctggtggctccaattggcctggaccagcagcagatggacattagcaatgttgcgagggttaatagggtaaggcagccttccaacttttgctgttcctttgaattttgtatgtgaaattttggtgcactaagctttgaaacgatgataacataggatatttgtggctactcgcaattgcaaactggaatattttgggaatagaattcttgcaaaagttaaaaatataaaggcatccagctttgagcttgattggtcctgataatggttaaatcatagatcttatcgaaattcctatctatgttgcatatagatgtaatatgctatgatcctatgacctagcttgcaactgggccatgcagaattattcggcaagccaaccaacctagttgtgatgttatgaatatgtcagcttgattgtctagcaagtcatcctcatacaaaaagtgtaagattcaggtgataaatattataattagtcctattgtggaagaatgtaaacaacaaatgagtctatgactattatcaagagagcagagctagtgctagaggatcccacatgagtggggttgagaggagggataaaccaaggcaagcctccccccaatgtggagagactgcttcgatcccgcgacctggtaactcagtgaagcagctctcaccagtcaccactacatcaggcctgctcctcaagagatgaaacttttttgttaaacttttgccaagaactctgactagaatgaacagcatgtagcttgaattcaatggtggctgcacttataaatggtttgacaagggacatctgcttacatcaagtgaccaggaggatcaataaagactgaataaaggtaatacagtggagaactgtgtcatgctctgtaagcgttctccttggctgtgtgggtcatggagttgccgattactgaggaagaaggatagcttgcaggaaaacggtggcaccagttccctgtgcgctgctgaggatgcgaagtattcgggggagttttagaaaaatactttggttttgtgaaacaatttgattttagaatgtattgatgtgtttggacgcaacaaactttagtatttgttagaaagttaggcatttttagttttaatttaatccagaaaaacagtgcgatatatgtgatgacatgtatgtgcatgtgtgtataactactcgcataagcagtaaacagcaatgaaacatgcacaaatacgaagaacagagtgtacccagcggag

SEQ ID NO: 32277 - DNA, 276 bp, Zea Mays
gttgcaaccactgctcaggagaagatgaagtcgttgaggaggacttccaggagttccaagagtacgatgagttctaggcgtgggttagcggcaaacccccagtcggctgcctgtgaaggccgcgtttatctacgtttcttttccacactttgattattgttaaagaatatgtggatgtctcagacattatggtataataaactattactatcttttatgttattattcgagcactgtgtgatgatgtccggttatgtaactgctgtgtacgtgaaa

SEQ ID NO: 32278 - DNA, 3841 bp, Zea Mays
ccgcacacaagtcctcacgatatttagattcttatgcagctagttatacacgaattcaaattctatatttaaaaggagtaccaaacaggtccaatgtgtgtaataaaaagaaaaaaaaagattccagtagcagcagtaaagcccattcgtatgtggccctgctccggaccgaaagataaagcccatttgaaatccagctcggcctgctgtcagttcaggagcaggacgagtcggggtcggcgcggcggcaggccgcaggccggcagcaggctctcgcttcgctctctcgttgtctgtcgagaggaagaagacgaggcgagggacggcagcagtagcagctccagcatcttctagcttcttcattcatgggattcggtctctactaggattaggggtgcttcatttcatccgatccccaacgacttgacctgattctgatctcgacgacgatgcggaagcgggatctgggcatcctgctgctcgccgccttcgccatcttcttctccctccaccacgaaggcgacttctccttccgggagtcctggtaccacctcaccgacgaggacttccccatcaagtacgaggccgaccgcctgcccccgccgctcgtcgccgatctcaacggcgacggcaagcccgaggtcctcctccccacccacgacgccaagatccaggttctccagccgccccacgcccgccacctcaacgatgactccgccttccaggaggcccgtgtcatggccgacatctctctcctccccgacaacgtccgcctcgcctcggggaggcgccccatcgccatggccgtcggcaacgtcgaccgctcctacagacctggcgaggtcaggaagcaggtgctcgtcgtcgtcacctccggatggtcagtcatgtgcttcgaccataacctcaagaagctgtgggagcacaacctccaggacgatttccctcatgccgcccaccaccgcgaggtcgcaatctccataaccaattatactctcaagcatggagatgcaggcctcgtcatcgttggaggaaggatggagatgcagcatcattcagcagatctcttcgatgaatttatgataccagaacacaacatggatgatcgccgtcgaagcgccagtgagaaacagggctctgaggctggcaatgcagacctgcgccattttgccctttatgccttcgctggacgtagtggcgaccgtagatggagccggaagaatgagaacatccagtcacagccatcagatgcttctgtgatgttaccacagcataattacaaactcgacgttcatgccctcaatagtcatcaacctggtcagttcgaatgtcgtgaattcagagaatcaatccttggcatcatgcctcatcattgggataggagagaggatactaccctacaacttgcacattttaggaagcataaaaggaaacaagttaagagaacgcctggaaaggctgttattaatagcgtgaacaagcccattgaacacaatccacctgggaaggatgcttccaatagaatagctagagctcttgggaaggctgcagatatggctaactcaaataaagccaggaaggcacagaggatgcagtatgttccgacaatcactaatcatactcaagtttggtgggttcctaatgttgttgttgtacatgaaaaggaagggatagaggttgtccatctagcttctggacgtacaatatgcaagcttcatttaaatgaaggaggccttcatgcagatattaatggagatggagttctggatcatgtccaggttgttggtggaaatggtattaaagagcagactgtcgtgagtggatcaatggaagtgctgaaaccctgttgggcagtcgctacatccggtgtgccagtgcgggagcaactttttaacgtctctatctgccattacaaccattttaatctgttccatcatggtgacttctcgagaagttttgggaggacattgatacagctggtttagaggtcgcgactcctatcctggtccagacagacgatgggcataaacacaggagaggaagccatggtgatatcatctttttgacaagccggggagaggtgacatcgtactctcctgggctgctcggccatgatgcggtgtggagatggcaagtatcatcaggggcgacatggtccaaccttccatctccatcgggaatgatggagaacatagtggtgcctaccttgaaggccttctccctacgtgcctatgacccgaaagaggtgatcatcgccggtggtgaccaggaagcggtggtgctctctccttctggtggcatactggccatgatcgagctcccagcgccccccactcacgctcacctcctggaggatttctccggggacggtctcaccgacatgattgtggtaacttccggtggaatatatggattcgtgcagacaaggcagcctggggctcttttcttcagcacgctggtggggtgcctgatagttgtgatcggcgtggtattcgtgtctctgcacctcagttcgtccaatgccgccaaacccagggcttcctcgtctgaatacagatgatgttttgatatgcaaggtcaagagacttttggtactcctatgttctagtagtctatatatttaaccaaatgagaattcgtgttattgtatgataagaattgttcctactagtatatctcatgatatactgatagtgcaatctcgttttttgttgtctaccttggtgttcctagcccccacaaccatttgtacgttggttttttttttaagtttgtttggtcagcaggtcaggcaacaatccagtccatctaatttgagtacatgatggtcaagattgtttcctggtcgacaagttgcctgcccggctataaacaaaatatgatgtcctagcatgcaaagctcgtcttgtctacagtagaatgtgtaaaatagaagatgcagacaagtttgaaatagaaaatgagatataaaatagaagacgtagacaagtttgaaatatagaatgagataggagatctgttgaagatagtttgaagttgaagatagtttgaagatagtcttattgtgttgtcacaattctaccaaagagagggaaagaaaaaaaaatgacaccacacgtcaggctcagctcacagaggccaccgccgccgtgttcctctgtcccgcgggcccccaccccacccgcgtcttcaacttcctgcctgccgctcttctccttgtttgttcccttccgtctaatttggctgcgggtgcaggtggaggccgaggccgaggccaacgccgcctgcgcctggcctgccgtgaggtggaggcggaggcggaggccgaagccaacgccgcccgcgcctggcctgccgttccgcgtcatcttcttccttcgcgtaacgacgccggccaggccaataaataaacaatttccaattccgttcctggaggacgtctgcacggggaccttcccagcgggcgacggccggctgcatccatggcggtggccttcctgctgctgggattgggtttcctccttggcctcctctccctggcgatcgcggaggggctgacgctcctttgggccatccgaagcctcacgcgccgcacatcggcctcacgcagcacgccgccgccatcactccccatccacccgacgccggcgcggtctgtgtctcgccacagcctcaaccgacagggcttcttatggatgctggagcaacccaaggatagcagcatcaatggcgctagcccagggatcagagacaggaagctcctcgtcgaggttttccctgtaaaaatttgctgctgtttctgcatccaatctgccctcacgtaaatgtacctgtttttttt

SEQ ID NO: 32279 - DNA, 1435 bp, Zea Mays
gctataccccctccccctccgatccgtcgcggcagcgctcatcaccgctttaaatccgcctcctcccagcgtctccctcctcccggcctgtcccctcacctccctccccctatctctccaccgccgcagctagctgcgacgtcatgcactcgccggcgccaccgccaccgcatactatctacaattagccagccgtaggcttacctatcctgtgtcaagcaagcctctcgcaagcaacaaggaaggaagctagctagttttatagctgctgtcggcggcggcggctgaagcgacgtgcctgagctaggatttaggttgagatcaggagagggagaaggcggcggcgatggggcgcgggaaggtgcagctgaagcggatcgagaacaagatcaaccgccaggtgacattctccaagcgccgctcggggctactcaagaaggcgcacgagatctccgtgctctgcgacgccgaggtcgcgctcatcatcttctccaccaagggcaagctctacgagtactctaccgattcatgtatggacaaaattcttgaacggtatgagcgctactcctatgcagaaaaggttctcatttccgcagaatatgaaactcagggcaattggtgccatgaatatagaaaactaaaggcgaaggtcgagacaatacagaaatgtcaaaagcacctcatgggagaggatcttgaaactttgaatctcaaagagcttcagcaactagagcagcagctggagagttcactgaaacatatcagaacaaggaagagccagcttatggtcgagtcaatttcagcgctccaacggaaggaggagaacaaggttctgcagaaggagctcgcggagaagcagaaagaccagcggcagcaagtgcaacgggaccaaactcaacagcagaccagttcgtcttccacgtccttcatgttaagggaagctgccccaacaacaaatgtcagcatcttccctgtggcagcaggcgggagggtggtggaaggggcagcagcgcagccgcaggctcgcgttggactgccaccatggatgcttagccatctgagctgctgaaggtttgccctcaccgtcgcgatgtgatagcccaaaatccagcaagtcttccccggaccccggactgtccccgcttctccgcctggtgcagtatcgtcgtgatcgcgagaagcagcagcagcggtttgccgtattttttaccactgtgtataagtagcatatctgcaatgtgtatattttgttcaccgttcctgctggggcggccgcacggtactttacgcatgtaatatatgtgcttcatcaaatcactttcactaccatagcatgtgccggtttgtggtagtttcatgtctcacataatgggtacacattcatatcccagtggtctcggttcttcacatcaaagttctatttcttcatgcagca

SEQ ID NO: 32280 - DNA, 4226 bp, Zea Mays
cgcgaagatgctaatcttcgccggtcgccactcgcccgtctcggagctactgccgctggccaaccatttcacctgttgcggctctcgcccctccatcgaaatcgccatgccgcatggtcacgccgcagccgtggtggaccggctgctgcgcaggctggggtccgccgcttgccggctggaggtgcccccgaatatagacggggacctagcgcatgtgtggacaactctggcgaggttgcaagatatgctggttagcctggagatccgtccggagctgcaagaatggatgggggatatcaagcaggtcgcgtacgatgttgaggatctggtcgatgaattggaagaccacaatagcatggaatctcagatgagcggctgcgttgcagttggagaggaaacaagatggtgctgttcatgttcgtttctcatgcatagtacaagagcggacagaatgaagacaatcaaaagaaggtttatggaatggataacagagtagttcctacaacattctacattcataactttgtccatgaatttgcaagacatgttgcttgtgatgatattataattttcgatggtaccaaaatgcaaaagggctgtgcaaaaagacaaaccttccaatatgcactcttgacatgttaccgggtgcagtcaacattttcccactcaacgctgacaaggacaagggcattgcatatcatgaactctgaggcgataacatttcctcgtgaagcatttgaattactgaagcacttgcgtgttttgaatcttagtggatgttgcattgaagaattaccagcctctataggttgtctaaagcgtctaaaatatcttgatgtttctggtgtgcagatacaaacattgccattcccggtgagtaggttgacaaaccttgaggtactggatctatcaaaaacatgtatgaaggaattaccctctttcattggtaatttacagaacctaaaatatttaaacatgcaaggttgtgataaacttcaaaacctacctttatcccttggtcatctacaacgacttgagcaacttcgactgtcatgctgcagatgcattgctatgctaccagactctttgtgcaaccttatcaatcttcgaattttggatttatcaagatgcactatgctgcgacacttacctgctttatttggtaacttagtgaacttggaggatctaagcctatctagttgtttcaaccttaagcagttaccagaatcttttggtaacctttattttcttaggttcctgaacctatcaagctgctatgaacttcagcagtttcctgaatctgttacaaacctcgagaaactggaagttcttatactccggagatgttgtagacttcgaattctccccccctcctttgcaatgattaagtaccttcgaattcttgatctggctggctgtgaagcacttcatgtaagtactgagatgctaacaaccaatttggagtatctgaacctacaacggtgcctaaatcttcagactcagccatactatttcgaaaacttcaataagttgaagtttttgaatctttcccattgcctccctaccgttgattgcctggaatctattagttacttgttcaacttagaatatctagatctgtcagaaacttcccttgacatacctatgtcttttgcaaggcttcagaagttgcacacactgaacctcactggttgtgctccaatgcatccatcctctaatgtacaccaaacatggccaggtatattagcaaaaattacaagtctcaagtctgtgctgacgatggacccagtattagcggcctctcttcaaggacacaccgagtgctctgctgactatgattatcactcactcacaacaaccgatgagcttgttattaaagagatcacaggcggttcccgaggccttcgtattgctgagcagttgaatctgcagaatcgactggaggtttgtttccttaagctggaatgggttcctaggtcccaatcagctcaagatcaactattggaatatacagatgaggaagtgctggagaagttccaaccaaatgagactctggagcattttatgctagttaaatatacaggcaatgtgtttcctacatggatgatgaacaaactgacttcactcccataccttgtcaatctttgtttgttccacctgcataactgcagtgctctccctccaattggccatctacaaaatctgcgttacttgcatattaaagatatgcccaacctcacaaatctagagatgggtctttctggggggcctgtgtccttggggaaattgactcacctcaaactggaagcactgaatttagaagagctgtctatactcttgtcagccaacaatgagagtccctgtttcatgtttcccaatcttgaggagttatctgttctatcatgctctaagcttgtcttcaaaccatctgtgcctaagtgtgcgaaatatgtaataaaagagagtaacatggttctgtcatgttggcagcctctggggccattctcatctccaccaatagaaaaagtagagataagtgggtgtgtgatgccttctggttggttgcaatggcttagatccatacagactcttgagaaagtagtgatagatggtgaagctctttcatcttttgagctccagaagatatatgcatttcaagaagcatctggtagtaagatttcaaaggaaactgtaagttcatctaggacaaatatgtcacgtgagttgaccactgaggatggtgcccttaaagctattggtatcgacaactcaacaatcaaacatattccaaggtttaacaccacttctgaactctcagtggatactatttcatcctctaaagtaagcacaccatccaaggagatcccatcaactttacgccgtccggacaagtcaaaaatgcctgcactaatacctggagatggatctttaaacttaagccttaagcaggttcagaaggttactcataatttctcacctttatttgagttaggtgaagggggaacctgggcagtttacagggctgtattatcagataaccaggttgttatcatccggagagctaaaaagggccacgttcaagaggcaaaacatcttatggaagtgaagctccttacaaaaattaatcactggagtttggtgagattcttaggttttattgatgaaaaagatgagtgtattcggatcacagagtatgttccaaatggcactcttagggaacacctacatgaccaacgtaagagaatcctgaattttaatcaacgtatagtgattgcccttgatgttgctattgcattgacttatctccatttgtgttctggggacgctttaatctgttacaacttgaggacgtcaaacatcctactgacagagagctaccgagccaaagtgtgctgttctgaactgtcaaaaagtggtaatatcgtgctattaaagggaacagggggctacattgatccagagtacttggagacctcagagctcactgccaaatctgatgtctactcttttggaataatactcttagaaatcatatcttctcatgggccacaagactgggatgtattgatgaaccaccggcaaagcagtgttgtacaatgggctcttgagaaattctatgacgacctcatgaatgagatattggattaccgtatggaggatcgcgtggatggagatgtggtcagggacttgctcagcttagcgttgagttgtgtggtttcgcgtggcgctgatcgcccaagcatcgtagttgtcggggagcgactgtggaaaatatggcaagatcatcgaagaaacgtaggggaacagcacgagtaccaaggaagctgggcagaatttatcgaacaagagggaatcctgaggcatcacaagtgtgtgctcaagagaagttgggagccttcaacaacgcagcaggattggtctgtgtatgttaggcagattgaattagttcaagaagcttacgataccccatggggagaggaaattttttcggggtctgtttcattggacgatatcacagtatattctcggtagaaagcttcaatacgattatattactcctgttttctccgcggtattacatgtgtagattggaggacaataacctatttgttctatttctgtttcattggacgataaatcatagtgtctcctcggtatgaactcttgaaagtttcaactcgttgttttcctcactctatttattcagtgatattgctgttagaaaa

SEQ ID NO: 32281 - DNA, 950 bp, Zea Mays
ctgccatggatatcctaccgaatttgcttcttacttccattattgtcgctcactgcgtttcgaagatgcaccggactatcagtacctgaagagactgttcagagacctttttattcgggaagtcgaggattccagtgttgacgtatcagcagcgacagaaaatttccagagcttaagcctacataatgatgagttagctgcaaaaaagactgctgaagataaccctgtagtgttaattcctggtcatttgcaagttaccaatacagaatgtgttagtttgagctttggcagttttggatctggtgcattttctaggctactcccacaaaagaccactgatagcaatgtggaattccttgtttgagaggattctgcaacagtagatccaatagatgccaggaatcaagattactatgaaagtggtgcaataacttcaccagcagaagaaaatcttgaggccatgctaggaactaacatggagaagtcgatgcaccttctgtttcacaggctaatgagctcagtcaggacgtacttgatccttttgtacttaaatatgacgtgccatcagtttcaagtcatgcttattcaaacatgaacactccacaacctagcacaatagaggacccacaaggaaacaaccaagcacatactctttcccatttgtctaacatgatggattatggctctcatcaagtgactcctccccctcacgatgactttgcggacagatgtctcaattctagtggtgcagctacgaacaacaatctgatgtcctgatcgagagcgatggagctaatgttcaaacttgtgtgtttgaacttgtgaactaaaaatgtgaactgtggatgtgaacttatgtgaatttgtgaacttatgtatttggacttgtgtgaaattgtgatatgaacatatatccatgtgtttgaaatctgtattgtatgtgatattct

SEQ ID NO: 32282 - DNA, 3080 bp, Zea Mays
gtgaggaagtcgagagctaaaggccggacagctgctggaacagctgctcgcgttcactgttgcgcggcggggaagccgagagctaaaggccgggccccacctccctcgggcccttgtgcagatgcgcagaggttgcgtcccctaattcgtttgtcaccaaactttgcacccgcctcgccgtacccgtccgaaaccctagtctacctcggcggcggcgggccctccggcgatggaggtggaggaaccgctcccaacgtccaagaacccccgccgtgctcggcgccgggacctcaacgcactggatcccacattggaggagtccgacggggaggatattggtgttccggaagttggtatggtgttcaataatcacacagaagtcaaccgattctaccgccggagggaggccacgttatgagccgaagtttcggaaaagggcttcatcgaccactaactgcccagccaaagtacgagtgaagttgtggggagataaattgttgcatatagagttggcgatccttgatcataatcacccagtgagccctgcaatggcaaggtttttgaactcttataagcagctctctggccctgcaaagaggcggttgcgtatgggtggccctgggactatgcctgttgaagagtcaagcaagatgcccatggataagctgggggagcttgagcagcttctgtttggtgagagcaagcacaacagctttgtggagaggggtcgtttgaagctccaacctggagattcggaggcccttcggcttttcttcactcggatgcaggccaaaaatgccaacttttttaatgtcattgacctggacgatgaaggctgtaccaggaatgttttctgggcagatgcacggtctagagccatgtgtgagtactatagtgatgtcatcacacttgatacatcatatgtggctagtaaatatgatatgcctcttgcaacatttattggggtgaatcatcatggacaatctgtcttgatggggtgtgccctgctttctgatgaaacagcagaaacctattcatggctacttaagtcttggatagcatgtatgtacggcaatcttccaaaggctattgtcactgactattgtaggggcatccaaagtgctgtagctgagattattccgggagtccgtcatagaatgtgtttgtttcagataatgaggaaggccgcagaacgtttaggtgggctgtcagagtacagagctatcaacaaggcgatgcataaggctgtatatgattctttaaccattgatgagtttgaagaagaatggaatactttaattacatatagtgggcttcagagcaatgactggttaagatcactttatgaatgtcgatcttcatgggttcctgtttttattaaagatacattttgggcaggaatgtctactacacaaagaaatgaaacaatcactcctttttttgatggatatgttgatttgaaaactaccttgaaacaatttcttgtcaagtatgagatggctttgcagagtaaatatgagaaggaggcccaagcagattttgagacgtttcataagcaacgcccaccggtatcaaaattctatatggaagagcagctctcaaaagtatacacacataatatgttcaagaagttccaagatgagattgaagccataatgtactgccatgtatctttaattagtgttgatgggcctgtctctacattcaatgtcaaggagtgcattttctttgaagatggtaaaaggactatgagtaaaatttttgcagtgacatacaaagtggacgaaaagaatattagctgtatatgtggaggtttccaattcagtggcatactatgtaggcatagtctctcaatgctcaagtttcaactggttcgtgaaatcccacaacattatattcttgataggtggaagaaggattttcgacagttgcatgtgatgagacgccctccaagcgatcttgttcctaacaatcgcatggatcgatatgactatttatcaataagatgtttgcaacttgttgactctgcagtcctatcagataagtatcgccttgctttgaggttggtaagggagacagagaaatttctgctaaatagcaacacacatgatgatacacaaccaaggatcaagtctcgtgttcctaaagtaaataaaccaaatattgtgactggccaaaccatggtgggtgcagctactggaaatggaaatgatggtctcaaaggaccagaggctacagcagtcacgcaagtaccacaatcccaaaagggaggagcagaaaaaggaatagttcctactggctacattggagtaccagctaatctccaacaatttgtaggcaatcaaacagcatttcggccaagcattgtgtacatggtaccgagtggtgttgatccacatgcttttggaaatgttatgatgccagtgatgtaccagcagatgttccaggtgcctccgaagccaaatgagaccgtgcaggatacttcagccaatggaaaaagtaagcgacctcgcggtcagaagctcacagagacatcccaacaggcaaatggaaccccagcatctgcatctggctagggtggactactaacattttgaacaggatttctgtacatacgttgacttcgttgacttcatgccgtgagaaattttacatatggacgctggcactaacaattacctcaatgttgtccaaggtatctggcccaggaccggaaattatctctcgcacactttctttttgtgtgtggctgatttctgcaagacaggttccacctaatgtacaagtccccttgtcctttttatgctatgtaaatgaatgttcttggaacagctctatcatggctcatgagtacggtgtcagttgccttcgaattcccattgtcgataccagatcgatggctaatgcatatagaaatataaaggggacaaattatgattatatctttcttggcattgaagcgtgtcctgactggtcattgggtacttcggcaataatcagggcataccaaaggagagctctattggaagttttgttgttctctcggtattcagagcaaagctaatttattcaaaactaac

SEQ ID NO: 32283 - DNA, 2553 bp, Zea Mays
gagtctggaccaaacactatcgccgtataatgagatttggcaggatgaatcaacgtgccgcatgcttgtgctactatttgccatctgaaccatgtcgtcgcggcgacgccagtcatcctcgtggcttcacagtccatcgacgggacaaagctgtgaatccatcaacggagtccccggattccttactacattcgttcgttccacgccgccgtagaaagcaacccgaagtccccaacgccaccggcaccggcacggcgaactcgggcacgcaccgcagccagccggccggttcggcaggcaggcaggcagagaggattgcattgcactgcttccatctcccctgcccgccccgccgcggcagatcccgaggcggctcgcacttccaggtcaactcaaagtacgcccgcgcagcaggaggcggccaaccagtcgccgtcgcccccggcccccaccccgcctgccgcagcaagcggcgtccgctaccgcacgccctcgtccccggacctcctcctccccgccgacgccgccaagatgcgccgctactccgcgctgcccaacggcggccgccaggagacgctggccgaccgcgcgcaccgctaccggggcgtcgtgctcgtcatcctcgccccgctcgcgctcgtctctctcgtcctcctcctcatgccacgctcacccgctggcaccatgggcggcgcccggaggtccgggccggccggggcagacaggtacgccgtcatcttcgacgccggtagctccggcagccgcgtccacgtcttccgcttcgacgccaacctggatctcgtccgcattggcagcgagatcgagctcttcgtccagataaaaccggggcttagccactatgccaacgacccccgggaggctgccgagtcgctcgtctctctccttgacgatgccaagcgagtggtgcccgccgaattgcgcgaccaaacgcctgtcagggtcggggccaccgcagggctgagaaatttgggtgcacaaaaatccgaggcaatactgcaagcggttagggaccttcttcgcgaaaagagttcctttaaaaaccaaccggattgggttacagttcttgatggaacacaggaaggtgcatacgagtggaggttttaggaattattcgtgggtgatgtgagagtgttcaggaatttctcctgaatcgtgctcctgtattcacacttaagtccagcaacaagtaacaagtattacctttccctctacttttaggttactatcaattatctgttggggaacttgggaaagacttatgcagacacagttggagtagtcgatcttggtggtggatctgtccaaatggcatatgctattgcggagaaggatgcagaaaaggctcctaagccatccgatggggaagatgcatatgtgaagaaactgtttctcaaaggaaccacatattatctttatgttcatagttatttgcattatgggttgctggcagctagagcagaggtcttaaaagctggcaatggcaatggttacagcaactgtatgttagagggatttcaagggcaatacaaatatggcgacaattcatttgaagcatctgcttcaccttctggtgctagttattcaaaatgcaaggatgatgcagtgaaagctcttaaggttgatgaagcatgcacccacatgaagtgttcttttggtggcatttggaatggtggtggtggtgctggacagaataatctctttgtagcatcctttttcttcgatagggctgctgaggctggatttgtgaacgccaatgcacctgttgctaaggttaaaccctcagacttcagacaagctgctgagcgcgcttgctctttgagtgtgaagaacgccgaggctacctttcctggtgtccaaaaggataacattccatatatctgcatggaccttgtttatcagtacacattacttgtgcacggattcggcgttgatccagaccatgagatgaccttggtaaagaaggtcccctacagtggtgcatatgtcgaagccgcatggcctcttggcagtgccatcgaggtggcatcttcatcatagcaaggagacacagtttagcaaggtaacatcggacggcattgttgtcatgaagttttagcgttgggagtcccccccccccctgaccgcttactgaattcacaccattttgtcactcaatccatccatcctccccatacggtaacgggtagctttacacaccaagggaagcctcggctgtacttggttctagcggccattgtaagccctattactattattgttattaatatctgtatactactaatgcaagtaagatgagagcctcaggcattctttttgacctctgtatactgggatgtgcatgatataaagtgccatcattcgctcactcaaatgcgtacatgtttggtcattgtgtttactggcagccctttgctgctggaaaaagagtacatatttattaaccgtgtgggcctgagctgcttatctactgctggcttgctgtgccctgtgcctgtacagacgagcttcggcccggtaaacatcggctttact

SEQ ID NO: 32284 - DNA, 1288 bp, Zea Mays
tttccagatgagaacaaaagaggagcatagtagcgtgatttgacgggacaattatggcagaaaaaaaggccaggaattccccagaacagctccagctcgacgttgccgtgtaacggaacggaagaattgaatgcatactagatcgccatatctgggtgacagcgacgtagagcataggaaaggtccgtctcgctgtcggcagcggttctccgtaatttcttcctctatatcccactgtcccgccaggtgcttgcaggatggcgcggaggagttcttcctgaagcccgtgaagccggccgacatgaagaagctcaagtcacacctgctgaagcggaagcagcccaaccagaagaacaagcctcaggcgcaggcggtggagtctcctgagcagcagctggacccgcatccgcagccggtgcacgagccggaggaagccgcggcagatcgcaacggcgtcaacaagaggaaggcagcggccatggaggaggggctgaccgtggtggtgacggcgccggagagcaccaagccgaggaggctgtctacgagcagcctgactgtggagacctgatcaaccgtggcgacctacgggctacggctacgcacattaatctagcagtggatgcaagccccagtcccagccccgccgccaagaaacacattttggttctgggagctaacggagggaagtgacaaacaattaaattatatgtagcggctgctgcttcggcctgcaaattttgttgcgctaacggtcatggacatggacatggacaccatcccttgtgttcgttaatcgttcggaaggggaaaagaagaagaagctgtagataaaaaaaggacaggcggctaattgttaatttccgcatggcttaattctggcaacgacctgctggctcaatcaaaaacctgtgacggacagacggatggatcaactgatgatgttgttgttttggctcggttcttcttccttgtacactgagtgttcagatgaacatgttgtaatctgaacatccgttcatgtcagcctgcctgacgatggaggcaaaagttcttctacatcatggtcaaggacaacgtttcagtggtcctccccgccggtgaccggtcccctcgagacaacgggagagacggacagacagacagacaagatctccattcagacgcaacatgtgacatgtcctcctttttttttcctttttacatgagaaaaagaaacaatcgcctaggagtgaactgtaactgtgacagtaagaaactgccagcactgactaatttacagatgaagaat

SEQ ID NO: 32285 - DNA, 2861 bp, Zea Mays
acactttcttagcaggtaactgcagacggtcactgacgtgtgggcattatctaggcttggtccctaatgtcagtgacggagcaggttccaaatatgaagcttcagtagtgtatcgtgagaacacgtcggtgccaggctgccagcagcaacgaagccgcaccaggccccgcactgcccatggacgcacgcctcccggggctctcgtgtccctgtccgtctcccgtttgccgcctccaccgcaacgcggcgcgcggggtggcggtgctctcgcgatcctcgtgtcgattccagcggcgggggtgccattccctcccctggccgttgcccgcgcctcgcggtcgcgcaccggaaccggagccccgccgcgaatctagggttgcctccgcctcgccccctcctcccgagactcctagcggcaggaattaggacgagggtaacaggcgacagaggctgcgaaggacgccccctcgtcgaatgcgccggcgaccgatccgtggaggagcagccggagcacgcaggagattgttcattagtgttattgtttataaaatggtcaataaagagttgctattaattgagaagagaatctactaatggatgggccatgaaattgcatggtttttatttgcctgaaaagaatggagcctttcttgttgttttctgaatgatataactggacactgtagttgaagggcaagctttgaaaatgtcatccactgtgccgaagtcatcaaatatcttctggcatgattgcctagttggcaagactgatcgccagaagctactcaaccagaaaggctgtgttgtctggatcacaggccttagtggctcaggtaaaagtaccttggcatgtacattaggccgggagctccacacaagagggaagcttgcatatgttcttgacggtgataacttaagacatggtctgaacaaggatcttggctttaaagctgaagatcgtgctgaaaatataaggagagttggtaagtgtctcaccaatatagataaaaaaggacagacctagtgctggtggggaaggaataagacaagccttaccctgcattgcatcgaacccgaacctttggctcagtggaaaggcttcccatcacttcgctaggcctgttcttctgtctcgccaatatagatgtctattatatttcaaggaactcccacgaaagtaaaagcatgataaacaagtcttgcttctgccattattttatctttccagcattctgcagttcacatttttccttgaatacacgggagagctgtgtatctttgtattaggagtgaaaaaagggggtccaatacagactacagaacttcgcctcctgttctggaccaagcagagaggactgccaaaacaaacacgactactgagactaactaatcagacaataactgtaggacctaagtacctaaccaacactgtgaaaactactaactagcccacccctcgaactggactcagttctttaagatgtttggccccggcaaaacaccaaagatggtgttctttagcaaaattgtgcagaggccttctgcatgttgggctgaacaacggcattcctatgctttcaaagagaccaagctcctagaatgatggccgagataactccttgctggaccagttttgagaggtgttcaatgctctccttcaatcagcaaaagaggattcagcttgacttggctcttgaggcaaagcccaagtttgaaagaattttaaaccagaattctctagtgaaaacacaagtggtaataatatgctggacattctcctcttcttggtcacaaacacacattattgagggcgggggaggcctttttttgctaaccggtcagccatccagcacctatttctaattgctagctaggatgatcttgcactttgctggagcacaggttttccaaatccgcctccatgcctcaaaggtcacagatccttggaagattttgcacttagcagttcacattttgtttcaactattttgaacaggtgaagtagcaaagttattttcagacgctggccttgtatgtattgcaagtttgatatctccatataggagagaccgtgaatcttgccgtgcactgttgtcggatggtagctttattgaagttttcttgaatatgtccttggaattatgtgaagcaagggacccaaagggcctctataagcttgctcgtgctgggaaaataaagggttttacaggaatagatgacccttatgaagcaccactgaattgtgagattgagatcaaggaaatagatggtgtatgcccttcgccttctgacatggcggggcaagtggttacttaccttgaggagaaaggcttcctgcacgagtaggctgacgctgaatcgaagctacatccggggaaggtttcaatcagacaagcgcagaataagtcaaaagcgctgccagttaccgtatggttacatagattgatctggatgcctagtatttttctttccgcgcttgctctaccacaagttccattcagtttcattcagatgagcctagatggttcctaatttctttgacctctggaatagattacctgtaatgcaattctgataacagcttggggcagtatcgatttgtcacgggaaggtacgcctaatgttgagagaaactgtattcttgtgctccactttctgcagtgccgacgtgtaccctttccgttttactaaattataattagcttcccttcatttataagtttatttattttttatacactattcttgttacatatctaagtatgtctggatatatagcaaaaaaaaaaaaaactaaaacggattaaattttgaaacttcgaaccgagatagtacagtttagacacgctggaacatgcggg

SEQ ID NO: 32286 - DNA, 3175 bp, Zea Mays
aaaaaataaactaaaataaagggagagaaaaactgtcttttgctacagctgagctagaaaaggaacctttttccgcgcgttattcttcttcttgtattcgaaagcccaagcccaactgataaaaggcccatgctcaagcgataagacgagaataaacaaccaccgatcccccagggcccaggcccacgcgcacacattctgattccgaaggcaagggcgtgtacatggcggtgagacgaggagccaaaacccaacggcgacgagaaatccacggcggctagttcaccccatccggcgcgagcgactccctccgcctgcaccaaaaacgagggcgttttcgtgtcccctcctccaaactccggagcccacatcctccagtccccactcacctgcgccactccccaccacgctcctcaaaaccctaggtccttcgatctaatgccgtgagctctcgaattctcaattcccccagcctctccatggaagaccccgtggcggtaccctcctcgtccttgaccgaccctgccgctgccgccgcagctagggttccgggtgcggtggcagcagcccctggcgtcacctctgcgccgtccgctctcgctccgacgcagccgcctgccaccgcggccgcggtctctgaagccgcgacgccgtgccagaggcagctgttcacagtggagctgcggccaggggagaccacaatcgtgtcgtggaagaagcttctcaaggaggccgggcacaccgccgcggcaccgccagtggcggtggagccagcgttcgccgcacatgcgggcccatctggtccggcacatcctgcagaaaatgacccaaaggatccaacacagccaaatcggttcaatgcagtgattgaaaaaatagagcgcctttacatgggaaaacatagcagcgatgaagaggatcttaatgatgtaccagatgatgatcagtatgacactgaggattctttcattgatgatgccgaattggatgaatatttcgaagttgataatttgaaaactaagcatgatggctattttgtgaacaagggaaaattggaacagattgaacctggtacagcggcaaatgttgctccaaagaaaaggagaagaaaggatgcatcaagttcttatctggagagtaatcaccttggtccaattgattattttgatattggcgatgtacctgaaaaatcctctgcaagaggtactgtgcagacgggaaaacagttagttagtagcaacgtaagttcttatggtcaataccatgaggacaatagagtggtgaagaataaaatcagtggtcctggaggagcccctaaaagaaaatcttctgaattctcgggtgacgctgcagcacgagctaagattattaaggatgtctcgcatgctcctttggagctaagagacatggaaaagcataaagctgcagcactacctgttgactatgcacataagtcaaaaatcagcgaaacatttgattatgcatatccagcttatagggataaaggcacttcagggcaacttgatttccaacaaagaaagataagcagggaaaatcaaggtccatcaaatagaacctatcgcaaagagaaacatggaacaaatgaatatcctggcatcgctatggctactgcggtctattctacacaaacaatgcacccagttgttggtagggagggttcaggaactaaacccaaaggcaccaggcttgagcgagctattcgcgatctccagaagatcgttgcagaatacagaccaccaacaattgatattaatgaggtagatccaaatggccaggtagcagttaaaagacggttgcctcctgaaataaagcaaaagcttgcgaaggttgcaaaggttatcggcaaataacggaaagatccaagaacatgagctaatgaatcgcctcatgggcatagttggacaccttgttcagcgcaggacactgaagagaaacatgaaagaaatggtagaatctggtatatctgctaaactggagaaggctgacaggtttcagcgtgtaaaattggagatcaatgagatgattaaagagcgtatggctacaaagtccaaggtcaatgaacaggatggttcagctgatgattttcaggttgctaatgatgaaagaagagctttaaaaacaaagtatacaatggatactgcattggaggacaagatgtgtgatctgtatgatatgtatgttgagcctgataaggcgttagcacgaattgttagctttatcatttgcatgttagtgaagggtatggatgaagacaagggccctcaaagcaggaagttatatgtagagcttgccgagttatggcctcatggttgcatggacaatgtcgggatcaaagatgccatttatagatcaaaggagcgaagaagattattgtacagccagcaaaaggttcgcagtgaagagagaatgaagaggaagaggctggctgcaacagcaaagctgccagatggcctcgcagttgcaatgcaaagtggagttgccccacaagttgcacagccacccataacaaatcccatcacataccatacggctgattatggacagaacccggggttaaaatattttgatagggctcgtgaaacgagctccagtgcaatccctgatgacggcaacagaattgctggtgaggtcaagaagaagaaaagaaaacctgaatatgaccctgtagatacacaagctaacctaccaagggctcccatgccgcacgggagcgagaagcaaaagccttctaagcctgctgacgaggccagtgctggtagcctgccctccatggcgacaactcaaactgtgcttggcctaccgtcggtgcttggtcataaccaacaacctagctgattctttcggcgtagtgttggacatttggttctccttataggcctttttcagctgctgtaacaaattatggcctttccatgtgttcagcatcgattgttgagactaacatgttcccgagtagagaggatatttgatcactctttacttttccagcattgcatggttggtacccttgcccagattatctgtgcagcgctgatagatatgatctgcaaccccttcaaataccagttgtaattatgaatattttctcgagacatgtactgctcatattgtgcgaagcgatgtgcagattttcttttacttttgttcaagtgtg

SEQ ID NO: 32287 - DNA, 3066 bp, Zea Mays
atggagttggattggatcacaatttctaccgacaggaaaagaggctgcagtggaggtggggttggtggtccgggtttgatcaagttcatcaccctcgtcaggccccagccctcgatcgcactcctcacttgtcctctcacctcacctcacctcacctcgcctcgacctcgagcagcgaaagggaggaactctggaccgagaaacaaaaggcaaaagcaccagcaggtgatcaactcccctcggcaacaactccggcctccactcgctgcggatgtttcactcacctgtgacgtgaggcggcacggcaggtagagcgattgcgattctatcggagcgctcatcaggatggatagcgccgcggactcgtcttcaccgaggtgccaccacggtcagtatcgacaggatgccggagaactcgaggaccagactagcaccagcaagatgccgtccagtgcttctgagcttccatgctccttgaagcgtgaggtccgagtccttgaaaagcgactggatgatcaattcgtcatgcgccgtgctcttgagaaagcactaggttacaagccttgtgctgttcatgcatcaagtgtgaactgcattccagagccgactgaggagctaatcaaggagatcgcagtgctcgagctagaggtcatatgcttggagaaacatctcctgacactataccgaaaggcatttgagcaacaattgtcccctgtgaactctgcttgtgacgcggaaaataacaagcagccagcaaggtctttttcaggcatactatctgaagcttcagtgctcagtttctcgaccccaaggaagcatcagccagtccagtccagtcgaatggtcctggcacgcaagtccacgcctacagcttctacaagcgaggctagcagtgaaaagatcaacatcggacgcagccattcctcgctcctgcaccgttctgtcagggtgtctccatccgcaaacaatcttgctagagctctgaaaccatgtcatacttcacctctatcttttgttgaggtacagaatgatatatctgaaatctctttggttccaaagtacttcaataggtttgctgcagggctgagttagtggtacattctgtcttgaactataagggattattatagctactatgcacctggacagagccgtagtcccttatattttataggatgaaggcagtacatgttgtatggtagtagcaaatttgacgtgctgaaatccatcctaacataatctgggccgatatgagcaggaagggaagtgcatggagcctggagttgtgagcttggcggacatcttggggaccagggttgcggaccatgttcctcaaacgcccaacaagatatccgaggacatgatcagatgcatcgcggccatatacataaggctgagagacgtcccttccgccgccgcgcagcatgccttcttcccctcaccgtgctcgtccttctcttcagcaagcggactgtcttccaaatacactgcagatgtatggagttggagccccaggtgcaggagagagagcttcactgaggcgtggcaggtgcaggacaacgagctaggcctaggcggtggtgaagcaagggactcggggctgcagtacgattctgtgatagaggtgtctgctctttgcaagggcgatcagaggtccgctgacgttaaggacatgctgcgcaagtatatgtgagtatttgccatatcattttttttctcaggggtcagtgagtacaagtatttgctgactagctgcaggttccactctgtaggtcacttgtacagcttctagaaagtgtcgacctcggtggaatgaaaaacgaggagaagcttgctttctggatcaacgtgcataacgcgatgatgatgcatgcccatatagagtacgggatcccacagagcaacagcaaaaggatactgcttaccaaggtatcctacatcgttagtggccagagagtaaacgcggagctgatagagtaccagatcctgtgctgccgagcacactcttctggacagtggcttcggctgctgctccacccgaaatggaagtccggcagggacagggacgaggagctgcaaggcttcgccgtggatcggcccgagcctctggtgcacttcgcactgtcctccggtagctactcggatccagtggtaggtagcacgtaggcaggcttcatcaaacgcacacccagtagtacggccggtacccaccaaattccaacgagacgcgcacatacatcacgtacggcacgaaaactccgatgcattcatctccttcaatccaactgtacccttccaggtgcggctctacagccccaagagcctgttccagcagctggaggcggcgaaggaggagcacatccgcgccaacgtcgccgtcggcgtgcgcgggcgggggcagcgcaagatcatcctccccagggccctggagctgtacgcgagggacgccgggctgggtgcgcaggaggtggtggccgcggtcgcgtgccacctgcccgacggcctccgggacgccgtgcgccggagcccgccggccgggcgggcgcgcggcggcgtggagtggaagccccacaacctggcgttccggtacctgctggccaaggagctggtcggcgggtcgcccgcgtgcgggcggcagcaacttaagaaatgcggccccccgatcggtgcgccgctgcgtgctgatcggtgatccgtcagcagatcgccgtgggtccgtggccgtgccgagccgagcccgaggtgcggtgcgggggtatcagggtctgtatgtacagagggagatggacaggaagatgatctgaatagtgtgcgctctgctgtagctagtttggatcattctgattggatgggattgaaatgaatatgagtgtatcctaacttgccctcaatcccatgaaaaataagtgtatccaaattagccttcaagtgtgaatagtgccacatgaattcttaccttaggacttgtttaggagctgtttaggagctagaggaatgaagagaattaaaaaggctaaaatcattttgatatttaattttaaataaagagaggattttaatctctct

SEQ ID NO: 32288 - DNA, 2213 bp, Zea Mays
attcccccaccgaccagcttgtccccgtcccacctgcccggcgtgcccgaacagcgcctcaccgcgccgcacgcctgcgtcggtcgccgaccccagtcaccggtccacgcccgcctccccctttctcctccgccctttcttgtgaccgccgccgcgggccctagcccgccgttccctctccggcgccccgctcccgcacccgcaccggatcagtccgggccgcgtggtcgcccccacctaccgcctcgggtccactcgctcgcggttgcgtgtcccgcggggtggcccctcgggcctcggcagctccggtttcgaatggggctctcgtcggccgccactggcgacggggtgcagctctgcgtgttcgacctccagagggggcaacaggagggccaggagctcgacaagatcctctacttctaccccgccgactgccccatcctgctccagctctctgtcatcggcctctgcgaggggatcgtcactttcactagaatattttccccagaagaggattgcgaggttatagaatcagagaaacactcccatgttttttaccaagccgaaacggatatttggatggttctggttgtggaaaaaaacaaggaaaatgaattgacttggcgttgtggtgcactacaagggattcttaaagaggctcattctctctttgcaatgtttcatggaccaatccgaactttgcttcacaaacaacccagtgcagagcttgctcgtggtcacctccgcacatttcttacagattatttgagcgcctaaaggagaggggaacagtccaaatgcttacggtatcacgagaagtggcacttgacgttcagtcactcgccacagtacttggatcatgtcttggaaatgttacctgccaatcacttgtactatttgaagacctcttggtgtcaacgacactgcccccggatgatactttaaacctatatacatatgctgttctgaggttaactccgcgtgctttatattccaatgcaagttcttggtcctatttgcggaaaggaacttctgttagtgctggccaaacatcaagttcatcaaatggaacaactgcaggagaaaggtaccgtagtcgatctcgtgatacttctccaggtggacaaaatcagatgaatcgtaatttcaggcctctcctacgtgagaaattgtcaaagggaaaggatggctttgttgctgctgatttcacagctacagaagctcgttgtgctgtaccctcgactccaatactttggttccagcaggcagatgagtgcatgcacctatgcatttatcagcacaaaagtctcactatcttactgctggttcctgcttcctcagtgataaatggagaagagggcattactcatgtgaagaaggcgatgcttgaaaatgcatcacagaagattgtcactgttgagcagaaattgacacgaggatggggaggagaaaatgcgtatcatgttagtggatatcgttatttgcttgttgatccggagagaagagtatcaagagcctccccacctgggaaagtcaccaccctagcaaaggattctctacttgccctcaacatgctaagacaagaagtagatctagagaagtcaagatacaagagaggcgacccttgtcatgataaggatttcgaagtatgtatcagaacaaaaaacaatgcgtgggttattgctaaaatcagtcaaggaagggagctttacatggctctagagaagggtggtgaaacgcttctatatgcatccacagctgtagagaaattcagcaacaggtactgtgagggagcattctctacagattagaagcaccagagggagatcttagcttttccatacattacctattatgtacatcctgtttttttcccagctgtatcgttgccccctattgttgagagactcggaccactctttgcgaagggaataaggagttcgtatcagttgtacagctgctctgctgtcgtgtgctatctgcaaaagaatagcctagtctgggaataacgcagagcgggatagagtttgtttgttcacttatgcccttccttaacgcagagcattgtgcgtgttttcattttgctgtaacagccggcgatttacctgcagactgggaaagtaacttagcgtttaatttggtattctgcattttgatggtctcatatcatatggttcgagttgacgggttcgttctgcctccggagaggagag

SEQ ID NO: 32289 - DNA, 3403 bp, Zea Mays
gttaacaagtgcggaaaacttgaaacttggcttgaagacatgtgggcttgtatgaagcagttcaaagatgcagtctgtggtgtgatgaatgagccaggccctattgcaactaaactacttgctctaaagtttgtggaaacatggattttgtgttgcacacctcaagccaacagtgaccaagtacagccaactgagggtaccattttccagtttaaagttaacaagtgaatgggcaatatttttttgaaagagaatgactttcacattgacaagtacaccttacatacaggaaaaaactggagatttgatacttcacgatcatctcaatttcatcctagccttgatcctgctattttggaagctgatgcacatcgagctctcctcctcctcctggatattctgcgaacagcttatgcccatcgagggtccttcctagttggcaccatcaactctcttgcagcagttgtaaagatccgaccgatttactatgaccgcgtgttgccagttttgcttgattttgaccctggcttggagactgcaaagggggcacattcagcaagcctgcggtatgctgtaagagcagcttttttggggtttctacggagtccccaccaggcaatgattgagtctaaagacatattggtaaggcggctgcgtgttctcagccctggtgaggcaatggaacaaaatattaggcaggcagagaagatgtctagaaatatagagcgtgcttctcgtgctagcaaggatgagtctacatcatgggagatgccttatggagatataaatcggaagaaacctgctgttcgatcaagtgatacttttactacgtctgatggcatagctaagagagcaagatttgacatgtctgccacttcaaacctgccagttctgggattgtctgattattctgatatgcaggctgacaatgatgccagtgtgggtcattcatccgatccagctatattgaataatgaagtgtctcctgtcgagaagatgattgaaatgattggcgctttgcttgctgaaggagaaagaggagctgaatccttgggtattcttgtctcaacagtagaggcagatgtcatggccgacattgtgatagaaacaatgaaacatctaccggaagcttcatttcatttagcaacaaataacggtgtccagcaactgaattttaaatattcctctggtctcgtaacacaaaaccttccagccaattcagactccacactattcactgcacaatctacacccacagcagatggagtcagcatctcaccatctgatgcctttgttatgactagcgttcatgatgctaagcgtgatccaagaagggaccctcgtcgcctcgatccgcgtcggatagtttcatcttctgctgtaaattcgatacaggtgaagatggaaaccaatagtgtgcatcaaacagataatttgtcgaacacactctactccaattctcggaaggctgaaaactattcagactatcaaggagatttacacaaaaatgaaggtgaacagcagtcagcttctcaacctaatcaaacaattgccaaagacaagttggagcttctggatgttgtcactgaaccggagccaacatttgaagtcgaggcaccagtggatgtcaggattcattcttctgatgttgatgaagatatagtgaaacccatgtcttcagtggttaattcacttgacgaatccgatagcatggatttagaggttgacccctttttaccagctccaaaggcaccaacaccagacgacaccaatgatgacttgccaattattacatctcagttggaattaagtgaaaaagggaaaatctcaattaacaaactagccattggccggatacttgatgattacaagaaaaatagtttcaatgccagattttctttgcttgctcatttgatcgcagtgctgctgatgataacattatggatttgattcagaggcacattatctttcactcacatgatcaggaggggtatgaactggcaatgcatgtgttgtatcagctgcagagtatcagtgttgctaattcaccagaaagctctacctccacctctaaacattacgagaagttctttatatcacttgcgaggtccttgattgattcactgcctgcttcagacaaatcttttagcaaacttttatgcgatgcaccatatctacctgagtctttgtttagattactggaggatctttgcatgtcagaagacaacagccaacaattaaaggatggagatggggaccgtgttacccaaggcctgggaactgtatggagccttatcttgggtcggcctccgcttcgccatgtttgcttggatattgctctgaagtgtgctgcccactctcaagatgaagtcaggggaaaagcagttagattggttgcaaaaaggctctatgatctaacatatgcaacagaaaaaatagagcagtttgccatagagagccttgtgggagttgctaatgagcatactgtggacacagatattaattcgaaatctttgaaagaatcgacagctgagattgaggtaggtagtcagggaacttcagtaagtggctcccagatcccagatactgagttctctgaaaatgggccattcaagacatcatcggtttctacaaaacagtcagcagtatctgtatctgaggcaaagcggcgtacttctttgttctttgcactttgcaccaagagatctagtcttcttcaacatctgttcaatgcttatggaaggtccccaaaagttgtcaagcagtgtatccattggcatatgcccaaccttataagaaatctggggccctcgtgtcctgaattgctgaacattattcataatccacctgaaggcagtgaacatcttattaccttgacactgcaaacattgactgaagattcaaatccctcagctgacctagttgctgctgttaaacaattatataataccaagctgaaggatgcatctattctgattcccttactgccttcatttccaaaggaggaggtattgcctatatttcctaggctagttgatctcccgcttgagagattccaagacgtacttgctcggatattgcagggaactgctcatactggtccagcattgactcctgctgaagttctcattgcaattcatgatattaaccctgaaaaagataaagttgccctaaaaaaggtcacggatgcttgcacggcttgctttgagcaacgcacggtatttactcagcaggttttggagaagtcacttaatcaattggttgacagaataccaattcctcttctttttatgagaacagttattcaagcgcttgatgcttttcctgctttggttgattttgtcatgggaatactctccaggctcatcgataaacagggcactgaaaatagcacacaacaaca

SEQ ID NO: 32290 - DNA, 1217 bp, Zea Mays
cagtgagtgagttgaacttcaagacaatagttgatggcctaggtgctgttctctatcagtacccattcaatgtaccagcatactatgcattgatactgcgatcgctcaccgtactggaaggtttagcactctatgctgaccctgattttaaggtgcttgctgcatcatacccttactttgcgaaaaggctactgactgatcccaacccatatctcagagatgctttaattgagcttgtattcaaggatggaaaattcaggcaagtacctgctcatctgtatatattttatactcttcacagatcaaagcaccactcaggatagcgttgtttaatgttcacgtctctgcagatggaataggcttgaaaatcttcttgttcaagggcgccaagatagggagtttgcagccaaagatgcactgcagcctgttctaaagcttctccttggtcctggtggggaggaattgcgtgcgttagttgtgaaagaggcagttcgtgtgacagaagccatcgccattggaacactggtcgattcatacaatgcagctccatcatttttgaagccattaatttccagcggcaatctagctgaaccctttaagtttagtgagactgaacaagaacagatgatggagctccgagaccaggttttcagagtatggggtcttttgagatcctcaaataactttgatccgagccttttgcagccaatcgttcaggttctacaagaaccagaggcccgtgtcttgggttctcgtgtcgcaggtggtgtaacacagcgccttgcggcacgtctgctgcaacagcttctcaggacccctcctgctcctggatcttcttagcagatatatagatataggctcgtatgattgtatgaagcatgtaaattgacacgatatttttcacaggaaatgagaaggaagcacaacccagaattcgagtatatagctagtttcttggttctaagtggataaagacattgtgcatcgagctttgtccagcagaccgtgtatatagttgtgtaaaaaacattgttttgtgctgtagattacactgtttacggagtgaagattgaaatgataagacatggacgagtgagctgctaagatgtcacgcagcttagatccaccgctgttcaccctgtaaatcatgatacgcggaccaattatgcatttacgcgtatgtgtagccctaaaacttctacgtgtcaaaataaaag

SEQ ID NO: 32291 - DNA, 3749 bp, Zea Mays
agacctaaatcacctaatatatttcaatccggagagccaggcaatgtgacagctgttcattatgtcagtaatatttcctgtgttgttgtcaaccttcctcagaggttaagcctttttttgaatggcatgtgcaactgggatgctaggaaagcgttgcttgattttgattgggcttctcatgacaatacacactgtgatgaccaatccgtttggagatgcactgattgtcacgtgcttgattgcgaggaccataagatagcatcgatatcaaataaagaaaagtcatttgacctgcacgaaatcttcaagacactccctggtgttaggatggagaagaacatgcaggtagcaagaataacaccagacgaaagagcactggaactgggtatttggtccgtccctgatgatgtattgcataaagtactaattctactcaaacccagagatttggtaagagtggcagcaacttgtcatcatctaaggactcttgctgccactgttatgccttgcatgaagcttaagctcttcccccatcaagaggctgctgttgaatggatgttgaagcgagagcagaacgtgcatgtcctagcacatcctttgtacaaggatttctgcactgaggatggtttcccattctacataaatgttatctctgctgaaatatctaccggtgatgctccaacaataaatgatttctgtggaggtctgttttgtgatgaacctggcctagggaagacagtaaccacactatctctgattctgaaaacccacggaacaatggcgtaccctccacaaggggtagatgtgagttggtgcatgcataagcctgataaaaaatgcggttactatgaattaagtcccagcttttcttctaatagaaacagctcgtctgtgtcaaaaaagcttttgggagaggatgtgatagcagattgtccaagtccagatgattctgtctgcagtaccagatcttcaagaaagagaggtaggttactgagccctgatccaaccaaggtaatgttgcatgctgcgattgagaattccccatcatcatcaaacagcaaagtgcaaccaatgccagctatgcatatactgaagttcactaaaaactcgagacaagttaggaaaaaccccatggatgcatacagcgacgtttcagttggcaataaaaggaagattgacaccacctctgaggtaagtgagacctgggttcagtgtgatgcttgtagaaagtggcgaagggtatctgatggaacagttcttgattctaccacagtgtggttttgcactatgaaccctgatcctacacgacagaaatgcactgccccagaggaatcctgggattttaagagaaagataacctatttgccaggattttacaagaaaaattctttgcctggaaatgaggaaaacgtatcatttttcacaaacatattgaaagattatgttactatgatcaattcagaaaccaagaaggctttgttatggttagcaaaactttctcctacaaaacttcttgagatggagtttgttggtttgactcgcccagttctagatacacgtgcaactacaggcaagggtgcccatccatattacaagatattccaagcatttggccttgtgagaaagattgagaaaggtatgactcgctggtactatccctctatgcttgatgatttagcttttgattcagctgcacttggagctgctcttgaaaacccactggattcaactagattttatttatctacagccaccttgatagtggtgcctgctaacctaattgatcactggacaacacagatacaacgccatgtgtcctcggatacccttaatgtctttgtgtggggagaccacaagaagccatctgctcacaaccttgcttgggactatgacattgtcataaccacattcagcaggctaagtgcagaatggggtccacagaagagaagtccactaaagcagatccattggttcagggttatactggatgaagggcatacactaggttccagccttgccctgacaaacaagttacagatggctgtcgctttggttgcatcaaataggtggatattaactggtacacctacaccaaacacaccaactagtcaggttgctcatcttcacctcatgcttaagtttcttcatgatgaaacttatggtcagaattaccagtcatgggactctgggatccataggccttttgaggcgcaaatggaagaggggcgtgttcgtcttgtgcagctgcttcagagaacaatgatcagtgcaagaaaagcggatctgaaaactattcctccttgcataaagaagataaccttcctagacttcaatgaggggcatgcaaaaagttacaatgaactggtggttactatacgccgaaatatactgatggcggattggaatgacccttctcatgtagaatcccttcttaaccccaagcagtggaaatttcgtgctgctactttgaagaatgtccgtttgtcttgctgtgttgccgggcatatcaaagtagctgaggcaggtcaggatatacaggaaacaatggatgaattggtgcaacagggccttgatccttcttcagatgaatatcagttgataagatattctcttttaaacggtgccagttgtttcaggttgtggatatcattatgagatgcagtctcctgagactcgtgcaaggccagaaaatccaaacccaaagtggccagtgcctaaggatctaattgaattgcaaccttcatataagcaggatgattgggatcccgattggcaatcaacatctagcagcaaagttgcttacatgattgagaagctaagaagtctgcgagaagcacacatgaatcatgggaataacataaccaacagtgttggtcattctaatacactatcttatcaaccacaggcaatgctggacaaagttataattttttctcagtttctagagcatattcacgtgattgaacagcagctgactattgctggaataatatattcgggaatgtatagtccaatgcctctagctagtaagagaagtgcacttacgaagtttcaagaggacccaacgtgtatggctttagtcatggatgggactgctgcactggggcttgatttgagttttgtgactcgtgtttttctcatggaaccaatatgggataggagtatggaggaacaggttattagtcgggcacatcgaatgggggctacgcgtccaatacatgtagaaactttggctatgcgtggtaccattgaagagcaaatgcttaagcttttgcaggattctaacgcctgcagaaaaatagtggataaaagaacaggcagcactgacaatgaaggagggcggtcccatcggagcctccatgattttgctgaaagcagctatctggcgcaactcagctctgtgtagacaggatctaaagcaacaattcacattggttgttggtagcactaactggattcgtgatttcggttccttccttctgatcattcctttgcaatagtgatagtatttgcttcgaagccagttgttgttctcgattccaaaccagtgttgatcggggttcttttgtgtaaataactgcgttccttttgttaaacgcggtattcccagttgaagaagccttatactgggcaatatcaggattctaccgtagatttgtgcttttactaataaccttatgaactttgaacagtttaagttgaagctaacgtttatactccctctgttataaattacccttcgttgtcct

SEQ ID NO: 32292 - DNA, 2802 bp, Zea Mays
tttttcagcagctttgtccatgtcaataattacagcttggccaaaaaaaagaagcctgagggacattgctgcattgtacaactgcgaggcctcacttgagaaggtggagaagtttagaagtgctgaaggattgaaatcgattggctcaaaatgcttccaagctgccaacatatctgttatacttatagatgatggcatagcattcgacaaaatgctagacctggagtctcacaaggcatttgctcctgtagttggcagagttctgagaatagaaaggctagcagaaacaatcatcaatgctgagtcattcagtggatcaagctggacactggactcattcactgaaagctacatatctaagctgaattcagtttctaaccaaattgttgcattaaaaagcatagctgcatatagaagcggtttagagatcaatcccaatgttagcaagactgatgcagaggatggtcttcgtaaggagctaacaggtcctaggccatttcggattacaaacaagaacctgattgactacctatttacctgcagtcttggaattgctgtttcacttagcctgccagtgcaaattcacacaggttttggagataaggacctagacttgcgaaagtgcaacccactacatttgcgcgctgttcttgaggacgaaagatttgctaagtgccaaattgttcttttacatgcttcttatccattttctaaggaagcatcctatcttgcatctgtttactcccaggtttaccttgattttggcttggcgattccaaaacttagtgttcatggaatgacatcgtccctgaaagagcttctggagctagctcccataaagaaggtcatgttcagtacagatgggtatgcttttccagagacatattacctaggtgcaaaaagggcacgggatgttgtttaccgtgtcctatctgctgcatgtgaagatggtgaccttagcattcaggaagctatcgaagctattgaggacatctttagaagaaatgcattgaatttgtacaagttaaatgttgtcaatggatcaataaatcatgaaactgccatagttggtaaaagggtgtcattgtcttctgttgaggaagatgtgctctttgttcgaataatctggtgcgatgcttctggtcaacatagatgccgcgtcgtgccagctggacgattttatgagattacgaggaataagggtgttggtctgacttttgcagcaatgggaatgacctcattttgtgatggcccagcggatgggtcgaaccttactggtgtaggcgagatcagacttgtaccagatatgccaacactcgttaggctaccatggtcaaggcacgaggaaatggtgatggctgacatgcaaataaggcctggagaaggctgggaatactgtcctagaaataccttgaggaaagtcacaaaagttctgttagatgagttcaatgtgacaatgaaggcaggttttgaaaatgaatttttccttcgcagaaaattagtaagtaatggagttgagatgtggattccatatgataataccaattactgctcaacttcagcatttgatggtgcatcatccatattacaagaagtatattcttccctcaaagattcaggcattgttgttgaacagttgcatgctgaagctggaaaagggcagtttgagatagccttgaagtatatcttgtgcactgttgcggctgacaaactcatatatgctcgtgagactattaagtcgattgctcgaaagcatggactggtagcaacatttcttccaaagcctgatttggatgattttggatctggttctcacgtgcatctgagcttgtgggagaacgatcagaatgtttttatggggtcaagtaaagataactttcatggaatgtcaaaaactggagaacagttccttgctggagtgtatcatcaccttccgtcaatattggcatttaccgctcctcacccaaacagctacgaccggattcagccagatacttggagtggagcttatctatgctgggggaaagagaacagggaggctccattaagaaccgcatgcccacctggtgtgcctcttgatttagtcagcaacttcgagatcaaatccttcgatggttgcgcaaatccgcacttgggtcttgctgctatcgtagctgctggcatcgatgggctaagaagacaccttaagttacctgagccaattgaatcaaacccttctgatcactcttcaaaactgaaaaggctaccgcagaacctgcaggaatctgtagaatcgctttctgcagataaggttttgcatgagttaattggtgataaacttgtcacaactgctatagctatacggaaggctgagatcaatcactttgcgaagaatccgggtgcacttaaggatctcatcgaccgttactagggcaaaagaacggaatgagaagctacatcttcttggacgtggcaaggggtttcactgtatgaccaaccgagagactggaagaataaattttgttccaatggttaacttcggattctcatatcctgtgactgaacttttgtgactgaacttttgatacccagtgtttctcttatcaaataataaaggttatttaaatttttaaaatgagaaatgctaggtgtcttcaccatggtattaaggtatcaaagaaaatgggagaaataggagatagacgaatctctaggaccgttgaatgaagacgttaatataacagtatatacaaaggtacggagatacaggttgcttaagcatgatactaagtcttctacgtggtgattggtggttgattaaat

SEQ ID NO: 32293 - DNA, 2393 bp, Zea Mays
  misc_feature (2392)..(2393): n is a, c, g, or t
ccccgctgcgctccagcagaattctcgcgccgcaacgcgacgcaatgccccacccgcacggtcgcgccgcgcagcgcaggaacccccaccacgcggtcggcgtcggcgtcggcggcggtgctcccgcctccccgccgtcggcgtagctcccgcgcgcttcggccctgggcgccggtgtggtttctccatcacgctctctcgcgcttcctacctgcgtgcgccctgctgcccggtgatggccagccgtctcttcgtgctccgtcggcacacgaggtggtggcagcggcaggcgccacggcctcgctcgctttgcccgccgtctcacggtggggactcggcgtcttcccatgggacgctggagctgctcgcgcgtctgcgcagctcaccatcgtaagagtcagacaaaacccactgatcctcctccccctccccctcattactactattaagtggtcgatgcagattttgtgacctcatgcctagactttgctttcggtcgctcctgtgccgttggtctgtgataaaacggtaaaagcctccacggggcatagtgtgggcatcaagtgtttgctgaaatgccggaggggaaccttcgaacacagtttattgctttcagccacgtttctacgtttgtggtctatagtttatctgtctctgcgcacccataccgacgagcgcattctgatcctcagcggtgcaccagttcattattgaagcacgtctgcagttttttttttttgcacgttctgattctgttatagttatactttccacaaggttttcaaccgagatgctaggttcttcaggttgttgcagagttgtagcattcaagcctgccattgtatccatacgagtccatcagtcaatagcggaaatcaggctactgcagagcctcaacaacagaatccaggagtgcctgtaccggttgatggttctagtgaactaaaacccaagaggacaaagctgaaaggaaggagggcagtgacaaattttttgaaatccttgagatggaaaaagaaaaaggagtttcaaagaatgactgcagaggagaagattttgtacaaactgaagctagctcgaaagaaggaagagcggcttgttgtggcactgaagaaaattgaaccagaggatccatcagaacctacacatgatcccgaggtgcttacacctgaagagcacttctatttcctcaagatgggccaaaaatgtaaaaattatgtgcctgttggaagacgtggaatttaccagggagtgatcttgaacatgcacttgcattggaaaaagcatcaaactctccaggtaattgtgaagacatttacaccagaggaggtcaaggaaattgccatcgagttagccacactaagtggtgggattgtgcttgacattcaagatgggaacacaattattatgtacagagggaaaaactatgcacagccaccaccagagatcatgtctccaaaagtttccctctctagaaaaaaggcactggataaatccaaatatatggaaaagctcagagctcttaggcggtacattcccagacttgagcaggagcttgaagatcttcatgcacagatgaagttagctggagagcatcaaggacaaaatgcagggaaacatgttgcttcaatttcacataatacaaacagtatgccagtgagaaaagaaccttgtggttcaattcgcaacaaaacagtatctgatctcctatcagaaactgtagagggatccaagaggttagaggatgaaagttctgcgattgaagacgactcagcttcagagtctctgtcatttacagagtctgaggatctctctgacatttttgagacagaatcagaggagcaggaagaggacaacaaggatcgccccttatatctcgataggctggataagtttccctcaggaaaaaatgataatgaaccagatgattttgaggagcatctgcggaggatcgcttcactttcagataagactgattcaccttcaaaagaactgaaagtgtcagagctcgatgagattgataaaatctttctgagagcaagttcgttgttgaagaaaaggtgacgcaaaagttcagctgatgcaagaacgatctcactgccaagatcaggaacgatgaagtagtcctcgtcgtcgtcgtcaggcacctccatccgtgacttcttgaacaggcgcgccccgttcgccttgtagaacccggcgttactcactggctgcggcgaggcgaagaactccgccatggcagttttagctggcgaatgggcgtggaacaggtcgatgtcctcgaaccactccagctccttgagcccaagagacgagtctttctgcaacagcaaacacaaaacagatggaaaaggaaaactgagataagaataagaacgtgaaaagcttnn

SEQ ID NO: 32294 - DNA, 2094 bp, Zea Mays
caagtcccaaccaaaagacacacggatgccagctctctagctaccttgtgcccaaagtgccaaacggccccttaagtcttaaccacctgctttatcatctcccgtacgcgctctccctcggtctctccctccctccctccctctcgctcgtggccacgactgggcgactgcctccgccgcatttcgctaggcgccacacggcccttggccggcgacgagcacccacagaaaaagtgttgctcctacgactagttctttttatgtgtaaccttcaatgaaggattctcaggatattcagagcacgacagagttgcagtcaccagtgcaaggtactaatgaagtgcaaagtcagcaaccaaactcaatggccgctgatgctcctgctggaaattcgggttccttgtctgtagctagtaatgacaataagaaggtgtctcgcgaagatattgaacttgttcagaatttgatagagcgttgtctacagctctacatgaacaaaggagaagttgttagaactctttctactcgtgctagaatagaacctggcttcactactttagtatggcagaaacttgaagaagaaaactccgagttctttagggcttactatatacggttgaagttgaaaaggcagatcatcttgttcaatcatttattgcaacaccagtacaatttgatgaaatatccagcacctccgaatattccattggctccaatacaaaatggaattcatcatatgccagttagcaatttaccaatggggtatccagtacttcagcagcctatcatgcctgctcccggccagcctcacatggatccaatggcctgcggtctgtccagtggtcatgtggttaatggaatacctgcaccaggtggttatcatcccatgcgcatgaactccggaaatgacatggttttggacaatggagcgcctgaagcaccacatgctggtgctaccggtagtgctatgtcatctgagatggctgtgagtccctcgtcggcggcttcaagcaaccatgctccttttacgccgtcagatataccaggcatgaccatggatgtatcggccctagactcggcatttgggtgtgatgtggggaatcctgaatctctgcaattgggaccagatgggtcgtcaagagactctattagatccttagggcagctctggaatttcagcctctctgatctaacagcggatttgacgagtttgggagcagatctggacgtgctggagaactacactggcacccctttcctgccatcggattcggacattttgcttgattccccagaccaagatgatatagtcgagtattttgctgacgccatcaacgggtctccgtcagacgaagagaaaccgtagtttttccggggttgcatggcatgcattcaggttcatcatcaggcagggctgtcatctcatctcatgtagtgtaaagcagccaatctaactgtgtattcggctcgcgcgcggtgatccggtaatcgggcctctgccactaaaaagaattttgtagcggttaattgaaatcctaattctttggaataagtagctgggactggaatgtccagagagtagcggtcgttgttggcttagggattgctgctggtggatgcaaacctcacagctagctggtgactctgaaaccacaggaactccttttctttttctttttacttgtatctgtatttgctgctacataagtaaacagaagtggggtgtacctagttttctggttctcgagtgtcttgaaacagtgggcgcgggttttcagctgaaagatcatgatattgtgttgttggcaaagtgctgaggacacgcgatgcaaagtttcttagattagccatacacaggaggctgctggagttgatctcacatctcagggtgtgtttggttgaactggagaatagagcctacccatcgtcaatcattttagtggagcaagaacatcccaataatttatagagttcgcccctctttcgtacaaccgttctccactcaaccaaacacacccttactcaatccatctgtgctgctctctgagctcatctttcctagtcaaacttaaatatgattacaaccaaataacg

SEQ ID NO: 32295 - DNA, 543 bp, Zea Mays
gtatgcgtgtgatttttgcagaggagaaacacctgaggcagttgggtggagaagaataaagaaagctctcgcgcatcacacacctagcgctcgacggaatgattgagattgaatcgtcgtcgtttccgttatttggtttagtatggtgagctctttcgccatccttgttagtagcgtgtaaggtggatgcatatgcatagtgtgattaaattgattctttgattgtatgatgtgagctttaggtttaaattgcaagttacgtatgaatattatttggtaggcatgtaattaaaataatttgtgatgatacatggtatggagtgtgcttggacaggtatatgtgtatgctactacttttatctgatttcagttattatatgaccaggtgttggaaggtcttgtttatctgcatgaacaaggtgtcattcatagagatatcaagggcgcaaatatactgagtaccaaagagggaatgtaccatgaatcacatgaatttggtggtcatatgttcaacactctcctagagtgctccatggtgtcatc

SEQ ID NO: 32296 - DNA, 184 bp, Zea Mays
acagaatgaagcgcatggtggatgatgcgctgtgttcgtgagaggtctaggtcgtcgtctcccagtcgactttctggcgccaaggatattttagatcctactatatttatcttttattttgtaagtcttccgctatataataagtactctgattattgcgacatttatctctatacactctgtg

SEQ ID NO: 32297 - DNA, 1657 bp, Zea Mays
tgctgtccggtgctcctcgtcgggcgcttcgctgccgccttgcaattgcaacccacggcaaatgctgctcgacgatgagcgaggctagcaggagccacctcctcacctggatcgatggcggccgttcatctcggctaagatccaaatctcggcatcggcggcacccctcgactctccccacgcccctagccatcctaactgcgaccgtggatgaagatctcaaagaatcttggaggtgcagcgggatgacagcgtagggaggcccaatggtgtgatgtagcgagtcctaacggtgctcggatcggggcggatggcccccagtctcggcaggaggcttgtacaacatttgatcgatgagtcagtgggcctaaagaaaataaagcagcccaagatgatctccatcatgggaatccgtggctccggcaagaccgcacttgccacagaggtgcatgagaggcatcttagactatctccagcagcttacccatccccatacccatattcaaactctactctgcgaacagcgcaatctatagtacaaaacagtgcttttgggtaaactatgggtagactgctgcagacggtcttaggacagagaaattcaataactccggacacaatttggataaaatgatgatcaacatggtcaacttttcatctgacagctgcaacctaaaagaagacaaacgtcaaacgcgtgatatagaccacgcgctacacacagtatcaccaagcccaaaacataccaaaaaaagttgaaccaagtggttgagaattccccttttgctctcatggccatggagaacactgcgccatgcggtgacttcgggaagatcgtggccgatcttgagtctgagaacttggtggctaacgtctctgccgtgaatcaagcctcggcgttgattgctggagacatcatgaatcccgaccagtcgttgcgaggcccacttctgaaaggtctactaagggcgctccggcatgtgaagtcaccactggtatgcgccgctgctgtttgggccatctcaatgttctctggatcactggaagaggtcagtgatgccattgttgcactttcatgcttcttcaaggacctgcttgatcgacgtaagattgagaagctgatacttggaggagaagcggagaatcaatacaagctttctactgactattatggtgtcactgccggagatgcaacacagggaaagcaccagcagccatggctgatggagatggaggaactgctgtttgtgcgcatagggctcacacggcaagcaggtgggagctatgccattccttcgagttccaagagcagtgctagttcttcaaacgcgtatcttcctgagccattgggtaatacagacaatctgatcttcctcgtgcattctggagatgccctcttggcagatttcgtggaaatcatgctgtctaacctcaagaagaaggtcaaagagctggagtgatgctgatgagttcatttgatgtaataatttggaggtcaaataactagaaatggagtcgttgaaccttggccaatcgtacctcaatatgcataataatgctgtcttctgtgtgcttattacttctattattactatattatcactgatactttttctattcaacattttgccatctatttgtgtgacttgtgtggtct

SEQ ID NO: 32298 - DNA, 1325 bp, Zea Mays
ccgggcgattcgccccgctacggctgccttgctcctccaatccgcgatcggggtacgtgatccaagcgcgatctcgcgggtcggcgcggaattgggagaggaattcaaacggtgtcggaagcgtgcggttccccggaagctcccagaacgttcggggcctccctgctccggtccgttatccggctacacaagacgacctaggatttctcaaggggttggcgcggtggatttgttgggcgcgcgcgcgagcggttggaatgggggcgccgcgccacctccttgacgtagcgatgctctgcgccttgttcgtctccgccgcgtccttcaccgacccccctgatgcgttaggacttttggggttatatcacacattggagtcgccgtggcaactttctggttggacattccagggcggtgacccatgtggtgagggtggtgggagtaaacactggcgaggcgtcttttgcaagggaccatccattgttgcaataaatattagtgggctcggagttggtggatggcttggcccagacctgctcaagtttcagtcattgaaaaagctggacatgagcttcaataacattgctggcgaaatcccgtccactttgcccccaaatgttgaatacttaaatctggcagccaacaagtttgaaggaaatataccatcatcattaccctggttgcgctccctgaaatatttgaactttagctacaataaactctctggagtaattggtgatgtttttgttaatatggatagcttagaaacgatggatctgtcattcaatgctttcaatagtgacctaccaagatcgtttagctcattgactagtcttcgctatctttatctacagcataacgagttcacaggatctgtgattttgttagcaggccttccattgtcatccctcaatattgaaaataatcacttcagtggctatgttcctggaacatttcagtccattcctgagctgaggattgatggaaaccaatttcaacctggattcaaacttgcatcctcgtcatttactaggaagacccctgcagctccacctcaatctttgcctccacctccacttcaatctccatctccatctccatctccactagcagctcagcagaaaccaaagcgaaggccaaaatctccaaagccttcttttgggtattcttctctgcaaaataatagtcaccataggaagtcacactctcgagtgacagctgctgcaatggctagtgccacatgtacagtatttgtactcctcgttgttggattggttctgagaagtcgaaaaagctgttcatgcagccccaagagcacctctaac

SEQ ID NO: 32299 - DNA, 1587 bp, Zea Mays
aattgaagagaaatgaggaaaagagtctagagtctcccgtcatccgtgtccgtgcgatttttctacacaatcgtctcgcaaagattctcgttggtcagtttgagacttagccttggaggagaacagaacagccacgatgacttcgccgattcagctcgcggccgcgcctttgctgctgctagtagtagtggtcgcgggcacacggtcgagccgcatcttttcggtggccgactatggtgcggcgggcgatgggttccgctacgacacggcggcgattcaggccgctgtagacgcctgcgcggcggcgggcgggggccgcgttcttctcccggcgccgggcaactacctgacagcgaccgtccaactccgctcgcgggtggtgctggaggtgccccccggagcgcggcttctgggcgggaccaggcaggcggactacccgcccgagtcgcgccggtggtacgtcgttctggccgagaacaccacgggcgccggcatcacggggggaggcgagatcaacggccagggcggggcatttgttgtcaggcccagcgaggtgaagaacgtcatggtgagctggaatgccaccggcgattgcctgggcgatgagtgccggccgcggcttgttggcttcattgactctaaggatgttaggatccacgacatcacactcaaccagcccgcctactggtgacaccggagacgatgctataagcccaaagtcgacaactggaccagtttataacttgacggcaacaaactgttggatgcggactaaatcttgtgctatcaagtttggaagtgcaagcttcttcgacttcaaaagactggtttttgacaacattacaatagttgattcacatcgaggacttgggatgcagatccgggatggagggaatgtgaatgatgtggtgttttcaaacattaaaatgaggaccaggtactaccatcctttatggtggggaagagccgaaccaatctatatcacaacttgcccaaggcacccagattcaaaagaaggcgccatttcagacataagattcatcaacatctcatcggtatcagaaaatggagtttttctggctggatctaagcatgggctgctccgcaacctgaaattcaagaacatagaccttacctacaagcgttggacaaactacacgggagggctctatgattacaggcctgggtgccaggagatggtgaagcacaagactggtggcatgatgctggagcatatctccggtctggagattgacaacgtgaggatgagatgggcgagaggaagcctgaagggctggaatgttaaccctatcctcttccggccatcaaccatcgataatctgtctttccatgactggcagtcagtggatgttcagtagatttaagtggcacagttgtattacgtgtgtatctatcagaataaaggggtgattcttttgtgaaatattgaaatgtgttaataataagcaatcccaacagcatttaagcttctgcagggactggtgtggtttgctataataattttataaatctgaattcgtatgtttgattgttcaaatgtggtttgctttgtgattttataatgat

SEQ ID NO: 32300 - DNA, 152 bp, Zea Mays
ccccttccatctcctcctctctcaatccttgcagccacaccaccaaatcctagccccccccatctcctcctcccaaggtgccattccttgccgctcggatcgtcgtcgcgtggtgtgaatcttcaattgttttggtggagggaagaagggag

SEQ ID NO: 32301 - DNA, 3603 bp, Zea Mays
aaaaaaaaaacgcaagaaaacagggcaagaccacaaatccaaacccccgcatcgtcctcgtcgccgccacagagcccctcgtctcggccgcccttcgccgcctccgcggagcaggcatcgcaggagaccaaagatccggccagctctgatgtcaggagctagtggctcaaccgggcgcgcggccccgcggtacgccccggatgacctgacgttgctcaagccgtggcgcggcctcgtcgacggcaccaccggctacctgtactactggaacccggagacgaacgtcacgcagtacgagcggcctatgccccctgagaatcagctgcccccgcccccgcccccgttgcctcccccgcctccccggagccgcgaccggcgcgacaggtccagatcccgatcccgcacccctcccaggcgcgaccgccgcgaccgcgaccgtgacgacgagcatgcgtcctccaagacggcgtcttcccaccaccatccggctccgatagccgtcgccgactatccgtccaccgaggcataccgacgccgccatgagatcaccgtcacgggggataacgtgccggctccaataacttcatttgaggctggtggcttcccatcagaaattctgaaggagttgcatgcgagggaccaaggtcttcaagtatggcgagggaaatggatcgtgcacatgtgctccagttgcctgcttgtttctctttatttgcttcattgtgctaaatcagcgctggctatgtgtaccgactgcttatctccatctgtggcagatgcgatatctgctccgagggggagctaatgtcgtatgctgcctcgcgcgcccttggccaatctataagtgagatgagctgagggcaggtcttgctgatggagctgccaaggtgggtgaacgctcgaggttgctcgcttcctccctggggggccgcccatggagcggaggagggccacccactcgtggcacccacggtggctgatttgtcgctctgcgtccaattcttggaaaaggctccttgcatggatgatgggcttcttctggggcttgacccatggaggtctggcccaggctgtcaacgcccatccatatataggatcgggtggcagctgctggaaggggccttgtggatcaacggtctatgcctgaatacaacgtgctggatttgcaagcccaacacctatccaagcgcagtcatggccaattgctatgcaaaatcaagatgtagtagctattgcgaagactggatcaggcaaaactcttggttatctacttcctggatttatgcatatcaagcgcctgcagaacagcactaggaatggtccaacagtgctagttttggccccaacaagggaacttgcaacgcagattctggatgaagctatgaaatttggaagatcatctagaatttcttgcacgtgcctatacggtggtgctcctaaaggtcctcagttgagagatttagatagaggggttgatgttgttgttgcaacacctggaaggttaaatgacattttggagatgcgaagggtaagtcttaagcaagtgtcatatcttgttctggatgaggctgatcgcatgctggacatgggctttgagccacaaatacggaagatagtgaaagagatacctcaccgtcggcaaacccttatgtacaccgctacttggcccaaggaagtccggaggattgcagatgatcttcttgtccatcctttacaggtgacaattggaaatgttgatgaacttgttgctaatagtgctattactcagcatatagaagtcataacaccctcagaaaaacaacggcgcctggagcagatattacgatcccaggtttcaggttcaaagatattaatattttgtaccaccaagaggatgtgtgaccaacttgcaaggacactcaccaggcagtttggagcttcagccattcatggtgacaagtcccaaagtgaaagggagaaggtcctgaatcattttagatctgggcgctctcctattttagtggcaactgatgttgctgcgcgaggtttggacatcaaagatatcagggtagtgatcaactatgacttccccactggtgttgaagactatgttcacaggattggcaggacaggaagggctggtgccactggtgttgcatatacatttttctgtgatcaggactcaaaatatgctgctgacctaatcaaaattcttgaaggggcaaaccaacaggtgccccgtgatttagaggatatggcttctcgtggtggtgggcgaggtaagaagaggaaccgttgggcatcccgctctgaaaggggtggtccacgatctgaactggattcaaggtacagcggcagagatggattagcatcttccgggagatcagagagtggtcgtggcagtcatggaagggatgattatggtagccgtggcaggtatgactctggtgaaactgatgggcgatctcgtaggtctgctagaggtcgcagtagaagtcgtagcccaagccccaagaggtcacaccatcatgaagctaggcgtagccgaagcaggagcaggagccgaagctgtagaaactttcgtgctagccgcagcaagagtcacagccctgttgctagcagtaggcatgaaaaggctgctgttatttcaggatctactcaacctaacttggggtatgcagagcacaaaagccctccaagatctcactctggggatgaccatgtgaaccaccctgatcaaaaggatgaccacatgggagatgggaagatggaaagggttgatcttgatcgctcgcccagcccacaatatgataagtctgctccatatagtcctgcgtacaatggcaaagccagtgactcgatgagccctaatgttcagccaaaggcagatgccaaatatgtcaaaccttctgggaaacctgagcctgcatctccattgcgccacagcaaaggcagagatgatgatgaaggtatcatagacgacgatggagagattgctgagggtgagatgatgatgaaggtatcatagacgaggatggagagattgctgagcgtgatttgcgtgcaagtgcagctgtgtagagaatggtaataactgacggagaatggcctgcatcttctgtgacaacaagactgttatgcaaactgcagtcgttcccatctgcaagagtccagaatgtagaaatgcatttgtgccattaaatgtctcgtaggacctatgataatacatctgccatatatgaacaaaaactgttgatgtatgtcctgttgtttgttaaacttcaatgacttgtgttctggtgtcttactgctagttctgttaagtgatttatgataaaacatattgtcaggtctggaagtgataaatttatgatacttgtcaggtctggaagtagtttattatattggcagctccctggttggagattcctaggattgcaaaacctggcttgtttgagagcaagggcattggaggggattgatccccttactatcttatagcctgatttgttgtgttgttttttctcgaggtgtttggttgcctgcatctggtcggattctgctttccagatgtaaaagacagtctagagcctggcatcacggatagcgtacggtacgaatttg

SEQ ID NO: 32302 - DNA, 5144 bp, Zea Mays
gcgctttgatttttacagaagcgtctctctcctcagtcctctttccctctcgctcccggatctgaactcctccgaaaaaatcgtacccgagagaaaccctagcactggaggttttccgccgtggcgcctcgccggagacctccgctcgccgtggccgccgacgcgtcgccctcgtcgtccccccggaagtccggcgaagatgcgccgccgcccgccgggagcacgccggcggcggcggccggcgtcaccccgtgcgagcaagccaggaaggcactgtgtgtgcggtcgccgtttgatggggaggaggctgctggacgggacccctggctgccatcccgtgttgccagatgggcggcggtgggcgacgtgcggaagaatcataagaagagccagccccaacagcagcaaccggagccatcccctcccctggagcagaacccgagagtgcctgccgggcgcaagggcttttgggagaagttggagccctattttcgagagttcacagtggatgatttggaggaattattgacgaagcatcatttctgtgctagccagattgatccatgttttgtgatacctgttgtgggctctaaggagttaggggagaattcagatctatctcatgcttttgaagtagatgaaagtccagagttgagctcgaatttgggcaaccataacaaggatttggataggagcaaagatgatattcaggacagcttggattatattggaggcagtgtagagctgattactcaagatgagagtaataaagataattgtgatcaggacatgcaggaagtgattgtgcagcaagaggagcagccggttgaaatcgctttagatcaaagcaggactgatagcattgttttaccgggatccagagaagatcggtggcgttctctgagctggctcttaggagcaaggggacggtttgtgctcacttcagagcgtccaaacaagaagaggaagctcttaggtgcagatgctgggctagagcaacttgtacttctgccatcccctgaaggcgaggctggttcagtctgtgatgtttgttgtttgggagaaagtgacatggtgtctaacaggatgcttcattgcaagaactgtgagatatctgtgcaccagaagtgttatggtgtgcatgttgtgccagatcgtttctggttttgtgtttggtgtacccggaatattgggatgccacggaggttgacacggagcgatgcgtgcaggactgtgttaatgccctgtgtgctctgtccaaaggagaaaggtgctctgaaacctttcaaaagggaccctggtccatccatagatggaggaaaccaggaatttgtacatttattttgtagtctctggagaccagagttttatgttgaggacatggaatcaatggagcctgtcaccaatgtagtagatacccaagagaatcaatcaaaattggtgtgcagcctttgcaaggtcatgcatggtgcatgtgtccgctgcagccatggagcatgcaggacttcctttcatcctatatgtgcaagagagttcaagcttcagattgagatatgggggaagtttggtcatgataatgttgagatgcgagcattttgtgcaaagcattcttctgtcaaaagcatcagctccatacagaatgacaaaagtgtatctgaactggactccgctcaagttgagctgcatgatggaaagcctgttactgggaaggaacagcaagtgagatttacgcgcagtaacaaggacaaatttgtgaacagcacaattactactagttcttgtagcctaaacgaagcacatacaaatgaagtggctaccatttcacccgttcttggaaggactcaagaaacacaaagtgcagatatggctgctgatcaaccctcttcagatgggaatcttatgagcgattctggagatgtttccggaattcttagaaagctagtcgaccaaggaaagattagtcttgatgacattgaattggagccaagtcttcgttcagaatcagtggaagctgctttccagccggagacaactgcatactcccctggtttgaagttgaaaatgatcaagtggctgcagaactctgagtgtgcaccttctgttcaggttaagtcatttaaagagggttcattggcacaaggtacattgcctaggagtgaaagcaagaacttaaccactgctacatttcaatcaggacaggaggaagccatttcatcgattgaccatcattttctggaaaatgataatgctaataacggggatttggttcaaaatggctttcatagatgtcctgatcctgatgtaaatcagatttctggccgacatttgctcaacatggatggttactgttgctatattcatcctatcattgagaaaaggttgcaaggtttgtggagtaatagtttggagcaaactatacagaaaaatggttatcatgaagagttatcttggtctcttcatgacgaggactttggtggttcatcaacaaaacttgtgcaattaacaggcaaaactgccatggaagtctgtaaagcacaatcatcagatactctcaagctttcacctgatgacgaaatagaaggggaaatagtttatttacaatccaggctacttgatggtgttgtttctatgaagcagagatatgtccgtcttgtatcttgcagaagatttgatactcaaggttgtccagaatatttcttatgagttggattctttcaataaaagaaaatgggatcatatcattgtgaatcagtttcttcgtgatctgagagaagctaagaagcgcggaaactcagagaggagacacaaggaagctctagctattctggctgcaactgcaccttctgttacaccgacctcacgaaacacaacagtgaggaaagagacagaaaacaatgtgacacctgctaaacgagagaacatgccaagaagcattactggatcctcaagaattggccaactatcttcttcaccacaagcaaaggatttatcattttccaacagtgatgtctcagacgaaactaactttggcattttcaatctggcgaagttctccaagaaaagtgctcttccctgtgatatatgcatgcgatgtgatacaatattgaaccgtatttttgtttgctcgagctgtaaggctactgtacacttagattgctaccagagtctggtgtatcccactggcccatggaaatgtgaactttgccatgagatgccctcagattctgttacctctggtgaacaatcagaccaaaatggtccgaaagcttgtttggtgcaatgtggtttatgccatggaacatctggtgcttttagaaagactgtgaagggtcaatgggttcatgctttctgtgctgagtggctgttggagacaacattcagaagagggcaacataatccagtcgacggaatggagaggcttcatcacaaggataaagatacatgctctatatgccaccgctgtgttggtgcatgcttgaagtgctgtacattagattgtcaaattacttttcatccttcatgtgctagagatgctggtctttacatgaatacaaaaagattgggtaatatgttacaacataaagcatactgttgtagacacagtattgaacagagaaaggcctatagtcaacaatatggtcctgatgaaatcaagggcatgaaacaaatgagggttgaactggaactattacgtttcctttgtgagaggattgttaagagagaaaaagtgaagaaagatttggttggatgtgcacatgacatacttgctgcaaggaggataactgccgtctcttctttgtggacttcatgttatacttctggacctggagcaagttcagaatctgccactacttctgttaataacaaatcatatggtggaacaattcaaaggtctgatgatgtcacagtgagattggaagatgtcacagtggacagtacagttaccaaaaaacatactgtcaggttttctctgcataacagggacactgataggaacactgctgacagttccacatcaacaatatcatacaaacggaagttggatgatggggaatcacttgcattcaagagtcatcccggaacaccagctactgccttgttggagtcacgggatgcagaaaagccaatagataaaaagctcagggatatgtatcaaaaggagcttgtcatggttacttctcaccaagctttgttgaagaacaagacccctccagagagatatgtttacactcgccgcagctccatgtccaaaaggaagcaatgtagtcagcatgtagttcaaagacctggtggatgacagcaggcgaagtcgcttcttgggatatctggataataatattcttggaagctcgatgcagaaaaggacaaagtaaatacagcaagcggggctggccattaatcatgacagccgcaggggctggcgcgtggccgcactggaatcggaaatttggtgcaaattgggctcttcgaagatttgaccaattgagcccatgtcaccttggagtccaacatgcgctgaattcattcactaatttagtcaagggcaggttttgtgaaatacgcccaattgccagtatggcgtcttcacattatgtcgaagaaggaaatcgattgagttatgtgtggtgaaagaaagtgggtagacaaatattactgactggtgaaagctaccaataggccatccgcacattaatgaccatgtttaggagttgttgctatgtactaacagaactgcatgttttgttgtgtggctccattctgacttgtgaaatgaactctcggtaagtcatagggcatttcatgtttgtacaggcatgtaggtttagctttctggtatgtagctaaattcaaagcatcatcttgtagccttatgtggttaaccagatctttgatctattagttaatttagtaaaccaagagctgccttgtgttcgtatgggttgagtcgggcttttactgtattgatatctattattagcgtgaaggctgtttattgccgatgttgagcttcataagcattatctttttttaacaaaacacagtgcttgttttgtgaatacttgtaacctcgaatgtgtaataaatgtagcacgtctattcaactcaatggctcaagtgtcatatatggtcaaccttgcatgtcc

SEQ ID NO: 32303 - DNA, 2786 bp, Zea Mays
atggaggcggccgcctccagcctctcgacgctgctctccaccttgcgcgtggacgggccctggacgcctccgggaacctgggagtcggccatccctgagagtggcgccgctcgcgttacagacctcggaggacgcctgcagccgatctacgagctcgcatcggttactgatgatgctttgattcatctggccttgcatgcgctgtatggtgtcaaatcatcgttagatgagattgaggagctttcagtgctgttctcctcaaatccagctgacagaacctctaaccgtgttacaaatgtgtggttacgttcctcgagcaccatatctgtggggagtattctcaaatctttacgctctacaggtcttgtggtcttcttcctttgcaagtttgtgcacttttatcttgtccaaagtcgagaaatgaattgtgcaagtagagaagttcatgaacatgaacatcctggtgataaagacactgaacagcatcggccttacagtctagtaaaccaagcatttgcagctgcagttagtaaggtcctcgaaggctatttctgttccttgaatactttaccagcatcaattaggcttaggcgttcagttggccaatctggtataccttccaagacttcagatggaatgagttgtaattccactgcagaagtcactcttctggaagtttatctacacactgaagagttaagaaggcatgttaaatcccttggaaatatttgtttccctaagtttgcaggtgctacattgtgccatgatggtttggatactgaagcaagtgtggagtttgagaatttcccacggggcactgatttgctttcgtatttgtatgtctatattcgtgatgccgatccagttcactatggtcttctgaagtatctttttattcgttcctgtgagccatactttaacttcattaagtcatggatttaccgagcttctgttgatgacccttatgaggaatttctcattacacaaactgaaaataagggtgttcaaggagtctcttctgacataacagatgagttcacccttttcccgttaaagcaagaatactttatttctcagaagtcaaccatgaagcttctttcttcccaatccagttcagtttaccatggaataaattgggcagtccctattgatgagtgcgagaaagatgacagcctaagttgcaaacatgttcctgtgcactcacagaatgctgaacatactgcggtgcttgatggtttagaactggattatcagtatagtcagttttcgccatttgacaggtttatgaagagaaccagttgttcatctgaagacatgaattcagttgagttcttatatactgatcataaaaggtcagtagagaaagtatcacatggtaatgcagttaatgcattacattctgaatcagggcctactaaactatcaaacggcaaaaactatgagaagtttggtaatataaatcagccatggtataccagtattccttacaatctcagtctgaaccccatactgaagaatgcagcttgttactgcacggagagtgatgtgcaacagaaaagcaagaaccaatcacttgccagctttgattttgagtcagtcatggatccatgtgaagtatattgtgcaaggagcacatcctgccttgttgagtttgtaaatggagcaacaattatacagcccagtactcatccttgtgaacggcttgattgttctcccaagcttcttcaagctcagacaagaagtcaggcatcccttacttcctcaggagagatgtcaacaagagacagtcttcagaaaaatgtttatggtggggcattctgggagagatcgttactatataatgataaatcaaaagaaaaaccagctgtggactttagttcacagtttgatatgccccttgatatagttatcaacaagtgcatcatggaagaagttttgcttcagtataaatatgttagcagcttcacaatgaagttgcttgaggaaggttttgatctttgtgcacatctgctagccctgcggcggtaccatttcatggaaatagctgactgggcagattcctttattgctctaatttataataagaaatggtcatttgttaaatctgagcagaaaagatcggagattcaagggcttatggactttgctttgcagagatcttcatgtgattctgatccttataaggaaaggttatttatatacatcagggagccacctgttgattcttttgatgcatctgcatgtgatcttgatttgctggatgatatcttgttgggttataaagctgaatggccagtgaatattgttattacagaagacacacttaaaatatatgctgaaatattctgttatcttcttcaagtcaggtttgcagtgttttcactgactgaagtatggagatttctaaaggtatcttttctccattgatgttgcagccacaacatttcgttcatttagaggagttgacacagttcatcagtcgctccagccatagaggatctgacgtgttgaagaaattgaatgttgtaatgaaagtgaggcataaacttcatcactttctatcaacactacagcagtatctccactgccatttatctgatatttcgtggcgccgttttcaacattcccttaaaaatcaggtcagggatatactggatttggagtatgtgcatatgtgttatattactgatgcacttgacatttggttacgtgaggatatggagtatgaacatacttatagagtaataaatagatttatagatgacatgggaaacattagtacttag

SEQ ID NO: 32304 - DNA, 929 bp, Zea Mays
gcacggcacggcaccgcaccgggagtccatccgtccgtccggcacgcacgcacgccctttgaatgccccctcccgcctgcctgctgcctctgacccggccccgtatcgtatgattcattgattcgtatctcctctcctctcccggctcggaataacccgtctctctcgcccgccctgtccttgccggccggccccggccccggtctcttctcttcttcttctttttcttcccgctatatatactgcgcgcctcaccttcccctctttgcaatccgtatcatcatcttggcctcgtcaatccaccaccaccgtcgtcgctgagctcctcctccggcttcgcttcgctgtcttgcctcctcctcggtcgaagaagaaaacatgtgtccgggatccgtggagtcgtcgtcggcggcggcggcgggcaagagcgtgtgcgtgatggacgccgcggggccgctgggccacgcgctcgtggaccgcctcctccggcgcgggtacaccgtccacgccgccacgtacgcccgcgacggggaggagggcgcggctgccgccgcgctgctcggccacctgtcgtgcgccgccgacgcgtgcaggcaccggctgaagctgttccgcgccgacccgttcgactaccacgccatcgccgacgccgtgcggggctgcgccggcgtcttctgcatgttcaacacgcccgacgaccaggcccaatgcgatgagtcgacggtggagacggaggtgcgcgcggcgcacaacgtgctggaggcgtgcgcgcagacggacgccatggagcgggtcgtcttcacctcctccgtcaccgccgtcgtctggagcggcgccggcgccggcgtcggcgcccacagggaggaggtcgccgacgagaggagctggagcgacctcgccttctgcaggaagttcaagacgagcaagct

SEQ ID NO: 32305 - DNA, 4295 bp, Zea Mays
tgttaacctcacaaatcatagataggcaaaactgtcacgatttttttccagcccggcgtcaccgtacaccgatctctccccccccccccgccacccaccccccaccaccacgcccgacctcgtccgcggtgaaggtcaaggagacggcggaggaagcctgacaaccgtgtggatggggatctcgttcaagctgtcgaaggtcggggtccgcgtgcacccggccgcgcgctcggcgtccgcggcggtggcggaaaagccgggcgcgggtgggaaggagggttcgctgtctgagtcgacacgcgaggacaaaagaaaagatgtcaatggcatcaaaattttaccagcatgctccaaagaaattttgccagatcatgaggtttctttcacattgagcctctatgagagaggttatctcatttcaaagtcagcacccatggatcctagtcagacctcaattcaggacggcaaaacactgcatccctatgatagagcatcagaaaagttgttctctgctatcgaagctgggaggctacctggcgatatttttgatgagataccaagcaagtactataatggatcagttgtttgtgagatacatgactaccgaaagcatgtgtccaaccaagcgcctgcatcatctgctgagctaggatcaccaattgtgaataaagtacgactgcgaatgacctttgaaaatgttgtaaaggacattacccttctatctgatgattcctggagttacagggattttatggaagctgaggcttgtattttgagagctctacaaccggaactttgcttagaccccacacctaaactggatcgacttcatcaggatcctgttccgcataagttgagccttggtatagggaaaaagaggaggctgaggcaaaatcctgaagttgtcacatccagtcacatgtctcatggtaaaaaggtttgcattgataggttacctgaaagtgccaaagctgatgagatgggcatcactagcagtaatgcagctcagcaggttggtggtaacattaccatccaaaatatgtcagtctcaggtggttctcagacacttagaccaaataattcttcacaagatgctgccagaacgcttttgcctcaatctggtctacagcaaaccttgtgttattctgctgctggtaatgatcatatggcaggaccacctgccaatttttctggaaccagttcatgcatttcatctcatcagagcctgattggttacagtgactctgtggctgccaacagccttctatctgtgaagagggaaatgcaggatgcctcgcttcaagatcctaagagaataaagcgaactggtggtattgatgatgtacagcagcagcagataaggcctcaaccccttggtgggcaggagatgcaatggaagaaccatcaactgcatccacaattagatgttaaggggatgcagtatgcatcttcactgagtggtcagagatatccttcttcgatgatgaacaacatgcaagatccaggatcttccttatattttagtcatcagcaaaatttgagatacgatgctaagcaagagcagatggatggttctgataagtcaaaagacaccttgcagtctatggcacctgaaacttccatgctggatcagcagcaatcccaatctcaacatttaccacaacaatcagtggcaagaaataatgttccaaacatgggacagtggcaaaatactcggttcgcagctgagaaggacttcaaaaaagaagacataattcagagaagaaagttagcacctagctctcgtgcccctactgggcctgtgattcagtctccagtgtcctcgaaatctggagagttatcaggcagttcaatgggtggccagtttggttctgctgtgacatcagctgtaacaggggtacagaaagataaatttgctgcaaattccggtactgcagttggatttccttctgtagcttccagtcctagtgattccatgcaccgaatacaacagcctgctgttgcttcctcaaagaggaaaacaaattctgtccccaaaactcaaccgcctgtgagtgctgttgggtctccagccagtgtttcaaacatgcatgcgctgctgaatgcaagcagtccatcgattgggaccacacctatgggagaccaagcaatccttgataaatttgtgaaaattgataacatttcccatcggtaccagcttttcaataagaagaagtttgataaaatatctcaaaagaaaaccattatcaatcgaaaccaaaatgtagctggttgtctcaacagttgtttccattctgaggattatatagataccacaagacctctttgtaattctatgattagtggaactataaacacatgcaagggtagggtaataaactttgtgagcacaaaagacatgtaccaaggtcattcaaggccattcccggttgattttaacgaactgtctgatgaaactgtaagaatgcaatatggagatataaaagattttgatgatccaaattcatatggttgtgtattcatattaccgacaaagcactatgctgacttgtttgcggggcagcttatttcccttatgttgcaagatggacattctaaagctgacgatgaagttgtgcgtagcaccccttttgctaacatcagtacaccctttggacctttaccaaacaacgtagtgagtgatgtaaagcaagagggaggtgtaagccaacaacttaatgccgcagcccatgcaaatgtggcacctggaacacaaatgcaacagcttcctgtcaataggatgcttccatctgcaaatggcaaccagattctagcaatgcagcaaggttatatgcaaggggcagccatgcctccaaggagccagcatcttgaccaaaatttggttcagcagccgcagcaccaacagccacaacagcaaccactgcagcaaaatgctcaagcccaggtgcagcaaccatcatctcttccactgaaccagatgcaaagacctcaggttctgcctacgagcccattatctcagatgttggggcctggctcaaatctcccaatgggctcaagtcagataggtaagaataaggctcctcccacatctttgcagcttcaaatgctacaggcacaaccccaacaacctatgtctaggaaagtgatgatggggcttggctcagccatgaacatgggcaatatggttaacaatgttgttggtcttggtggcctcggaaatgttatgggaatgggcaacgtgcggccaatatcttcccccatggcatcgatgtcaggcttaggtaacaattccaatccaatgaacatgggaatggcatccaatcttgctgcagctggacttcggccaggcatgaaccctgctgctattgccaaggtgcgtatggggttggcacagcaaagggcagcaggcatgtaccctggaatggttggaatgcctggaagcagctcatcaatccttcctagttcagctggcttgtctatgatgggccagccgctaaacagaggcaaccttggccccctccagagggccatgatgtcgtctatgggccctccaaaaatgccaggaggtaactttcagctgaatgctcaacagcaaatacacctccagcatcagttgcagcagctccaacagaacccacagcagcagctccaacagctacagcaacagcaacaaatacaacaactgcagcagcagcagcagcagcagctccaacaacagcaactgcagcagcaacaacaaatgggatctccgttaggccctcctccaagcccgcagctgagctccggtcaacagcatagctaactccccgatggagcagctgcaaggcgccattaagggaggtcctggtagtagtaaccggagtccacttcttgcctatggaaggtgtaaacactgaccaagatcactctgttctcttgtttgctgtggtaaatgaggttaaattaggtgtgttataagttataggccatagaggacagctttaaggaccagctttatgcttggatttttatgctgtacattgtagttagtaggaatggtgtgttggagctcggtaatcagttctatgcaagcattattcaattggacagttttctactcttgtagcttcatgtttaaatttaaattaaattcatcaaaattgtggacttgttacgtaaccattgtggttaccgataagtatcttcatttgttcgccaacaattttgtaacgttgtcaaattcaattttggctgtgtatatgggtctgactggatatcggcattagcctatatccaggctgtgtgtttggttgcct

SEQ ID NO: 32306 - DNA, 1989 bp, Zea Mays
accattcactcacattcaccctgcccaccccgaacaataaacaacagcttcaccctcctcctccagtgcaggccgtcggcggctggcggcgtcatttctcctccttcctctggcctgccctgccctgccctgcccgcgcgataaccatctctcgcaactcctcttcgtactcctcgtctccaacgccggcaacaactacagagcttcagcttcccaagcgcgagacatgcgtgcggaaacacagacggcggagtagcgtagcgccacgatgggattgccaagctggtaggtagccaagaagacatgagatgggggcgtccttgggctccgccgccagcaaggaccggcagcaggagcacggcggcgaggctccgcgaccagatccctgcaagaagacgcggctctcgtcccctctctgcactatccacggtagccacggccacccgaggctgatcccagggctcccggatgaggtctctctgcagatcctcgcgaggatgccgcggatggggtacctcaaggccaagatggtctcgcggagctggaaggcggcggtgaccggcgcggagctgtaccggctgaggaaggagctcggcgtggccgaagagtggctgtacatactgacgaaggcggcggcaggagtggcggcgtgtacgggctgggcttgcgggacctggtgagcgtcggcgtaggtatcttcgacgtcatcagaggctggctcgggcagaaggaactgtcaggcggcgtaccaccgttctgtggctgcgccgtcggcgccgctggtggctgcctctatgtcctgggcggcttctccggagcttccgcgtcgaagcgcgtgtggaggtacgacccctccgccaactcatggcgggaggtgagcccgatgcgcgccgggcgcgccttctgcaaggcgagcctgctgaacgacaagctgtacgtcgtgggcggcgtcagcaagggcgagaacgggctaatagctccgctccggtccgccgaggtgttcgacccggcgactggggcctgggccgagctgccggacatgctgttctccaagtcgcaggccatgccgacggccatagctgacctgctcaagcccgtcgccgccggagtgacctcgtacggggggaagctgcacgttccccagagcttctattcctggccattcgccgtcgacgtcggcggagaggtgttcgatccggagacgaactcgtgggagcagatgcctgcgggcatgggcgagggctggcctgcgaggcaggctgggacgaggctgagcgccgttgtggaaggggatctgtatgccctggagccgacgacctcctcttccggcggttgtgagatcaagatgtacgacgcgcaggaggatgcttggaaggtcgctgtgagccaggttcgtgctggggcatttgacgagtcggacagcccttgcttgcttgctgcgtttcttggaaagctccatttggtcgtcaaggatatgggcagcaggatcagtgtcgtgcagatggactctctgatgaagccagtggattcgccagccctttcggctgccacgacatgccgaaccccggatgtctcctcggagcagacacatgtctggaaagccattgcatcgaagaacattgcagctgctgaacttgtcagctgtcaggttctcagcatctgagttcgtaaaatcgagcttctctggaacttctttgtgtaagtctgtgcagtagatgtgtttctgccacacatctgaacatcagagactatttctttctttcagcaatgcacaattgtttgtgcaatctgcgtaattgttatctgtgtatataacatcacatagaactgaataaggttgacgcagctttgtccaatcccaaaggcaacggcgccgactcaatcaatcaccggaccaatctgaaccctgttcattgttcagactgctgtgcattcctgttttcacacacctagtttggttttcttcatagaagtgtgtgcaatgatccc

SEQ ID NO: 32307 - DNA, 708 bp, Zea Mays
ctcgtcctatgctagccaacgtttaatctccagtgccgaactgccgataggtgggccgtctggatcagtgcccctcatcccactgccgcatactctcgttagtctggcgtgtggggccactccaacagatgcttcttccccgcggactcgtcgtgatgaaccggctgccacgttgagcgcctggaatccacggttcgctgttgcgatccggagtctcagggtataaatctcaggtggaaaggaagcgctcggaggtgtacgcgggatcctataggtgcgcgggtggttgaatcggcgacaattcctcgacgaagctgaggctctgtcgcaggtccgccctactgcgacgccgtggcaacctgcactcggtgagaatccctacacatctttgcttcgtcttcctatacgagttgcatctcgccggggaccgtttggtgcaccagagcgccaccaaccactcaccggccctgggtactcgccgccgtgccgcaacatcatgtggccagcgtcacccggacagcaattgtaggtagtattgaagcggtttagagggattagagagtgtataaatctataatagataaaaactctcaaaatacatctcaatccactctaattattttcattactagagtacccaaactagctctaaggaggccgcctttaagatcgccacttctcttcacaaatctcaggattagtggcagg

SEQ ID NO: 32308 - DNA, 6763 bp, Zea Mays
caacgctaaaaaaaccacccccagctccgttctcttccaagtggccagtgccgtctccggccaccgcccatggctatgccttcctccaccacggcggcgctctcccgcctcgtcgaccgcacccgggttccggaccccacactgcaacgccatgcggttggggccgtcttccgccacctcctctccctccccgcgcccctcccagcggccgcccacgacgccacctcagccctcctcgcttcgccccaccctgcagtcgccgcgcacgctgcggcctccatcgcccgtctcaccgccacccgccccgatctcctcccctcggatgtcgccctcccgctcctcatcgcgcccctcgcggcctcaccgtcccccctgctcgcctcctgcctcgtcaaggcagtctccgcgctcgcaacctgcgccctccgctccggctctcgcttcccggcccacgaccaccccttcatccaggcgctcgcgtcgggggctgacggcgctcgagcggagctgatgcggcaggcagccgggatggttgccgaccgggtggattgggtggtcaagtttctgaggccgttcgtgatgttctccgtggtgaggaagggggacgccgcatttgccagggatttgatcggtgcattggccgcagcagccgtggcagcagggaaggctagtgtcgcgatcccggttctgaagatgctccaagacagcatgctgcatttcggccgcggggacgatcaggaagtgcggctatggcttagttccgcagagtgtttggttgatgcttatgtcgtgctactgaggaagttagctcatggtcaaatgcctacatatgatgctcaagcaagtagtgcgacattgatggaaacactcctatcacaatattcatttcatcaaaaatttctgggaattgattcaacaatttttgggttatcaaaacatttattcttggtgcaaaaggatcttggattatgctatatacctgagatttctgttgtccttagctctctttcttactctctcactgggctagagtttgaacatgaacagctagctgccttgaaacttctgagctttttgattgattggaaatatgaaaatggtacattcccaaatattcataatcacaagcgctctgtaaatttccaaatccaactgctggaggggctaggaacttggttctcttatttttctaatcttaagctactgtgttttgtttcataccaataatcttaagcatggaatgggtatcatctttctcttcactaaatttgatgagagttttggtttgctttgcatgtaatagtccacctggagaaggtttgcagcatacaaatcatttgggctgaataaaatcataatttttagagggatatctatctatattttcaatgcaaaccctgaccatatcattcatatatttgtcacttcatgtcttcatgtatgtgtttcttgtgggctggacaaaaatcaatgaaactcaaattaaactgggtgcacactgatatgatagatatgctagacaaaaatctcttcagagattaaatagcatacttgttagcagtaaatttttagatttttatgacaaacgttgaaacataccatgaccattaacatttggaaccaaaaggcatatttgaatacagaggaagtgatgtttagttcaatccttttataggatgtgcagtcaatctaaccttacttttgttaccattgacatggcatacaatgcctgtcaattattatcattgtaaagtttcatatatgtgtatggctgcagtgcttgacagtaaagaacaaacacatcacgtcagtgtggagcttctctgtgttctggcagttatcaaccttaccatttcaccatccaaatctgtgaaagcagtggcatatcatgttctgtcaaggttcagcttgtttgttttagacttgccagcttctcattcatcagaggaacaagatatttcaacgagttaccacataagcaaacctgcacttcttcttcctaaacttttgcatcatctatggtccaagccatcttcatcatgcttcagttttatgaagtacatagctaccaaggcctcacctgattctggccagagtgacttggaagcaaattattggactcatcaaataaatgcctatctgacagcccttcacagagaaaagcatacattagatgtcaggtcttcaaaaacgacttcagtagccatatcatctctgataagctctgtagcatctgttttggtaatgcatccaaaacttggtacttctgcagcagaatctttggccatgcttggcacatcggacccaagattgggtatgccactttttgtagttatcctcttctacagcaagattctatgcagcagcggtaaattttcagcggaaatctcgctcagtttgctagagtcattgccatcacttgctatacatggttttgttcttccactagctctgcaatggatatcgccaatgcttaaaagggactcaaattcggttttgtatgctatggctgttcgattactctgcaagatatgggctgtaaccgactgggcatttccaaacttacaagtggttctggatcctgagaatttttccaatttcatctctgacagagagatctctgcaagtattgccacatcaatacgcgatgtttgcaagcaaaatccagatagaggcgttgatataatattatctgtctctttttgtattgagagtcgtgattctgtggttcaagctcttggcctcgagagcctctcgtacctttgtgaagcagatgtggtcgatttctacacggcgtggaaagttatatcaaagcaggtgcttgattattacgttgagcctgctgttgctcacagtttgtgtattctgttgaggtgcggagcgatggatgctgaggcatattctgtaatatctggtaaccttgtaagaacattgtggagaattggaacatccaagaaaaataatcccgatccactctgggataaagcaagaggaactgcttttcactccttgtccaactacaaggtatcacttattcaagatgctattcctgatttctggaaactaaactatgagttctttacgaacgaacataatctggcagttctcaaggccatggagcaccttcaagatgagatcatcagatatgagcacatatgcttagtgtcactcttaactgatgaaccctgttcacatagaaatcgtcgtcgagtgactactgacaaaagaactgcagtgcataaatttgagaagctactggaggtttttcctcgggcggtatttaaagggatgttatctcatcatcagttgcctggtgctgctcttttaactctcaattttactccaaaggacatacttaatgaagggaaacctaaggatttgcctagagttcattccgcttttgagcaagcttttgtggaaattgctgaatctatgtatgtgtcaagaaacatagtggtagctcttcttgccttgcagtcatggaagtcatttgtttccaactggatgcaagcagttgtggcattgcttgacactaaagactcgtcaaagttgaacaaagcaatgaaagctgctaatgatatatttaaggagctctgcatttcaattaagaatggaattgacccagttttaaggaaaaccgggcctgaatcctacacagagcgcacaaacaacccagacaacgatagccccacacaaagcccatctagatttatcgttgccgagctcaacacaagggacgagcagctccgactccgtgagacgagccgcacatggccaaaggaactcgacgacacctacatcgaaacaccgattctgtgcgaccaagttccggtgtctactcctcaagttgttgttaacatagctcttgttattggggcactggccttgattgttccgccaactgctcatttggtagtatcttcggtatcagattttcttttaaaatggttgcttcaatacgagcatgagcacaagcaatggtcagcagctctctctcttggattaatattcaattgttttcatcctacggacaaaaagagcagacttcaggttattaatgggtttcttgaggttatctcaaaaactgaaagctgtcttgtaaaaggagcttgtggactggcattaggctatgtttgccacggtcttttgacaagagcacataatgctgttgattcagaagtagaggctattacacaactcaatgagcgtgcatcagttgaggatattcttcatgctttggttaccttgttaattcaactatgtccatcctcatgctattctctgaagaagcttagtatatacggaatatcctccatgggagggatggaagaaaatattcatagcttcagtgatgatccttgggctgtcgctggacttgtcattggtctgggaaactctgttgttgctctgtatagacttggagcttatgaagcagttactgaagtcaaggatgtattgatatcatggataccaaatgttgattcgaactctgcattatttgatgaaatagattcagtatcactatgtatgggttcatgtcttgctcttccatctgttgtggctttttgccaaagagtggagctgttgaatgacgacttggatgcattgttcaatcgctacacttctttagcttctgagctcctgaacctcaataaatctgggattatctttcagaatttgttaatggcaatctgtattggtgctggatcttttctctcttctatattgaatgatggcgtgcatgctatggaatttaatggtgttaaaggctttctggacactctcagacatatatatacccacccttttcctccccttgttcatttgggaggcatgtttggtgtggtcaacgcttttggtgcaggtgcaggagatcttactggggtgttttcaaagcctatgacttctcaaatcaaacatgaggtttccttcatacatcttaacacttaatgttctgtaaaattgttagaataatctatttagttgtgtgcacaggagtcatcttttgtgagtggttcattactgacaagtcctgttggtgagactctgtcaacatcaatgattcaggaaatatttcttcttgctaaggatgctaaggataagcacatacaagattatgctgcatgggctatttcatttctcagaagcaggtggtcgaagaatcagaatcagattctttatgaggacaatggttctaatagaagtcctgatgatcatgatcaagcttcaagtttttctgaacaaagcttagtttggaacttaagtctctggttgagtgatctaaaatttgaaaagtctggtgatgtggtgccaataagtacagttggaacagttttaaaatgcctttccaaagctccccgattgccaactacagactggggagctattgtacggaggtgcattaaagctgaggcgcagatttctcataagttaaccaatcaggaagatcctaagatactaaaggaggcatgcttatatttgactctagctcatgctgctcacataagtccccttctgcagtttttggatgatctgactgacatactcagattccagagattagatataaatgttcagtctattttgctcaaacatttgttacacctaatgaagctattctctgattcaagattggataaattgcatgaggattttaccgaatacttgtattcccccacttcttcatacttgaattactcatctgaacagaaaagcatgctaagaatgtcgttctgggaaggcatttatacgtgcctggtggatgtttctgaagaatctggtgttttttcattcattgaaaaatgcattcagtgcttgttgcctcttttgacgctccatagtgatggtcaacctgaattcatgaaagagtggtctgttgctatcttatgtcttacaaacgcccagaaaaaatggctggatgatattttgcagattcgcagtactgccttagtcaatgaaggacatgttgatgttgcaaaaaagattatcctcagagcaagattgtgtgcaactggttgtggttcaacacatgagctgggaaatataaagacagcaatattgtgtacaaaagctgatggtgtttggtggagtgtccttgttgagatcacttcagccttaaactcagccgaaaacatcatcaaaagacagtggcttctggatgcattagacattggctgtgttacagctcacccctcaacggtgctgtgttttgttggcttgctttgtggtagctgctgcatctatatgccgcttcttcttgttaattcgataaatgtactgagcgacttgccggtcaccctgcctgcctttctctccaccatcgtttctgatgatttcaggaactctgtggcagacaggctatggctgttgactactgacatctatacttgggctgaacaattagctcacggacacgatcaacctggacatgatcgtattcatagaagtgaaactgagattgcgacttttttggccaatattctgctctctacatgcattacagtcgaggactacctgtctgttgataagcggctaaagcttgcaaatcttgaagcactctaatcaaagggagatgtgtttcttttctattttatgtatgtatttatgtacggtatcagtcatgttttaatagttgatgtccctgctgatgatccagcaatgtttttttcatgtacataattaatttaactaactcatcttatgcactgaaaacaatctattgttcaaagatagatagacctatgaaataatattgttgtgtaca

SEQ ID NO: 32309 - DNA, 212 bp, Zea Mays
gtgaaaacgccctccacgacagtttacggatccgcgacggaagaatacatcagcgagcgattaatttcggacaggtacctcccacgtgcagcacttgcacacgatagtacccccaggactccatgaaccacccagaccgtgagtcgctggtgaaggagcgacggtgacttgagtcccctgcggcggcggaatatgcgacagtggtagcgctg

SEQ ID NO: 32310 - DNA, 1791 bp, Zea Mays
cgcaactcttcgcttacgaatctcaatcttcatttatgccacccctttttcttctcctccattattccattctttctgcccatgtagcctcaagcatccatccccatctgcgaccatggctggcggctccaaagccatgtcaccaccattgactatcccttcttattttccgtgcgtgcatctgtcatgcatgtgtcccttcttcttcatcggcagtttccctcatctcttacactgactttgctacggatacaccatcgagatattatgaagagatcgacaacctattccagcctaatctggtgggggaggtgtcttcaggccgactccctatgtcgtcgcgcaccgccgcatcacaggaacgcacggtgctagtttcgagtgtagcgcggcaatatggaggcaaagagcgcggccgcggaggtgctcaggaagaccgacgctggcggagacaatgagaggtataggcatggggagctggggcgcgaggctgtggaggaggaggaggtgaaaccgcgaagggtggcggatgcgccgctgccggcggagaggaagaggaagcgcgcggcggacccggaggacgacggcagcgtgagcgacagcggcagcggcagcgaagggcctccgcagcagcagcagcaggtgaagccgtgtctttccccggtgccgcctctccaacggctcctgagtgcgtgccgcgccctgctcactggctcctcctccccgccgacgccttccgctgtcgccttgatccgtggcattatggacaagattgggccagacgacgtcgggctcagggacgagatccgcttcttcaacaagatgaacgccgctggtcttcaaaaccctcctatcgtcacatgcaaacctatttacgagggcgccaactttacgatcgcggtgttcttcttgccactgggagcggtcatgcctctccacgaccacccgggcatgacggtcttcacgaaggtgctcatcgggtcagcgcgcctggaggcctacgactgggtccgtccccgtgtcttggccggctgctgctcgggctcccgtcgccggacgctcgcgaagaaggtgcgggacgaccacggcgtcaccgcagcggcgtccgcctgggtgctgttccccaacagcggcgggaacatgcaccgcttcgcggccgcggaggacgcccactgcgcgttcctcgacgtcctcacgccgccctacgcgcccacggaccgaaggcgctgcaccttttaccaggacctcccctacgaacaccatcgtcctcgtccctgtacctgtaggtcgacagccacaggcggtgccatctgtgacgacgacgtgcttgttgcggaggagcagacgtgtcggctggcatggttggaggaggtcccgcagcctaggaacctgagggttgtctgcttgccgttccgaggcccaacgatcttctagcctcatcaacagcccatccggcaggcagaccctgcttactatctctagctatgagggaggcatagttgatcaaaaaaaaatattgtctttttccttttggagaataggatcccgtgctgataaatgatgatgtttacagtatgtagtgttaagctactctactgcgtcactgagacaaaacgtattcagctcttcacaggtggacgacaaagccactggcttctgtacttctgtttctgcgatgaaccagatcaccgccatagtcaatataataggctctaagtctgcattctcccctttcacatatctgcagccatagtcaattttccctgagttgtacacctgactattctcttg

SEQ ID NO: 32311 - DNA, 3354 bp, Zea Mays
tgcaattaacggaccttctacgtgggccactcttcctcacatcgcctccctcgacgatggccgccgccaccgccgccgccgccacggcgtcggcttcgtgtcttctccggaggtctatatcctctgcattcctcgcgaagcgcgcggtccctagcattccgcgtacaactctctgctattcctcctccgcatccgccagactcaaaccaacgccgtccctgtctccgcctgtcacgtccgccaacgatggaggcggcgggatgaggtgggagtcagcgcgcaagaagagggtggtgctccgcatcggctacgtcggcactgattaccgagggcttcaaaagcagcaagagcttggcgtggattcgagtaagctctgaataattaacttgattgggctttatgcttaattttgtgtgctcagtgtagcttaatttactgcaccgttgctgcctggtagtactagatgactcttttcgtgctagttgcattgctttgccgctagtggttctgtgcattggatctctaatgcttggtcacttgtcgaatgatttaaactttcaccgcaatgttttgtaatcctatataatgattgtgaaaggtcacacactgacacacatgacacagatgacatttctataatataggtactgaatcatgtatgctctatgtactatagtttctcctggttgttttgttaattactctttccagtccatttcataaggcatatgtgagttttgaaaaaaaagtctactatataaggcacatgtgtcatctgaagtcattaagcgtatgaatagggttgggcaaaatattcaaacaaagatcacacttgtgttggatgaactaataagtgatgaacttcgtttgtttggtgttggattgtcatggtatgtgaaattgtgagtattattacacttttctagtgtttaattggtctagaattaactagtaattgattatattgttttatacatgtgtatatttttttttgttgtgactcgcgagctaaacgaaccagcttgagctcgcaaacgagccgagctgagctggttctctagttcggttctttaacaagccaagtcgagccagctcgttatcttaacgagccagctcgagctcgaccgagccgagctggctcgatatccaaccctacacatgaaaccacgcattaagcacaacatggctaatttggcatggcacccaccacggagtaaatcatcctacatgagagtaatgttccgtgtgtgcatcttggtatctgaattttaggtttcatgccttaggccagccttaggtcactctcaatgggagttttgttagagctttatgggcattaaataagctgacatgacatagcataaagaggtgataaaagtttcgtgggatgaaatgagtttcatgggaatacaacttagttgcactgttttcaaatttcaatacccggaagtcttggaaacagggacatgaccccccccaactaactgtgactggccttagtagccagtttcacagcacaattacaaaagactgccacatcagcttttgtgttggtaactgagtcagcgggtttcatcctgctgaaactctatgaaactttcgcttcacaattaacctgccaaatcatcaaatttgcacacgtgtcgtagtattagatgcaaataaaactcacatgaaactcccactgagactggccttagaaatcatactggagggagtatcaacaattcagaatgatgcattggcattataagatatagattaatttctctgagctcattctgcagccattgagtcagtcctggaatctgccatcttcaagtccgggggtattctcgagagtaattatggaaaactgcaaaagattgggtgggagaggagtagccgaactgataaagggaatggactaattgcaggtacactcattggctacaatgatttcccttaagatggaaatccctgatagagcatgggaggatgatcctgatggtattgctcttgccagcttcattaactcaaatttgccggacaatgtgagggtttttagtatattgcctgcacaaaggtaaatggggcggcttaatgtacaggagggatagagataagaggattcatttgattatacttaatttctaccatgacatggtgtgcattgaactataggagttttgatgtaaggagggagtgcttatatcgtgagtacttctatcttcttcctgctgaaattattggaattaaagatgactatagctctgaagaaatgcaagagcacttgtcagaattcaacaaaatactgaaaggttttgagggaaaccatccattccataattacactgcacgtgccaagtataggaaggttctcgcgggaagacacagaagggccaaaggagcaagctcggcgttgaagtccatgtcctctgacactggcatggcagaaagctcttctgaagaaagcacttctccagatcacgatgaggacttgaatatttcatcaatctttgactctggtataccagaagacactcgtgtgaatggtattctgaagctttctgaggatcggctgcagattcaagctaggtggctgcatgagcctgacgaaagcgatagattaaacgcttcacatttcagagatatcattacctgttcctgtggagacttgcaaacttcatcagggattcagttcgttgagttgaccatatgcggggtatctttcatgctacatcagatccggaaaatggttggaaccgccgtgacggtgaagcgtggactactaccaagagacatcatagagctgtccctcgcgaagttctccagaatcgttctaccaatagccccttcagaggtcctggtcctcaaggacaacagtttctgcacgaagagcaagggagggaggatcgttcgccccgggatccagtccatgaacaagtcggaagcaaccaggaagggggtcgaggagttctacagggcagcgctcctgccagaagtagcgaagttcctggacccctctctgccgccgtggaaggagtggctggagaacctggacaggttctcgggcataccgggttcgcagctggacgaagtcagggaggcgtatcgagcgtggagggatgattacgaccgagcgaagatggctagaaactaggagtgctggcagtgtcgcaaggtggatgaactacctagcagtgaacaatgatgatttatatatactagttcgcttgatgtttatatattgagattcatacatatgcagcccgtcacgcagtgcaagcagcgcgcgggcactgctgttgttgttgggttgatactagctcaggagcaagctagtgttctgtactcacgtcacgtggaggcatt

SEQ ID NO: 32312 - DNA, 1542 bp, Zea Mays
cctcagttcctcaaccagcggccgaccgtcgaccgagaagcccgagcagcggtccgatcaggtgagcagcggcgcggctgctgcctgcccgcgcctgcctccgcggctccgccggccgtcgaccgagcagccgagcagaggcgcggcggctgcctgcccgcgctcgcctccgcggctccgctggccgtcgttcgccgacccgaacgccgagtcgcgcgagcgtgccggcgtgccccgcctctcgtcggctcgcgactgcgccagcgcggtcgcgccgccccaccccccggtgaccggcgtccggatccatccgtctggcaacccaaccggccaagggccaaccccgtccccggaccccgactccccgagggccaaccggccaaggcacaaccgctgaaccgcacaatgcatatttagtcgcctactcgcctaggcctattatttccctctcaaactcaaattcttcctggaatccaccaaagccctgcctcccctctactgattctgaaagtggagttccatctgcgcgtcggttgatttattctatttgctgagttggactacattacctccatgtcgagactgcgagctctgtggcaggcttcctttaacgccacaaagagagctcttgtatggagttcagatgatctaattccgccaagtgaaagatgtatcttcaatttcaactcaaaagatgagctgaaaaggtggcatttgtactcagattcagagtatggagagtcaacatggaggatcaggcgctatggattctgtgggatgcgatcaaagaagtttgatgggttcattgaccttgatgcatatgatacaatagcaatgaagatcaaaggggatggaagatgctacatatctacaatatacacggagaattgggtgaattcacccgggcaacaagaagacaactcgtggcaggcttttgtgtacatacctcctcaagacagatgggaagtcttgaagatccctcttgatcgctatttacccacatggagaggaaatgtgatccaggcaaagttggaaatgaaccctgctcggatcgtggggatgtctctctctgtaaacgcagaaggcggtgttcctggcgccaagactgggcctggtgattttaggcttgatgttgcttggatcaaagcgttgagagctttgtgaactccacaagtcatagttttatttcacatcggccctttccttctttatcaccctgccccagtggcgccgctgaactcatcacccgaccacaaccacaggagtaaccatagcacagattgccaactcctttatgcacttaataatggattttgttttgcttctgaggtttatgaataagtggtagaaaaatggagcatttagttaaggtgccccctttggacagatgttgctttttctctctctctagtatctgatcggccgataaaacgagtgcattccacccggacgataatgcgagagtaggattcagtttaattctttgactgttaagagtactactgtttgatcgtttgaattatacacgttcatttgagtaat

SEQ ID NO: 32313 - DNA, 2688 bp, Zea Mays
cgtccaaaccctcccgttctctcgtcggtcttgctcgcaattgcctcctcggtggcctcgcgtaaagcacggcggcgcgaagacggctgcggaattcaggtgctttccctgctttcaacgccggctggtttcgtctgacccgggaacattgcttggtaagcgcacccagctccaacacacctcgccgcccaagattgacctgcttgccaccacatctagcgcgcttaccttggccacacgcccaatggaacgaaccatttcatcgcgttggcgttgctttggagtgacgtcaggtgtgtgaagctgcccaactgctttcttcgcgaggtacttgcacgggacaattgacaaagcctgtatggtccaaggaactgaagttgcagacttcctccgaaggaatagtttttcttcctttcaccggactacaattcggtgccattcgtcaggaattgagggtcaactgactactctgctcgcttctttccccaagctcagggttcctccacaactgtccagtgttcatcgcaagctccttgcaggtttacgatggatctaggaaactccttgcaggttcacggtggatctaggtgaaggtgccgttagtcgagtgtgtggctctacggatcctgatcagtctagcgcagctttccctctgaccatttcgaggggactcctttctctggtttagctccattcaatagagatgctgtaatttctataataaagtggtccgagtgaatcatcctgtgcccttgcacaagcctcagtcactccataaatggctcggaccactgaagatgatatagaagatgtgccgtgctcagatccaggttcaccgtttctggctgaatatcatatcgcagttcctgctcttcatgatggaccaacgcaaggtgcagctcgtcatgagcgacggcttcttgatttcctggaagccactccctcggtgcagtggctaaagaagatcaacctttgctccccgttgataaaactccggcttccatccactggcgcccatggcagccttcatgctcagttcatcagaacgatccactggagttcagttttcactgtatgcaagaaatggctcaagcatcctatgaacatagctctcctaatatggctgctctgtgttggtgcctctggtggcatgctagtcttactaatgttgggactgctgaacgacgcattcccttccaagcccttaaggaaccagtggatagagatcgacaatcaaatacttaacgccctcttcaccctcatgagcttatacgagcacccaaatttcatccaccacactgttctcctctgccggtggctgccagaggacgctgctaagctcaggaaagtttactgcaagaatgagatgccccgtcgaaatgagcgagcacacatatcctttgtggttgccctcctccacatcacttgcttatgccagtatgctgattgtgggctgtactggggctaccccagcacatcacgctctgattttgccgacaacttcttcttcatcctaggcatagctgcaccagtctttgctgggctatacgcagtgtacagtcctcttggcagaggcaacgatgctctgtctgatgaagaaaccaatgaatcaggcacggttcgggtcgtcgagtcgcctgaaacaggaactgtggtgagcaatcccgcatgggctggcgggctgtttgactgcagcgaggaccccactgcatgctacctctctttcctctgcacgttctgcgtgtttgggtggaacatggagcggcttggattcggcaacatgtatgtgcacacggtcatcttcctgcttctgtgtgttgcgccgttctgggtgttcaatgtcacggcaatgaacatccacaactacgtcctcggtgatttcatcggcgctgcagggatcgtgctgtgtttctttggtctgctgtacggtggtttctggaggatccagatgaggaagacatttgggctgcccagaagcaggtggtgcttcggatcggcgtcactaacagactacacgcagtggctattctgctggccttgcgtgcttgcacaggaggtgcgcacggggaatctatacgacgcgaagaacggcagcttctatgagaaagttatggacggcgatggtgtggagactgatgcgggatcagtggatacggccgaattgccggtctcttgtggagtagaagaggcgaacggtatcgatgtcaaactcacggtggatggtgaaatgatcccacccacccaaccagtaatagaatgtggggagagggaagggatcgattcagaagtcgtggcaaatgaaggacccgcaactgaaggatggtttgagttatggtatttagctgttcagttgcttagtgatttagcttgttttatattaaaaggacgatggaacgaataggcgataatgccagagatatctaaactgatgttttagaggtgcaggctaacaggaaaaaaatttcatacactttattacaccgattgatttcaacagcaggcttgagcctcttatagagcaattgtgcaagtcggctaatgtaatcagtaactttatattattggttggtgacagttgaaaaggatattcttatcttctctagtcctgtagtggcctttggctgttttccagtgctccttttagagtgtgaagtgctgtccgattttgtgttttcaccttatcattaa

SEQ ID NO: 32314 - DNA, 2383 bp, Zea Mays
cggtgcgcggtgcgcccgcttcaacccctgccccctctccctggctcctgtgctccccatttccagttttccacccgacgagaggcaaaagcctcgcgccccacgccggtccggcggcgacccccgccgtttcccgcagcgaccaagacgcgggctgtggtcgcctccgccccgtgcctacccggccgcgggcgtagcagcctcctggaccgcagcgccctcccccctcctttctcccgagcgacttctgatccagccgcgtcgcaacaactggtcgttcgagtctgatctccgccaccgcggcggaacgaggcgtctccggtccccgagatttggctctttctttgggccatccaagccggtgatttctcgtcgagtgattgaagaaagaaaatcattgaaagaactgcatagcacagttgcaagggagccaaggccttcgggagtacataaggacattccgtcgtcctctaaagtgcaaagtaaagtaaatggacatcagcataaacagaaaattgttaatcaggtaaagaagaaggccgaggcacttaaggataaccgggattattcatttctactctcggatgatgctgacctgtcatcctctccaaaggagaagcctgctgctagatcttccttgactcaaagggctgatcgtgaggtgatgcgaacaacagtgaagagcaaggcaccaacaagtcaacctgcacgggtgtcaaatggatatggatctaagaacaaaatgtcaactcaaaggcatgccgaaggtagggtagataccatgagaaaggaggctttcttgaacagagaaagggttgtctcacgtgacaatgaaaggatgcatgaaagggttgtttcacgtggcaatgagaggatgcatggtagtgcaataaatgggtccaaccaggcaagtactagcaaaaccacaatccaaaagcttacaagcagaggttccattgctaataagcaagcttccacggatctgaatgatgctgctctgaggaagagcagtgtagccccaaagcaccatttctcagaggttgacagatcaaaatccttgcaaagccagaagatgcagtcagctggtcagagactgcagcattcttcccatggtcagaggccacatcaatccatgcagcataggccgcagcagtcattgcagagtcggaggccacagcaaatgactcaggatcagaagccacaacagtctttgcagagtcaaaggactcaacagtccttgcagaataaaaggcaacagcagtcctcacatattcagaaattgcagtcctcacatactcagaaatcgcagtcctcacaagcacacagaccacagtcgctaagtaacaggtcccaggagttacgaggacaaaggcctctttcttcacagggacaatacttggagcaaagaagagtacaggcaaatgatagagtcaaacaagctgaaaggcacattcggcctccctcgaagtccatgccatctcgaccagtctcctctaatggaattcgcgatgatcatgcaaagagaaagcaagtggtaaaaagaagatttgatgacgacgacgatgaggacgaccccttggcaatgatcagaaatatgttcgggtatgatcctagtagatatgcagggagagatgaggatgtcagtgacatggaagcagattttgctactatagaaatggaagagaaaagaagtgcgaggatagctaggcaggaggacgaagagcaacttcgcttgattgaggaagaagagagacgcgagcaggagaggaagaggcgaaagatggcacgaggccgatagtccaacacgcgtcatatttgggtgttataattgcacagacctgattgcctgaagacgaggcccatggtcgatcatacgggcgcgttgcagacaacaggaaaacttgccacgtggattatatggcggcaaatcaaggaaaacggcaggtgggcaacgctgggcacctgtaacaagcagaatgttaggcgcagtggtttagttgacgaagctgacatagacccatatataagctctcatcagattgtttggatcacacaaggctcccaacgttgcagcgcttcatcagattattctaaattctagccacatgctgattctttctgttaagcctatataaggatgcctaatccaagtagctcctttgttcatttttgtttgggtgtagtgttgtactccctccattttttttatctgacggttgttagtttaaatttgaactgtccggcgccaaataaaaaaatagaggtagcaacaaacaatgtgtttgatttttttggtacaattttgaccttcgtcagacgatcactgcacagcagatttcgagtttctatgcctgtgatcacatgaagtctattccgctcgcaa

SEQ ID NO: 32315 - DNA, 517 bp, Zea Mays
cgttgaattcggcccattggattcctccgacgcactgacccgcagtcccgcacaaccaccaccaccaccaccaccatggccgccgcgccaacaagctccggcgactcgccgccgcctgcgcagccggagtacggttccatctcctccatggtagcctcgtctgcctcctccgctgcagccgcggtcgcggacttcacccgctgggccgagaccttcggcaccgagaaggccgacgccgccaaggctgccctaacctccgccaccaccttggccacctcatctgcctccgaggcggcttctgcttcctccaaggccgcgtcctccgcatatgcggccgcctccgacctcaccctcgtcgccaaggaggagctggaatggttcaagacggagtactctgctcacgagcagattgtgttcggcaagatcaaagggccaaggagctaccttattcaacgagtacggcacatgtttgttagcaaggagcaagtcagaataaaatcaaatatgatggttgcaa

SEQ ID NO: 32316 - DNA, 2546 bp, Zea Mays
ctcgactcgccgaaatcccgggaggagaggacgcgggcggcgctatggacacggagccgttcgacgaggcggagctcctggcgctcccaccgtcccccgtcgcgtccccgcctcgtcgcctcaagcgtctcaagaaatcctcctcccaagccaccgccaccaccgccactaccaccagccctcatgtcggctccccgcctccgcctttgtcgcctccgcctccgccgctgctggcggaggcgacgccgggcgaggaaaccctggcgttcccttcccgcgacacctccccacacccgccgacgccgccagatgcggatgccccgactccgctaccgcatccctctcccgcccccgtgtcgccgccgctgcagccgaccgtcacccccgacaacgacagcgacgaggaggacgacgggctcgacccgctgttctccggggccgccggcgtcgcgcagtgggacccgctgggcgcgccggccgaaggggacggtgagggcgacgacgacgacgacggactggggggcggcggcctcatcgaggagctacggagggaacagaggtctgcgaagaagcgtctcgacatggacgaagcggacggggaggtggcttcgggtgcgggggcgagggcggaggcaaaggggaagaggagcaagaggaagaggaaagaggaggcaccgaccatggagtcggcccgggagaagaagcgatctgagaaggaaaggagggcgcagcttgattcgatccatgccgagtcacagaggctgctgcgggagacgaggaaggcgtcgttcaaaccaactgtgcagccagttcacaagcccatctcatctgtcctggagaagatccgccttcgtaagatggaggttctgaagaagtacagatttttctctctgagatcaaatacttctattgaagacagtgatgacaatgatgctgttccggagccagtggttgatttggctgagcaattggatgtgcctcagtctaaagaagtggcacttgataaagacttgaggattgatggcgctgaaaaggagcttggagcaaatggccacagccttgatcggtgtgatagtgttcaagaggatgaggatggtttgagttgcaaggagaaatatctctataactgtggtaccaaagcttcagatgaggaattttctgatagattgcaagagaatcacgagaacacccagccaagtaataatcataacgattcagtagatcagagtcaactgcccccttcttcaagccctactgagagtacagatgaaatttcatcagaagacgaagaaaataatgataaagagaacatggatccaagcgctcagaataatgatgtacatactcttgaacacctccaacaagccatcggaggaaactcacgtccagatgatgctatcttaaaggattttctagatgatgaagctgaggaagaggatgatagtgacaatgacatgactagatttaaggacaatgaagaagatgatggaagcgatgaaaacgaggtgttcaatgacctaatagcagctggttatgaagaaaaagaagtagatcacgagaagcgtaatgaactccaccaaaagtggcttcaacaacaggatgctgctgaaacaaataatgttgataataatacattgatatccccattagaagatgacaactcaagggaggtatttagtctaataaagaagctcaatattgctcctaaacctaagatgagaggaaagcaatcaacatcaaatcatgaaatgcttatggctggaaggaacaccattgcttcaaagtcatcgtttcttggacgaacagccagtggttcactggcatcttctcacagatcagtctatagatcctatgtatttggtcgtgatgacagcaatagcagcagtaggagctgcatttctacttcagagagtaatttagatctgaccaattcctctcaacccaagaaggccaagttcagttcacagccgaaaccagaggggacaagggcaactccagagtgtaacacgagttcaggtgtttccctcttcgacgtcctgcgcaggacttcagagcagagcagtcaggaaagctgtagcacaatcacagaaagtcaagctgtgcaccagttctcggcattcaagttatcaaggaggttttccaaggtgggttcaaaaaattgacaaactctagatggctgttagtatcgagagggttactgttggagcttatggggcaacgcgttgagttagtttcgagcttcaaaccgccaaaatgttccggattgcaccatgagcgccaggtgttttatgcacgaactgagaatgctgagacctggccctgttgtagattatgaaacccagaatcttgttgtgtgtactcgtatgctcttgagaacgcacgctgagtttcctgagatgtttaaagtggagtgtaatgtttgcttattctctctgcattgtctcatgagataggtagatgttgtaaggcttttaccaaaaccaaatgttcgaaatattagatgtaaccatacattctgttcatggatgcctgccgatgttaccatg

SEQ ID NO: 32317 - DNA, 2619 bp, Zea Mays
tcctacaatcgaaagacagtggcaggatcacctctacacgcgcatggcacatttgctgggaattagggcaatcaacgtttaagtacatgtggtctactgctgtttgattattactgagattcaatcatttggtcagatgagagttctggctggggacttacaagtgtagcactgttgtcggcttgtgactaaatagcatcacttcacatacaacactggataatggatcgtagggatacttcagggtttgttagtggaggatgcaaaaataatgaagcctactagtttctctatatcttctaacttggtagctttattgacaattatttaacccagaagtgaggccagctggtacttcccataaagtttggttactctaatagcaatggaacccaggcatgggcgttcagcattcactataagtttctcaaatccaaatggctttgctaatcagtgcaccgccattccagccgtcagttattcagcggctggttctagccaacttgatgtgctggctcctactagaggttgcaagagaaagtggactgagttggctctaggtctgggtgacacatcaagctcagacagcagcaagcagagcatgggtactggctgcactgtttcttctctcaagggaagcgatgatgtctcatgtatggattacgacataagtttcaagttatctcttggcaatgaagatacttccaagctgcataaacaggcttgtggttctaaaaggactatggagaagcctcggttggatcttaagttatctttggctccatctcaatccgatgtaactgacgcggatctaatcagaagcagtgcacctcaggacatgtttgtgcagccgtacttgatgtcctcagtgccaacagtcgatgaaggatctacatctgctcgacatccatctggaggcatggtggtttccttccttaaccaggctgggatttctccgaaccagttgcccccacttaactctcatctggtccagggtccagcttgttcagcaccaacagtgctccaactgccaaaaagttcagctgccacttcttctgggtttgtccgcccacagcaacgcaacggtagcacaaagatctgttcagagccaggttgtgcaaaaggagccaggggttcatctgggcggtgcattgcccacggtgggggcagaaggtgccagaaagaaggctgcaacaaaggagccgaggggaggaccatcttctgtaaagcccatggagggggcaagcgctgtgagcgccttggatgcaccaaaagtgccgaaggccggacagatttctgcatagctcacggcggcgggcggcgttgcagtcatgacgggtgcaagagggcggcgcgaggcagatcgggcctgtgtatcaagcatggtggcgggaagaggtgccaaacgctgaactgcacaaagagcgcggaagggcggtcaggcatgtgcatcgctcatggtggcgggcggcgctgccagtacgctggctgcgggaagggagcccagggcagcacaaacttctgcaaggcccacggcggcggcaagagatgcacgcaccccgactgctccaagggcgcggaggggagcacggcgttctgcaaagcccacggaggcggcaagcgctgctcggctgacggctgcacgaagagcgtgcacggcgggacccagttctgcgtcgcgcacggaggcgggaagaggtgcgtggtggaagggtgcgggaagagcgcgagaggcaggaccgaccgctgcgtcggccatggcgggggcaagcggtgccactccgccggctgcgggaagagcgcgcaggggagcaccgatttctgcaagtcccacggcggtggcaggcgctgctcgtgggggcaccctggctcagacctcgggtctggtggcgctccctgcgaccggctggcgagaggcaagaaggggctgtgcgaccggcacaacccgctggtccatgacaacagcgtgcatgggggtgcgtcgttcggtggcttcagtgtcgtcagtgccgccgccctttctgagggagatggctctccatctccaggcaccgagacaagcatgcgcagcttcttcatgcacgcggtggaggctcctcgctgtgtggcggcctcggcccatgaaggccgggtgcatgggggcaacttcatgcctatcatgctcgacggtggcgtgggactcgggaagaggccggccgacaacgctgatgctggtgcctctgcccctcctcgcagctggaaaagtatggagaaggcctgtggatctgcgccgcgcagctggctgtagtatttgccagaagttcgtgacctgctcacagctcactctctccatctgggtctcctctgctcctgctccaagtgtctcccgtgtcctctggtcatgcgtggtatggtatgataacatgaactgtgtgtgtactggttggtcaggactcgggacttgtttggtactgtggatattgtggttgtttgtgctcttgtagcataggtctggtcgaacatacctactagtaacagtcgtcgtgtgcggtgtgtgattgaattgtaaatgaaaggaacgcctcgtcatgatacaaataaaaaatagtacctttcctcgcggcgcccgccaaataaaaa

SEQ ID NO: 32318 - DNA, 2163 bp, Zea Mays
tgaagggcgtgggccaagtcttcatttgtatgcatcaaccattgacggtgtcatagtacagtgtcacacatacatcaagtcatcaataattgcaccggcggattgtacggcgctctgtgctgctgcagggattttgcagtatcttgttggaagccttgtagtggccgcggtggaaagaacaagacgatcaaacgcatggcgccaaacgagctgcttaggatggaaattttcttccatttgttgagcaccgaaggaagccccgatgttaattaatcgttataagtgcctcgcccacactcaccaaagtccaaggatcggtgcattcagaatttcagattcagttcttggttagccattgacagcatctgaggccatatcatggatgcgctcacgtactacctgtacctcttcttggccttccttcccctcttgctcctgaagctcaagaggcgagacaacaacgatggcctgaggctgccgccgagcccatggagtctgccggtgatcggcagcctccaccacctgctcgtcggcagcccgctcccgcaccgtgccatggctcacatctcgcacaggctcaaggcgcccctcatctacctcaagctcggtgaggtccccgtcgtggtcgcgtcgtcgcccgacgctgctcgggagatcctgaagacgcacgacgccaacttcgccacgcggccgtggagcccgacgatgaaggtgatgatggcggatggggagggcctggcgttcgcgcgctacggcgccctgtggcggcagctccgcaagatcagcatcctggagctgctcagcgcccgccgcgtgcagtcgttccgcggcgtccgggaggaggaggtcggccgcctcgtggctgccatcgcggagtactccccgcggggcgaggccgtgaacctcagccagaggatcgccgagctcatgaacgacacggccgtgcgcgccatgatcggcgaccggttcgagaggcgggacgagttcctggagaacgtcgcggagggagtgaagatcagcaccgggttcagcctcggcgatctgttcccgtcgtcgaggctggcgagcctcgtcggcggcacggctcgccgggcggcggtaaaccaccgcaagatgttcaagctgatggactacgccatcgagaagcacgaggagcggagggcagccatgaccacagatgcagagggcgtcgtgaaggaggatctggtggatgtgcttcttaggatacagaaggaaggaggcctggaggaccttttcggtgccggcagcgagacgtctgcaagtacactccaatgggccatgtcggagctcgtaagcaacccaagagtgatggaaagggcacaggccgaggtacgtgagaagctccaagggaagccaacggtgaccgaagatgacttggtcgacatgaggtacatgaagctcatcatcaaagagaccctaaggatgcatccggtggtgccattgcttctcccaagggagtgccgagagccatgcagggtgatggggtacgacgtgcccaagggaactaccgtgttcgtgaatgtctgggcgatcagcagggatcccaagcactgggaggacgctgcgacgtttagaccggaacgattcgaggccgcgggtacggttgattttaagggcacggactttgaatacacgccgtttggggcgggccggaggatgtgccccggcatggcgtttgcgcaggcaagcatggagctcgtgcttgcagcgctcctgtaccatttcgactggaagctgcctggtgggatgctgccgagtgaattggacatggcggaggagatgggcatcactgcccgaaggaagcgcgacctttacctgcatccagtcgttgtcagtgtgccaccacatgtctcataaaccatagctgttctacttgctattttaccgtagctatatgctttattgatgcagcaaagttcactagtacacacagcctctatagtgacggttctatagacgttttcactgacgcttttcagtgccgccagtgctaggggccgtcattttcattggcggttattctagaaccgtcagtggaaatgctattttcactggcggttttataaagaaaaccgccagtgaaaatagcatttccactggcgggcggtttgttttatttagccgccagtggaaagttttctc

SEQ ID NO: 32319 - DNA, 2411 bp, Zea Mays
ggagatgtcatgggcatcatagggagcggtcactcatgtggggtcgcacttatgtgcgccaaaagcgagaggccgcagggggcgctggcagcagcgcgcgcaaggaaggcacgggcgctggcagcagcgcacgcaaggaaggcatggcaaaggaaagcgcgcacaaggaaggcatggcaaaggaaggcatggcaaaggaaagcgcgcacaaggaaggcatggcaaaggaaagcgcgtgcaaggaaggcatggcaaaggaagattgtcgaacttgctgatattgcacgatgcatagcaaatactcctctggatgaagaaagtgcattatctcaaatggttacctgcatagaagatctccaagaaattgtcaactgcaggaagcatgagtctctcacagtgcagacatttggaacacgaatagaaaaactacacagggagaagtatctgcagctctgtgactcggttgatatggacaaggttgattcagcaagcaccataatggatgaggaagacaacgttgttcgtagcttgcgcgcaagtcctgtccatccaatcaaggatcgcacttcaattgatgactttgaaatcatcaaacctattagccgtggagcatttggacgtgttttcttggccaagaaaagaactacgggagacctttttgctataaaggttcttaggaaggcagatatgattcggaaaaatgctgtcgagagtatattggctgaacgtgatatattgattacagtcaggaacccttttgtggtacggtttttctattcgtttacctcacgggacaatttgtatctggtcatggagtacctgaatggaggggacctttactcattactgaggaatttagggtgcctggatgaagacgttgttcgtgtatatcttgcagaagttttgacagattttgggttgtccaaggttggtttgattaacaacacatatgatctgtctcgtcctgttgttagtggggcttcactgtatggagatgatgagcctcagatgaatgaattcgagcaaatggatcaccgagcacggagacaaaatcgttctgctgttggaactcctgattatttagcaccagaaatccttttggggacaggacatggttgcagtgcagattggtggtccgttggtgtcattctatttgagctcattgttggcatacctccgttcaatgcagaacacccccagacaatttttgacaatattctgaattgcaaaataccttggccgcatgtcccagaagagatgagttttgatgcacaagatttaattgacaaattattgacagaagatcctcatcaacgactaggagcaaatggcgcctcagaggttaaacaacatccatttttcaaagacattagctgggatacccttgctaggcagaaggctgccttcgttccctcctcagatagtgcatttgatactagctacttcaccagtcgctattcttggaatccatcagatggaaacatatatgaagcatacgagtttgaggattccagtgataatggaagccttagtggaagcagtagttgtgtgagcaaccgccaagatgacatgggggaggacagcgatggcctcaatgagtttgaatctagtgcaaatgtcaattattctttcagcaacttctcgttcaagaatctatcacaacttgcttccatcaattatgatatgctcaccaaaggattgaaggatgatccaccgccaagaactgaaacgtagcaatcaatctaaatttggactctcatccgagtaatcaaacagtctacaaggtgttcgcgggatatcaaagtgtgaggcatggtctgttccaattgaggctgttcctacatctcgcggagccgagtacagttttgttgttaccttgttttcatgaccaattgacatgccatcatcagtgaatcacccttgaccgaattgggcagagcgctgtctttttgttcccctttgctttttttttaaaaaaaaaatcagtccattatgagccttgggtttggggagattggcccaggttactgtattcagaatacaacccctgaagatgtaggtgggttttaggaaattgtcattctagaatttattctggacacatttagctaactgaacaagccctaagctggtagcccgctggatttcctgcggccagaaatgttcacagcattcttgatggccatgggatacagcattttgctaaatgtgtccagtgtcccacagaatctgggacattataagaataggaaccgattgaggctggtgctgtttgtttcaacagagagtacgggaacggtaatgcaactagcaaacggtgataattgtcaaaggaataaaaacgctctctgtttggttcagctttgggagcgcagcatccaaatagttgccgctgagactgaaagtttggc

SEQ ID NO: 32320 - DNA, 3641 bp, Zea Mays
cattttcattctcccacccacccggatcctccgcgcgcgccgccaggtccgtcgcgatggccgcactccgcctccccgcccagccggtggcgaggtggccccaccttccttccgcctacgccgccgccgccgccgcgcgtcgggtctcggcccctcgcggccatctcgcggcgcggcgggccaagggggaggagccgccggagccgccggtgaggacgctgctgatcgacaactatgacagctacacctacaacatcttccaggagctgtcggtcgtcaacggcgtgccgcccgtggtcgtgcgcaacgacgagtggacgtggggggacatctttaaccggttgtacaaggaccgcaccttcgacaacatcgtcatctcgcctggccctggatctccggcatgccccgccgacataggggtatgtctgcgcatacttttggagtgtggagatatacccatcttgggtgtctgccttggccaccaggccctgggatttgtacatggtgctgagattgttcatgctccagaagctatacacgggcgactcagtgaaattgagcacgatggatgccacctctttaatcgtgtcccctcaggtagtgaggtatcattcccttgtaatagaatctggttctctacctgatgatcttacatcgatagcgtggactgcttctccaaatttgctttcttaccttgaaagtgatcgaaccaatgttagtaccttcttgggaacattggataacaatttaatgagaaaccctctagagtacagtaacaatggtggggaactatccaacataggacatgcttgtgagtcagatgatagccgagttatcatgggcatcaggcactctagcaggcctcattatggagtgcagtttcacccagagagcattgctactcatcacggaagacagattttccgaaactttaagaagataacaggaaattttggattgcgctcatcgtggattcaggaaagaaaggttcacagtattggtaaactggaaaaatctcaagtactgtctatgatgaagtatttgacacactatacctatacacgtcattttagcagagagtcctgttctgcaggtcaattctgcaagtcatcatgattctattcctaaggacttgttgcatactgaaagaatggaactttcagagtctgtacttggaaagagagggattgggaagaagtgtttacgattacaatggaagaagattgaaaattttgtctgtcccacagtaggctctgaagacatatttgcggtgctttttggccatcaaagcggtgaagacacattttggttggatagctcatcagttgaccaggtatgcagtaagcttactattaactaatcaccaaaattgaataaaaaaagaggatactattttctcttcaactcttgacctacatgaattgagctgcaacaccatctcagttgagtggtatagctggaaatttgctgaaacttacttggattacaacttcttttatttcctcatggagaacagggcacgtttttcattcatgggtggtaaaggtgggtccctgtggaagcaaatgtcattccacctatctggtcaaagagccaattgtggaggaatgcttagtatccaagatgcttatggatttactgccaaaaaatttatcaaagacggcttcttggagttccttaacaaggagattgagtccattcaatacaatgagaaggattacgaaggactgccctttgaattccatggtggcttcgttggatatcttgggtatggtcttaaagtggagtgtgatgcatcatcgaacaaggccaaatcaagtactcctgatgcatgcttcgtctttgctgataacactgtggtggttgatcacagcaatggtgatgtgtatattttgtcactgcatgatgaattttattctagtaatggagatgggatatgcaaaaattcaacgcatacttcatggttagtggagactgagaagaagcttctcaggttgggtggtatgccctcaggatcaccaattatccgaaagacacatgctagatcatccagtgtgcataagcaggcaggatcaccaattaatggaaagacatatgttagatcatccagtgcgctgaagcagagttttgttgtagagaaatcaaaggaccaatatgttagagacgttcagaattgcttggattatatcagggacggagaaagctatgagttgtgcttaactactcagatgaagagaagagcagactgtataaatgcactccaactctaccttaaactgagaaaacaaaatccagcgccttatgcggcctggcttaacttctcctcagaaaacttgagcatatgttgctcttctccagaaaggtttctacgactagaccgagctggagttctagaagcgaaaccaattaaaggtactatagcacgtggcagaacaccagaggaagatgaatgcttacgtctgcagttgagatacagcgaaaaagaccaggccgagaacctgatgattgtcgacctcttaagaaacgatctcggcaaggtctgcgagccagggagcgtgcatgtcccacgcctcatggacgttgaatcatacagaagtgttcacaccatggtgagtaccgtctgcggaacaaagaagccagatctaagccccgttgattgtgtgaaagcggcctttccaggcggttcgatgaccggggctccaaaagtcagatcaatggagatccttgattcacttgagacaagcccaagaggagtgtactcaggatcgatcgggttcttctcgtacaaccacacattcgacctgaacattgtgatccgaactgttatcctgcacgacggagaagcctcggtcggggcgggtggggcgatcgtagcgctgtcgagcccagaagcagagtacgacgaaatgctgctgaaagcgaaagccccgactgaggtggttgaggatctcgttcagacgatctacagctcagaccggtcggattccatgcagacaactatcagctagatcagataggcaaaggaccattatttgtcgcgacaccaagcgcttacgatggacctcggcaaacaccatgtgtctcagaaatttggtatcagtgaccggtgcgtgctgatgaacattggcagtgggagaggggggggggggggggggtgaggtggcgtatcttctttgcgatggtcatccctttgccagaaggaaataaaggagacgcgaagaggatgtcgaggtcagtcggatccacggttagcatatagagtcaggtgacatggcctctctcaactatagtgtgtgtgtgtgtgtggcatatacggtgagcatatacaagaacaacagtgtgtgtgtggcagaagtgaaacaaactgatacggttgtgttgcactgtcgtaccagttcaatgttcctgaagtgatattattctttgacgttataaatacttcgagggtgggtgggcgaatttcacgttttgtcgacgtttcctgggttgagctttccatccagcttctcaaatcccattttactctgaatattctgttgacagggatttctgttattaaagattcggagcagtttgttgttgttgcttttgacggtgaccttcatgaatcctgactcctgagatgcattttttttgtgttt

SEQ ID NO: 32321 - DNA, 2243 bp, Zea Mays
gttggccgcaattttacacaccccaaggtctcgcaaatcaggttgcggtcctcgtaccaaccctggccatgttcggttcggttgcctatcgcctcctcctgctcctcttccgccgccgccgctgccgctgctccctaggtgaacccgtcgtcgcctcgcctgggcccacaacgccctcctccgcctgtgagcaaggcacccctctcagtcttgtgcagggcgagttgctgccatggcggttgttttttgcgggcacgagctctgcccgcctccagtcttggatgtcgtggccaggtgcctacttccccctccctccctccactcgagactccatgtcgccgccacacgacactacgcatccgctcttcttcctcccctcgtctcggcggctagcgtccgctccctcgacgcctccgtccatgcccggctccagcactcgctggctccccgagggagttgaatgaagaaaggaagatcaaggattgaagcagtttacgcatggccctgagattgcattaactctttctcagaatgatattgagctcctggccttcctgttggccatacgagaatgaggtgtataggtagaagtccaagagaaacatccatagccggttggggatgtccggttctgagctgccacatagctgatgggatttcaagatggcatgccagctgctcgtgcataatcaggtcaagccaatgggggatttattaggagtaaatcgttgtattcttgatgtcagattgttgagtgttagaggtcaatggatagggatgtaagtctcatattttgggttattggtccttccagaacttgataaaagaaactaaagtggcatgccacctgattaatttagcatttaggtggagaactgaatcttctgaaatcaatgtatggtgtgctgacattctcaatactgaatagcactggatctgatgttttcaattttttcaccaatttaaagacacttctatgctctccatcaaggatttccctgttttgctgcattcattatatacttaaaagaagggaattttatagtaaaaagtcacaagttataacaatttaagaggctacaactttctggagctttacatccttgttatggttctataagtcaggtttttttaaatcttagagattgagaaagaaaagactaatgtgttttcactttattttctaattgcacactatcattaacatgatcaaaggtgattgattcttaaatggttaacaatataataccttccaaattgatgctactatttaatgcaaactgtattttccttaataaattccttatatttgactatagatttggaatgcatgtataccctatattatattgcaggatggagggagtaatgtgttagttgcatttttgccattaaccaaggttcatgtattttgttttggccagccggttcactattacctacaaactttattcattcactttacttttatttgttttcagtgggttttgcatgactggggtgatggtgattgtaaagatactaaagaactgtaagaaagctatacctcccatgattgcagaaggaaagatgataattctcgatatggttgttggaggccagttgccaaacattaagtacaaagatattcatgtcttgtttgatctcttcatcatgtatgtctcatgtctgtcaatggcgctgagcgagacgaacaaaagtggaaaaacatcattttcgaagctggatttagcgactacaaaaccatactcgttctaggtgttcgattcatcattgaggatgggagagtattgaatgcttctctagatactattcttggtccatcaaatctgcttgacccaaatgcaagttttgctcaaatgtggcaaaaaatgattgtctcaccaattgtgagcacacctgttttcagcaaagttccagagaagaaaaagacggaatggaactcaaaatttggtggccgctcaagtggaattcatatatacttagttaggctcaacgttagcttaaagcttaaatagttgatgacctagtttttaactagtaattttagtttggatttagagtacacttatatatgagttatttgacaatgattatttatgatatacttaatgatacttatttatattatgttaattataatgttatcaaatatatatatatgtgtatgtatatttctcttttaaattattatagtgtggtatctccaatattataaattgaagaatgtattgacatgtaag

SEQ ID NO: 32322 - DNA, 1531 bp, Zea Mays
cagatactttccttgtggaccgtaagtgacaaaaagtatggtgggctaggcttttcttctaagggagttggtcaacttcttgcgattgcaggtcttgggcttattgtgtatcaaatgttcatctacaggccagtccacagatatctcggaagtgtaaattcatgccgtgctgcatctgcgctatccataccacttatcgctgcttttcccttcatgacacacctgtcaggatcaaaacttggactagctctttattttgctactattttgaaagctgctcttgggataactatcctgacaggcacttcacttctgcagaactatgctgtgcatcaaagaggcgccgcaaacggcgtagcggcgactgcaatgtccttctttaaggctattggacctgcaggagcaggcgctttattctcatggacccaaaaacgccaagatgctgccttctttccaggggatcacatgttgttcttcattctgaatttggtccaatgtattgggctcgtgctgacccttaaaccattcctagcagtaccgaaacactataaatgacagctgctcgaacccaagcaatggaataatgatggattagcaaaacatatgtgcccaaaaatacgtttttgagtggcatacaacggaattatgtaaaagctgtcaagaaaaagtagctacaatgattgtgtccgctatctttacatctccttacattgaagttttaatttgagcacattttgtgtccagtacatggtatccgctgtttcaattgaaatgctggtttgagtatgaatgatgaaaaatcgaagtttagagtttagtcatacaacatgtcaaagtcaagtggcagtactatacccttgaaagagaacccaagcgcatgcaacatcagcgcctggcccatcactatccattgctgatttgtggtttgaatagacaatgataagtgttggtggttcttagcctaacaaactttactccgcaagcgtacggagactgttgtagctttcaccccgaaatattcttgtgtatcatatttatccacaggtaagcattgacaaagaatgatgattcatcaatcatctagcttctactaacttattcatcccaaacgataggtaaaaggtaaacaccaaacaccatgagatacaagccaagcaccgttggcatgaaaacatgtttaactagtaggacaacgagtcaagactaaggttttggtcttcattctcaaccacatacaagagctcttcgtgcaaaaataatcttaacagagctatgatcttacgtcgagcaaaattttgaggccccaacgtggtcgggggtaaatagtggccaaccgtatgggagctacctagtgcctacgggcctacctaacaatgaggtctgggatacataggctacactcgccctgtcaccaagacggacaaccagccaagaatttgtggataggatggcacgctacaacagtattcaagccacattcccttcttgatcactgaagcttcttccctaggtccttatgaagagaaataac

SEQ ID NO: 32323 - DNA, 2635 bp, Zea Mays
catcacacactacgcacggacgacatcgaggaaccctagactagagcacattgcacgggcgacggcgcgccaccggtgactggcgtcccctcctcggtcctcactccccagcatggcgacgccctgccgcagcagaaacgatcaaccgatcggaaaacattaatttgtattcgatttgaaagcgcacccggcacctgctccgttcctgcgctgcttggcttccggtctgtgtcaaagcttgcatctcacgcgagtcgcacaaggacgaaccctatacagctccaggaggtcggtgccctagccacctaggccaccttcctggagaccgggcggcgacgacggggacgaacgaccgcgatgggcttcgagcgtgtggagctgcggtgtcccagggagctggacccacggccgagctggacgctcggcgatgtgctcgctgagcttgacgcgctggatgccacccgccgcgctgcgccacccacgcccctgaagcagccgccggattgggctaacggtggtggtgagaaggcctttgtgatgcgggttgatgacgacgacgaagacgacacagaagatgaagacgatggtacaagtggtgggaagtcccgggctctggtggccaaaggagcaaggttctcgtgtaatgatcttgcatcaagtgattcagaggatgaattagatggtcaggttgccccataccacttaatggagaaaagggacctagcgaagagcattcttcttgagctggaacacgagcatcatctaaaagttcaagaagaagttagaagtaagctagcttcattggaggtatgccaccaaaatgaaattcggagaacgatctctgcatttgcccgacttcagaaatatgcagaatcaagaaaggagatagacagaagacttgatgtacacttccagagaagaattgcagaagtactcgataaacacttatctatggtccaaagggatcatgaacaaaaatcccagattgttgaacgccgaataagagatgatgcagctcttgaagaagctaaaagaaaagagcaagctgtcaaggaagaaaagttaaggcaggaaagagcccagcaagaagcagaggctagacagaaggaagctgcaaaattagcagctgaagcacgaaaaacagcatttgaggctgctaaaaaggaagcagcagaaaaggaagcagcagaaaaggaggctgctaaattgagagatgcagcagcttctcaacctagtccgaattcccagaataatactgcaggcattaaagtttttggcgataaatacgcactagaagcagagtcacggaggcatgcattagtacagaatcaagtgccagaaaacattcatcacagcaaggaattcagcaaatatgaccgacaaattgccaaatccataagtaaacttatgccaactactgacagtgtcagaacaagggctagtgagcttgttaaagctttaaatggacaggattgtccccgtccaatctcttgttgtctatttgctaacaagattatttccattgtcaagagtagaaatacaaaggacaagacctttggaaatttggcctttgcgtgtggatatgtcatgctattagttacaaatcaggtaccagacgcaatggattatcttttagctgagttcaacagagtttgcatatacacggttccaaagcatatgcatgctttgaatgcacaagcacgaaatagagattattacagactgataggttaccaggaagaaaatggacagctcgagagcactgaaagttatctaacatacgtcgttgcatatgttaaactctacgcagcaatgattcagacggaaatcaaaggtgttcgtcatcctcatggtttagctgagggatggaagtggcttgccatgttcctcaattctctcccagctactacagccactgcatgtgcccttcacgctttcctcaagatggctggttttgcacttcacaagaaatatgggtcacagttcatgaaaatcctggatgtaatatcacggtgctttttaccagctttgaaggaacaaggcaacaagatgcaggctgaggctgtcaacaatctacagaattacctgaacgacaagatctacctggaggaaccagaagggcagtacctcgtccagcaactactatccaaggagttgttcatgtaaagatcaaaacaccagatcggtatgagacatcgtgtgtgatcgtctgaagggcggtacctcgtccaagctaccactatcgcaagaggggcctcatgtagagatgaaagcaccagatcgatatggagctgttcgtgtttcagaaacacgatcgagcctttcaaatctcacgaacattatttatgggacagtcccccagatcatttcccccctctgcacgggatcctgacgatgtatttgtttatgtgacttgtatccggccaaggacaggtatgataggttgaggttttatgtttgttgtagttgtacatgtactactagaatcgtgaccagaacaaaataatactcgaccacttcggcgtgggcccagcggtggccaaagtcaaggtcaacttgacacgcgacactttgtctactctgtttgcaatgaaatctaatgtttgtgcttcaaacaaaatagttttaatataaa

SEQ ID NO: 32324 - DNA, 1396 bp, Zea Mays
actgctcgagcttcgtttttaccgggcggggctcccgcgggaagggagggcgatcggatatcgatttaggtatatggacaaggtgtctgaaggtactaagtgagatggataagaagaaagggaccgatggcaccgaaccaggaccagctccatctcgtgccgtcgacagatttggttttataaagccagaacaaggcaattcacctgatggaattccaaaaggcaagtctatacatgagcgtgaaagggaggaaagaaggataagaaaatggaggaagatgataggtgttggtggtaatgactggaagcattatgttagaaggaaccctcatgtggttaaaaggcgaataaggaaaggaattcctgattgtctcagaggacttgtttggcagttgatttcaggcagtcgggacctcttactaatgaacccaggggtttacgagacactggtgatatatgagacatcggcctctgaattggaaattattcgtgacatatcacgcacatttccatctcatatattctttcaacaaaggcatggtccaggccaaagatcattgtataacattttgaaagcatattctgtctatgacagggatgttggatatgtgcagggaatgggatttttagctgggctgctgcttctttatatgagtgaggaggatgcattctggttattagtcgcgttgctaaagggagctgtccatgcaccaatggaaggcttgtatcaggctggtttgccgcttgtgcagcaatatttgtctcagtttgagaaattagttattgagctcatgccaaaattgggacaacactttgttgaagaaatgataaacccaagcatgtatgcaagtcaatggtttatcacagttttctcatattccttcccatttcatctaactcttagagtttgggatgtgtttctttatgagggtattaaggttgtattccaagttggattggctctattgagactctgtcacgatgatttagtcaaattaccttttgagaaactgctctatgccttgagaaatttccctgaggaagcgacagatccagatgtattattgccgcttgccttttcatttaaggtatcgagtcgtctcgaggagcttcagaaggagtatcagaagcgacaggagggcaccagtgaaacttcaagcggcgagcggctacagcccctcgtatcgaagacgatgagcagggtcggtagccgtgttgtgtcgaacttaacgaccgctgacagaaaatgacagacacgttctcttgtttgtttgtaactcgcatgtacactgtacagaaagaacggccttataatccatccatctaacagtatttgttttgcgtttctgtcaccattgcatttgcttttataatcctggatcgcaggaacaaaaaa

SEQ ID NO: 32325 - DNA, 992 bp, Zea Mays
tttttcttttcttggcagccttccttgagttcttgcctcacccagttcatgtcatgttcatcgtggcctagccttctcgacgtctcggttctctgaatagctgcttctctctctctctctctctctaggcatgctggcttcgaccacaaggtacggtgagacagcagagaaatcaagtgacgggtgaaaagattgttgccatcagtcagggatgaacagcaaggagatgtgccaagaaccgtgcgacgagctgtccgagatcagcagccaggaggcgtccaactcctccggcctgctcgcaggcgctgggcgggcaccagaacgcgcaccggcgggagcgcacgctggcccggcgcacgctgcggctcgacgcggcgggcccctacggctactacgccgacgtggcgtccctgccgctgtacggctccggcctgtaccccatcggcatccaggcgcacgcatcgatggcagcgcacccggagcagcagcagcggcacgaggacgccgccgagctgaggcccgcgcgggggctgctgagccccatgccattcctcgtggccgacgaggcggagatgagcttcggctggcccgggagcttcagaccagccaccgccgtcgctcctgcgccggcggggagcgccgtcctgaactcggctggcggcgtcgccgtgcatgcccgggaggagcccgatctgacgctcaggctgtgaagtgtgtgtgaactgatccgtcgactagactggttaatccgtcaggctttcattctctttaaattgatgatcggcccatggctgatgcagatcagaccgtggcggtctcttgcttgaccagattcttcctattgtttcgtgtgcgtgcaagaatttttgtacagcagttggatgtgcaagagctcgagatatctctctttattcaatgatcttggtatgctatcgcatgttcgtacgcgttccagctgtgaaacacaatgcgccatggctgtgaaacacaac

SEQ ID NO: 32326 - DNA, 1672 bp, Zea Mays
ctcggctcatctcatttttctatttcggcccctctactgttccaataataataaaaagattctcgattcgatttactcgccaattttcagtgagcggcggcgatcggcttcggatcggcgcagcgcggcggagcggagatggttgccgtggcggtggatggcctgatccgcggtgcggacgccgtgccggcggcggagagggaagcggtgagggcggcagctgcggaggcggcggccaagggcggtgagggggaatcggggaaggaggaggtgagggagtatgagagcgacatgaggaagctggaggagctgctttctaagctgaacccctcggcggaggagttcgtgccgcagtcccgccgccgcgtggacggcggcgctccccgcctttcggccgacgcgcccgtgttcgtgtcgccggcgatcgactactacgcgcgccaccaccagctcccgccgccgccgcttctgcagcagcagcagccgatgcacgtgctgcagtttgtgggtggcgtcggcggggttggcatgggtggcggcggggggatggactccagcagcgacggatccgccaatggtcagccgaatcgacggagaaggaacggtttcatccaggggaggagaaggatgatgggtgcccggcctcgtcgagctgacagggaggatagtgtgcggcggacagtctatgtctctgacgttgatcagcatgtaactgaacagaaacttgctgaagttttttcaacctgtggacaggtggtagattgccgtatctgtggtgatcctaactcagtgcttcgttttgcttttatcgagtttgctgatgacgttgctgcacaagcagcactagcacttggtggaaccgtgcttggcttttatcctgtcaaggttctgccatcaaagacagcaattttacctgtgaaccctaaatttcttcctcacactgatgatgagaaagaaatggtatccaggactgtgtattgtactaacattgacaagaagatcgcagaagatgaagtgaagcaattctttgagggaacatgtggtgaagtttctcgtctgaggctacttggtgattatgtgcactccacatgcatcgcttttgttgagtttgtccaaggatatagatggtcattctacgttgattttttccgtggaaatagcacattcttggtttaagtggaaggcagatagtgctattctcgctctgaactgcagtggcattgttcttggaacgcttcctgttagggtgagcccatcaaagacaccagtccgctcgcgatcgccccgtgtgacgtcatactgaattcggctcatctgaagccgtcgtccagggcagcaaatttctgggcaacaaagccctagtcgtgtggccttagagactgccgcatcgcggataagtaattgtcgttgagcagagttctcgttggttaaagtccagtctagtaggaggcgcagagacccgtctgtatggtcgctgggagatctatcttgacctcctttttctgttctttttggtcttagttatcgtggttggattctatagcagccttgacaggcattcgaacaacaatgtttatggttatcctatccgctttggactcttaagcatgttttcccagtctttaaatattaagagatagtttggtaactatattttttcgagggattcata

SEQ ID NO: 32327 - DNA, 1462 bp, Zea Mays
agacctcgacctcccctcccacatgctcttcagtctttgggacttcacagggcacggcaccaagagaggggagaatctttcgccctgaaaaagagcaaagtttcagcccccccccccccccccccccggttccttcccccaacgaaccagcagagatatatcgcagggaacaaaacacaaggaggccaccagccgtagccgacacatggacacgcagcagagcgtcgtcgccgccgcgatccagtccagaggcatggtggccgccgccgcaaaccaccccgtcgtcgcggcgggagacgttggcagctcgccccgcgccacgtgcggcggcttcgtcgccctcgacgtcggcgcgctgtcgtctctggccggcgacgccggcccaccgggcacgcccaccgcgccgccgcggacacccaaggtgatgcggtcgctgtcgaggaagggcgacaggaagccggccgaccccgacgccaacgccaacgccaacggcaccgccggtggcggcggtagcgagcggcccgcagcttgttccgtgcacgtggcggccggcgaactcggggacgcgccccggcagcgcgcggctggtcgtccacacgccgctggccggcacgcccggaagcaagtcccggcggttcggcaggcggcggcgccgtggctcgatccccggagggtggtcctcctcttccccacgctgtccagcgtgggaacgctgatcctcctctacttcacgctatccatgagcagggcggacaccagtagtggcggcgccagcgacgctcggtgagacgccggcggtcgaaagcgaagggggcatttttgcctcgtctgagaattttcaaacttgcaaagattgacaagaatcaatacaagtagggccaggcatatcgacggtgaagagatcgagccggctggggattttgtggacaagtttgtgatggtagacatacttgtttcttcttgtattatctctctctctctctccttttttttcggattctctcaaaaagggatacatgtcgctttacagcgtaacagataatactgaaatttttactcccctctgatgctaaaaacacaaccaaaccattttcgccacatgtcttaacagggatggccaattgtctttgagctcggatgccgttcattcaacagtggtgtgtgtgtatttgttccctgaacctaacctcaacgaacaaacaaaccatgttgcaaatcacaaggggtgatccaagataatttgggaccctctatgcacactggcattaagaacaagttcaataataaagtcaagcgcttcactattgagtcaaattatagaatagtagtctcctaattgtgcataagaatttttttattgttaatttacccatgttccactttctctttctcctcacatcgttgtgttgttgagtggtggcccaccactatatagactctcgtgtccaacttagggtttgtt

SEQ ID NO: 32328 - DNA, 2997 bp, Zea Mays
cgccagtttcccaccgcgcgctcgctgaaaaatgccaatgccgccgccgccgcgaaaagacttcccggcgttcccgtttgcgccgtacccgatccagtcggaattcatgtcgtttctctacgccgctctctcttcaggccccggcgccctcgccctactcgagagccctaccggcacgggcaagacgctcagcatcatctgcagtgcgctgcagtggctcctcgatcaccgcgaagctgccgtagttgccgctacggcattggcccaccccagcggcgcctccggctccggtggtgacgatgacgagcccgactggttgcgggatttcaagccggcggcggcggttaaagagagcactaagaagaaggcgaagcctcccgcgatgaggaaaacgctggtttcacggaaaccagatggatttggggaggaagacggcggcgacgacgagggggagttcctacttgaggagtatgagagcgacagcgaagacgtcgcgaggcggggtgtagggaaacgagcacattgcggtagtagtagcagcagtagcagcgaggacgacgatgagatgacgcccaaggttttcttcacaagccgcacgcactcgcagctctctcagttcgtcggggagctcaagaggacggagttcgctgggcggatcaggacggtgtgcttggggtccaggaagaacttatgcatcaacaaggatgttctgaagatgggcagtggaaacaggattaatgagaggtgcttggaactgcagaagaacaagaagagcaccaaaattaagcttgaggatgataaacgaaaggtgcgcccagcaaagcgctcttgtggctgcccgatgttaagaagcagaagtctgctgaaagagttcagtagcgaagtgtcaaaccaaggtgcattagacatcgaggatttggcacaaatagggaagaagattggaacctgtccctactatggttcacgagacatggtccgctcagctgaccttgtagtccttccttatcaatctttgttactcaagtctgctagagaatcacttggccttaatctgaagaacagtgttgtcatcatagatgaagctcacaacttagctgattccttgagtaacatgtacaactcaaagatcacgtcttctcagttgaaggcagtcctttcctgcctggatgaataccttgatagattttacaatgttttgggagctgggaatcgacgatacatccagaccttaacagttttaacaaagtctttcatacgtgttttgatcaacaatcaagatggtgccagcactatgtcttctatgaccataaaccaattcttgttttcccttgacattgataacataaacatagtaaaactttgtcagtttgtgaaagaaagcaatataatccataaggtttgtggatatgcaaacaagttaagtagcatccaaaatcagtttgatctccagctccatgatgaaggaagcagtatagcatgctttcaggcattggttgactttctacgctcccttctgaacagcaatgatgatggaagaatcatagttgcaaagcaaaagctaggtggacaacctgatgaagcatatcttaaatttgtgatgctttgtgcggaaaaaatattttctgaggttacgcaggatgcttatgctgttatcctggctggtggaactctccagcctattgaagaaactaggctgcgcttgtgtccaagcttaccaccaactgatataaaattcttcacttgcaaccatattgttcctcctgagagtattcttccaatagcagttacacgtggaccctcaggcaaggcatttgatttcagctacaattcaaggagctctccttccatgattgaggaacttggtcgtttcatctgtaacattataacagtcgtgcctgagggagttgttatgtttttttcttcatatgattatgaaaggcgtgtatatgatgcatggatgacaacaggcacaatttccaggatttctaaaaagaaacatgttttcagagagccaaggaacagtgctgatgtcgaggctgtcctcaacaaatacaaggaggcaattgaatcctgtagtaatttttcccaagacacaggtgtcaatggggcacttctattagctgttgttggtgggaagatttctgaaggcataaatttcagcaatgggatgggtcgttgtgtcataatggttggcttgccttatccaagtccatctgatgttgagcttatagagacaataaagcatatcgaaagtatttctagctcattttcggttggagatgataaggccttaagcagaaaatatgatgatgaatgtgaacttcagcctggttatgatatattacggaagtgcactagaggtggaagagagtattatgagaatttatgcatgaaagctgtgaatcaatctattggcagagcaatcaggcacataaatgactatgctgcaatgctattggttgactcgcgttatgcacagacttcatcaaccaagagtttttcctgcccggctgataagcttcctcaatggataaaagcacgactctcttgtgctcaaaactatggagaagttcatagatcgttgcatcagttcttcaagttcaataaaaaaaatgttgaaatactctagaaaccaccaagcattgccattgttgattcattgcaaacaaaaatacaggtgtatgtactcgtaaaacgtagcattgtgtttgtgtatccttatgctgcttacttatgagcaaggcttcagcctgcgcctgcgaatgcgatcagagttatgtacagaattatggtgacagtaacgcttcctcttaaggaattatggttagatccatatttcttttgctcgagattgtaaaacaatatcacaaatgtgattattcagtccttatcattgtttcaattctttcatgatagcaaatcttatagacctcattttactgacgcagaacaaatgaaattcatgtgttactacactaatatgttggtatattttcg

SEQ ID NO: 32329 - DNA, 3390 bp, Zea Mays
tccctcccgtcccctgctgcatcgacatgttttacctccttgctcgccagtcgcctataaatgaccgagcctccatgtcccgtgtacatacacacacgccgtcggccgctgctagcgaacacgcacagcacacgccatctacgcacaggcacagcaacagcaaccgcctgccgctcagtgcgtgccatgaagctggatgtcccggcgaggcagcagagcagccaggacgcagagcagagcggcaagacagtggccgcggccgtcctcggcactgaggcgtggagccacccggagctccctctcctcctccgcgacgccagcaccgacgacgccctggtgccgccgctcaacttcgccatggtcgacgacggcatcttccgctcgggcctcccggacgccgccaacttccgcttcctgctctccctcaacctgcgctccatcgtgtacctgtgcccggagccgtacgcggaggagaacgcgcggttcctgcgcacgaacgggatccggcttcaccagttcgccgtcgaagggagcaagagtggtccgacagtgctggataccatgtcggcgcaggaaccattcgtccacatccccgaagaaacgatccgggaggcgctcaaagttgtccttgacgtgagaaaccagccggtcctcatccactgcaagagaggcaagcaccggactggctgcgtcgtcggatgcctgaggaagctgcagaagtggtgcctgtcctccgtgttcgacgagtacctgcacttcgcggcggcgaaggcgaggaccaccgaccagaggttcatggagctgttcgacgcgtcgagcctgatgcacctgacggcggcctcgcagtactgaccactgaccagagcggggcgagtggttcccgagcggtcccgatcctgccaccatgccgcatcaagcaagccgtttccccctgctgtttccgaagcaactcggcagagaataatgctggaaccatgagtgtgctgtgttgcgtgagtgctgtggttgcttcgtgttcaactggtttcagattctgaactggcacggcctgcattcacttgaatcactgaaaaccgaacatgtctgaactctgaactgaagctgttgctcagttcagacgttcccgccaatcttccgatccgaccagatggcacgaagtcatataccgaccatcatttttctgtactgttcttgggccatcaaaaacgcgccggtccatatataacggcccacacgaaagtacgagaaccagaagcacgtttttttttcttcgaaaacgtaataaggtgggcgtggagaggttctgaagaaaatatcagcccgacaaatcgcaaaaacagcgtcaccggtcgatcaatttcgatgtgcattgcaacagggaaatgaaatgggagttaaagagttagatagccttatgactttgattgctgagaagaagcggcaaatggaacaacaagaatcggagacaaatatgcaaatattgttagtcttcttgcactgccttagaaagcaaaagctggaagagttgaatgagatccaaagtgatctacagtacatcaaagaggatataagtgctgtggagagacatagggtagaattataccgcacaaaagaaaggtactccatgaagctgcgcatgcttttagatgagcctactgcacaaaaaatgtggccctctcctatggacaaagctagttgtcgctttcctcccaactctcggacaccacttggcggatcatgtccaggaactttacagaataagaagcttgatccgaaagctcaaagacgagttcaagcacagttcaatgagcttcaagaatactacctgcaaagacggcgtactggagcacaggcacgcagacaagaagaaagagagaccgttgcaatgaatagagaaggctatcatgcaggtcttcaggatttccagtctgtgctaacaacattcactcgatatagtcgtctacgtgtcattgcggaactaagacatggagacttgtttcactctgccaatattgtgtccagtattgaatttgatcgtgatgatgaactatttgctactgctggagtctcgaaacgtattaaagtcttcgaattttctactgttgttaatgaaccatcagatgtgcattgcccggttgttgaaatggctaccagatctaaacttagctgcctaagctggaacaagtactcaaaaaatattatcgcaagcagtgactatgagggtatagtaactgtgtgggatgtccagacccgccagagtgtgatggaatatgaagagcatgagaaaagagcatggagtgttgatttttctcgaacagagccttcaatgctagtatctgggagtgacgattgcaaggtgaaagtgtggtgcacaaaacaagaagcaagcgtgatcaatattgatatgaaagcaaatatttgttcggttaaatataatcctgggtcaagcttctatgttgcagtcggatctgctgatcaccatattcattacttcgatttacgtaatccaagtgcgcctgtccatgtttttggggggcacaagaaagcagtatcgtatgtcaaattcttatctaacaatgagcttgcatctgcatcaacagatagcacgttacgtttatgggatgtcaaggataatttgccggtacggacattcagagggcacaaaaatgaaaagaacttcgttggattgtctgtgaacaatgagtatattgcttgtggaagtgaaacaaatgaggtttttgtttatcacaaggctatctcaaaaccagcagcaagccatagatttgtatcctctaacctggatgatgccgatgatgatcctggttcttatttcattagtgctgtctgctggaagagtgatagccccaccatgttagctgctaacagtcagggaaccataaaagttcatgtacttgctccttgatgtcgtggagggcgttcaagagatttacagccagcgcgtgtatgtcgtactgtccaggtgttccctttcgtgccattatattccccaaaagcgagaatggaggcattattgatctccggttagggcatgaatttttgcagacgatggccagctgacgtagggttttgaggtatcagaatgtgcataatcatgtttatgttgtacaggtgtaaatcagccaagttattgattacaagtgtgacatgagaaatacacattaataaaaactccagctcggttgtacagagattgtgtttgaacccagaaattcatgtggttatgtcgtttgataatatatgtacctggcaggggtgaagctaggcctttttttgtcagctggccttgataattttctggatatctaatgaaaaaacgatgtcaataacaagagttgtataatgaagatctagtagataatactagataat

SEQ ID NO: 32330 - DNA, 1549 bp, Zea Mays
agaaaacccaaccagcgaaaagaaatcgggtgtcgagtcgtcgcacggtgttgctcgccatatccccttcccccctcctccctgcgtcccccggctccggcgatccgccgcacctgaacccttctccacgtcgcctcgccggtaatcgactacgttctctttctttaggcagtcggttcgtaccccaaactcggattcctctttctgatcctcctatacacgccgcgtcgattgtatcgtcttaggttgggttgaggtgagccgatcagatccgatcggggccggtccttgcgccactgctgcgtgagctcatctcggtcgcccgcctgctcggctcgatcggccggggacggcggcggccagatctgcaatggagggcaacaaggacgacgcggccaagtgcctgcgcatcggcaagggcgcgctcgacgccggcgaccgcgcgcgcgccatcaagttcctgtccaaggcaaagcgcctggacccctcgctgcccatcgacgacctcctcacctcccttctcaaccccgaaggcgactcccaggcttcttcgcccccgccgtcttcaccaccgcaaactgccgcagcaggggcatcggaggcagttgaggctgatgggctgagagagaggaagcacaagggcaagaatagggaggaggaggcgactcctgctgccagggagtacaccgcagagcaactcgaggtcgtgcgccaggtcaaaaagcacaccagggactactaccagatcctcggcctggaaaaggactgcagtgtcgaggacgtgcgcaaggcctaccggaagctctcgctcaaggtgcaccccgataagaacaaggcccctggcgcagaggacgccttcaaggccgtctccaaggccttccagtgcctgacagatgctgagagccgcaaacgttacgaccttgttggctcggatgagccagtaacacaccacaggagggcctccactgcccgtgcatacaatgagttctacgaggatgactttgacccagatgaggtattcagaaacttcttctttggtggtatggcgcctgccaccaccaggcagtttggacagtttagaactttccatttcaggactggtgggatgcatgcccacggcacacaaagcactggtggctcacctgtcaggatgcttattcagctgttgcctgtcctactgctgctgttgctcaactttctgccatcctcggagcctgtctactcgctctctcgttcctacccttatgagcataagttccaaaccccccgtggagttccatactatgtcaagatgtctaattttgaggagcagtatccacaccaaagcactgagcgagcaacagtggagcggcatgttgagagggattattattccataatcacacagaattgtagggtcgagctgcagcgtcgccaatggggcttgtcataccagacaccacattgtgatatgcttcaaaagtttgaggcaacagcacagtaataattcatccaatggtggaagctgccttggagcctatgctgaagctggaactggggaaggcgggag

SEQ ID NO: 32331 - DNA, 625 bp, Zea Mays
gagtcctctccctgctcgccatggccctggtcctcgcatcgctgtgtgtagcggaagcatggtgagttttggtcgcgggcatggtcgtgcgacttgggatctgggcacgctgttgtggactccccatcgatgcccctcctgtcctaactcgaccatcctagcctgcgcatgtcgtcgaatcgtcggattccatcccccatggcgcttccatttcctcgccattccacgtcaccagcttcgttccaattcactggccatctttctctccacgtcatagttctattaagggaaacgatgttgcttgagtattggtcaggatgtgtgtagagatgagcttgaagatgggactgtggatagggaagatagtgaagttccgtatgtcactcatcagatgttcgacgaaaaccccaaaccaaaaatcatcggtgttcttgcaaatttgagccgagtatagttcgggagaagtctatggatgtcaattggtgaagaagtgaggcccatgtgcatcgcttatcaagtgctcggtcgaagacttcaatcgaaggtcgtcatcgttcgtgtgatgatcgagtcaaattgcaatatggcgtgctgtgtgatgagctccatattcttactattttag

SEQ ID NO: 32332 - DNA, 1535 bp, Zea Mays
accgtgagagggggagggggtatttaactgacggcgggacgaggatgcaagctctcgcggcagcagcaactgcagtggcggcgcctacccccgcgcgcctccgtctcccgctcctcttccgcgccccgcgctccggtcactgtagacccgcttcttcctccaggcttctgcggatctcgtgcagtgccaccactatgggagacgagacctcgacctccgttgctcctcaggagcaggaatccactgtgcgggctgggagtgtcaagcaacagctctccaggctggtcctttcatccctccagactacattgcccgatgtggagcaacaatgctatgggattatggtcaaaggttaaaggatctggaacaattttcaaaaaccctaattccattgggcaggccattgccaagaatctgccgtcttctgatattattgaatctgcatctgttgctggacctggttttgtgaacattaccttatcaaaccgctgggttgcacagagaatacaagatatgcttgttaacggcatcaagacttgggcaccagttctgccagtaaataggacagtggttgatttttcatcacctaatattgcaaaggaaatgcatgtgggacatttaaggtctacaattattggagatacattagcacgcatgtttgagttctcgaatgttgttgttctgcgcagaaaccatgtgggagattggggtacacagtttgggatgctaatagaatatctttttgagaaatttccaaattggcaggagataggttgccaggccattggggaccttcagattttctataaagcatccaagcataggtttgacagtgatccagactttaaagcaagggctcaacaaggagttgttcggctacagggaggggaggataaatatcgagaagcatggaaaaaaatttgtgacattagcaggagcgaatttgacttggtctacaagcgcctaaatgtggtgcttgaagaaaagggggagagtttctataatccttatattcctcaagtgctggaggaattgagtaacaaaggcttgatcaaggagagtgagggtgcccgagttatatttattcaaggtcatcaaatccctttgattgttgttaagagtgatggtggcttcaactatgcctcaacagacttaactgctctttggtatcggctcaatgttgagcaggcagagtggatcatatatgttacagatgttggtcagcagcagcactttgacatggttttcagtgctgcaaagatggccggttggctcccagatccaagtgaaaagaagtttccgaaaacaagccatgttggatttggtcttgttcttggttcagatggcaagcggttccgaacccgcagtactgaggttgttcgattggtagagctacttgatgaggctaaatctcggagcaaatcagaactactacaacggctcactgaaaatggcaaaattgttgactggacggatgaggaattagagcaaacttcagaggctgttggatatggtgctgtgaagtatgttctgga

SEQ ID NO: 32333 - DNA, 657 bp, Zea Mays
ctcctacctctctgaaacatgtcgcacgcgcccggacacagacatgagggcccgcgcgttagcaggtgtattcacccggcgtagtcggtcgcggaatgagctgggaaagggacgaacggaattctcggatttcggctgagatttccccctctcccgcgtatataacttggtgccgatcttctccaccgattaacgagcccgcagatctacaattcgtcacagcgagaggagaagagaaccctagttggccgcgccgtgagggagaaaacgggtcttggcctatcttcgtcgcgccatcaaccgggctcttgtattgtgccttggcgcttcccctagcttgtgggagggtgtccgaagccgcgccctctggaatccttgcccgcgtcttcggaattgctcgccgttgccaatgcgccgccgcgaaaccggtgtctactgtgggcaaggcagggcactactcgaccctcggtgagttctcccttgttaggtctgcctcggcctcgacttcgtgtagcataatttctcttggagattagggcgtttggggcgccgaatcagctgcgcgccggtgaggtttccgtcatggggccggtggctctcaccgccgtggtgggaaccaaagaggatgacgacagtgctgcctttgatcggctataa

SEQ ID NO: 32334 - DNA, 1225 bp, Zea Mays
ttcgcagaaaacccctcaaattctccgttcccttcgatccaccccgcatcccagggagtcctccactacagttcttgcccacctacggcgatggccggccgcctcccgggcgccgccgcgtcctcaccgttaccccgcgccctcctcctcatcgccgcgcttgttctcttctccatctctttcctctcactccgctccctgcgccccgcggcggaccccgcgcttgcgtccgccgccgacaagtaccgtcctcttctccggctccagtcctcctcgtcggtgtaccattctccggaggcgttcacagcggggtacgcggatatggagcggagcttcaaggtgtacatttacccggacggcgaccccaagacattctatcagacgcctcgcaagctcacggggaagtacgccagcgagggctacttcttccagaacatccgagagagccggttccgcaccgacgacccggaccaggcgcatctcttcttcgtgcccatctcgccccacaagatgcgcggcaagggtacttcatacgagaatatgacggtgatagttaaggattacgtagaaggtttgataaacaagtatccttactggaacaggacactaggagcagaccacttctttgtcacctgccatgatgtgggtgtgagagcatttgaaggacttccattcatggtgaagaactctattagagttgtatgttcgccaagctataatgttgactttataccacataaggatattgcgcttcctcaagtactacagccatttgccctacctgaaggaggaaatgatattgagaacaggacaactcttggcttttgggctggccatcgcaattccaaaataagggttatcctagcacgagtttgggagaatgacacagagcttgctatcagcaacaaccggatcagtagagctattggagagctagtttatcagaagcagttttaccgtaccaagttctgtatctgtcctggcggctctcaagttaacagtgcccgtatatctgattcaatacactatggttgtgttcctgttattctgtcagattactatgacctgcctttcaatgacgcccttgactggagaaagtttgcggttatacttagggagagagatgtatatcaactgaagaatatcttgaaatctatatcacaggaggagtttgtttcattgcataaatctctagttcagcttaattctgcgctaacaagttaca

SEQ ID NO: 32335 - DNA, 945 bp, Zea Mays
caccatttctcgttcagagttgagacatcagagaagggccacagcacagagagagtcagtctaaaaaaggcatagagagcctccctgccagtgccggactgccagtgtactgtgactgcgagggatcacctccgactccgactcagatccaaccccgaccgatgcgagcgccggcgatgcaccgctgggccgcggcggcgctcgcagcgttcctcgttgccttgccggctgccgccttctacctccctggcgtggcgcccaatgacttccacaaaaaagatccacttttggtgaaggtgaataagctgacatcaacaaagacacaacttccctactcgtattactctcttcctttttgcaagccaaacatgatagttgacagtgcagagaatcttggagaagttctgcgtggtgatcgcattgagaactctccttatgtgtttgagatgggggagcccaagatgtgccagattatttgcaaaacaaaaattgatgataaacaaacaaaggagctcaaggaaaagatagaggatgagtatcgggtgaacatgattcttgacaacctcccactagttgtttctattgcaaggcaggataggggtgctactgtttaccaggctgggtgtcaagggccaatatgctggtaacaaggatgagaaatcctttatccacaaccacttgacatttttagtgaaataccacaaggatgaaactacagatctctctagaattgttggatttgaggtcaagccattcagtatcaaccaccagtttgaagggccgtggaatgataaaaccactcgtttaatcacatgtgaccctcatgccagcaagcttgtggtaaactcagatactcctcaggaggttgaagctggaaaggaaatcatatttacctatgatgtgggcttcgaggccctttaggagactgacatggccttaaatagg

SEQ ID NO: 32336 - DNA, 3449 bp, Zea Mays
cgggaccggacggggcgaggagagtgaaacggcgcgcaatcgccgccaccgccgcgtcggcacgtccgccccacctcttcgcttaggcacgcgccaaaaccagtcaccggccgcaatctgccaatctcccgagccgcagtcctacgctccggctcctccacctcctaaccgcatttgttgatgacggcggagcaggagtggagtgaggtccaggtccgggccctcgacgggcgatccacggtcgtcaagctgccccttggcgcctccgtccgggacctcaaggccgcgctccggacgtccttcttgcccgcgcaagtctcccccagcttccacctcttcctgaagggtgctaaattgcgtttagacgctgagattggcagccttgctatcggcgatggggacttcattgttctcgtacccttcacaaggacgccacagcagcatttttcagttagcacagcaagtcaagatcagggccactgtccaccaaaacaaccagaagtgtcttctgcggctaattcagcttggcaagacattatggatgacctctcagcaatgccagccagcccacagtctgatgctgcttccaaagatttttactcctcatgtgacccgtgctctgggagatttacggaggatatgaaagcgggtcaaatttcgacaagtgggtcatcaaggaaaaggaggaaaacatgcaaggaaaacggaaatggttccccacaaatggtgtcctcgtctgaagcaaatggtacagctgagaaacacaacataagcaagaaaagtggggtggccaaatctgctgctatgttatgtcatgatatgcaacctttgaaacctgctgaaatggttgaacatctgaaacaaggacttggaaaggaggggcagatcgtacatatccaagagatatcatctagagaggcatcatttacagaacttccttgtaatctttcagaagctatgagagaagcgctgaagagtattggaatatctagactgtatagccaccagtctcaagccataacatcctctatttctggaaggcacattgtcgttgcaacttctacatcaagtggaaagtctctatgttacaatattcctgttcttgaatgtctttcccaagacttgatggcgtgtgctctgtacatatttccgatgaaggctttagctcaagatcagttgaggactttaataaagttgaagaatgcatctcatattgatgttgatgttaaaatatatgatggtgatactcctagagaagatcgtttgtggatcagggataatgctcgactgttaattaccaacccggatatgttgcatgtgtcaatcttgccgtatcatggtcaattccagagaattttatcaaatctcaggtatattgtcattgatgaagcacattcatacaagggggcatttggctgccatactgcgctcataattcggagattgaagcgtatttgttcaaatgtttatggtagttgtcctacattcatattttgtacagcaacctcagcaaatccatgtgagcatgtcatggaattggccaatttggatgaagtcgagttgattcagaatgatggaagtccttgtggttccaagtactttctcttgtggaatccctcactacctatgacagaaggaaggtcaaaagctagttcagtacataggcgctcaagctcaatagtagaggtttcatatctattttccgagatggttcaacatggcctccgctgcattgcattctgtaaaagtaggaagctatgtgagcttgttctagcttacacgcgtgaaattcttcaggagactgcaaaagaattggtagattctatctgtgtatatcgtgctggctacatagctgaggacagaagaaaaatcgaggctgatctttttggggggaaacttcatggagtcgctgctactaatgctcttgagctaggaattgatgttggacatattgatgcaacattgcatcttggatttcctggtagtattgccagcttgtggcagcaagccggtaggtctggaagaagagctaaacaatcactagccatttatgttgcctttgagggtcctttagatcagtatttcatgaagttcccacataaactatttggcaggtcgattgagcattgccaagttgattcacataatctaaaggttttagaacagcaccttccttgtgctgcttatgaacatcccttgtgcgtgcaatacgatgagtgctactttggctctagtctcgatagtgtaatgacaacccttaaagacaaaggttatatcatcaataatcgagctggacctttttcttcaagcatgtggaactatattggacccgagaaaagcccttcacaggctgtaagcatacgggcaattgagcaggacaggtataaagtgattgacaagttaaatagtcgattacttgaggaaattgaagaaagtaaagccttttttcaggtttatgaaggtgctgtttacatgcatcagggtgccaattacttggttgaggaacttgacttggcatcaaggacagccttctgtaggaaagctgatttgaaatattacacgaaaacacgagactacactgacatcaatgttctcggaggagaatttgcttatcttcctacaagtatatgtagaactaatcgggtgaagacaactgctcaagcaaatgactgcacggtgactactaaatggtttggtttttatcgcatatcaaaatctagcaatacaatatccgacagcttcgagcttaacctgcccccatactcctttacttcccaggctgtttgggtgcgaattccccactcagtaaagatgaccgtggaggaaagcaaactagaatttagaggcggctcacatgctgcttcgcatgcactcctgaatatagtgcctctgcatatgatgtgcagtgcttctgacctaggaacagagtgcgctaatcctcatgaaagccgtggcatcccagacagaatccttttatatgatagacatccaggtggtatcggcatagcatcacaggcccaaatgctcttcgaggaactcctcctggctgctttagaagtcgtttccacgtgcaactgcacaagtgccgttggctgtccaaactgcatccaatcactgacgtgcagcgaatataacgaagttttggacaaggaggcagcgattttgattctgaagggagtaatcgactacgagagatcgtattttgaagcggaagacgcttctcagcgaagctgctgacgtcgaggctacagtaggcagcgaggagtgacgtgttcattactgtttgttcgtttggtgtttctctcgtgtatgtagatgggagaggttcggtctgtatctgcactcacatttgtagcctcgtcatatcaaagttgatatcatatcctacgacaatcaggtccatacatctgtacaacagtacaacccaaacatgtgagagctactggcga

SEQ ID NO: 32337 - DNA, 3986 bp, Zea Mays
ggagaggaagcaggacctgggagacctcgcctcgtccgtcctcctgcctacttccttgcttttggtaggtgctgcttgttttatcttgaaatgggctctcatgatggcgaggatgaagagttgccacccccccctccggtgccaccagatgtgattcccattaaagctgaagatgctgtgggtgaatcaccagcaaaccatatattaaagccaaagagattactgatggacaggcctggtataggaagaaaagggcagccgacccagctctattcaaatcactttaaagtcgctgtgaagagtacagaagacgtcttctttcactactatgtaaacctgaagtatgaggatgatcgacccgttgatggtaaagggatcggcagaaaggtgattgataaactgcagcagacatatcgtgcagagctttctaacaaggactttgcatatgatggagaaaagagcctgtttacagttggtggtcttccacaaaaaaagaatgagttcaccgttgtcttggaggacgtatctactggaaagactgctgccaatgggagccctggaggtaatgacagtcctggaggtggtgataggaagagagtgaggaggccataccagacgaaaactttcaaagtggagataaattttgcagcagaggttcctatgagtgctattggtcaagtcattagaggcgaagaatctgagaactccctggaggcgcttcgtgttcttgatatcatactgaggcagcattccgcagaacaaggctgccttttggttaagcaatcatttttctacaacaacccttcatgctttgttgacttgggtggtggtgtgatgggttgtcgtggatttcattcaagcttccgtggcacacagagtggactttccctcaatgttgatgtctcaacaacaatgatcgtgaaacctggccctgttattgattttcttctttctaaccagaatgttaatgatcctagcagaattgattggcaaaaggccaagcgtgctctcaagggcttgaggattagaaccactcctgcaaattcagaattcaagatttttggtctcagcgagaggatctgcaaagaacaaacgtttccgctgaggcagagaaatggtagcaacggagattgtgataccattgaaataactgtctatgactactatgcaaagaaaggaatcgatctaaagtattctggtgatttcccctgtataaatacagggaaggcaaagcgcccaacatattttccaatcgagctatgctcgcttgttccgcttcaaagatacaccaaagctttgtctacgctacaaaggtcatcccttgtggagaagtctagacagaagcctgaagaaaggatgaccgttctaaatgatgcactgcaacgcagtaactacgattctgaccccatgttgagggcatgtggtgtttcagttgctccaaaatttacccaagttgaaggaaggatccttcaagccccaaagctgaaagccggcaatggtgatgatatcttttcacgaaatggacggtggaatttcactaataggaagttttatgaaacctgctctgtgaataagtgggcggtcgttaatttctctgcacgttgtgatgttcggaatcttatccgtgacctgatgaggaatgcatctgcaaagggaattgtatggtttagcttttcacatatcttctattgtagcagttttctgctgctgacgttttcttctggcagcaaatggaggaaccttttgatgtgtttgaagagagtccctctatgaggcgtgcacctgtgtcaagaagggtggatgatatgtttgggcagataaaatcaaaacttcctggagctcctaggtccttggaagagaaagtgcctggccgagtttggtattgtcacacagtgtctagctccattaagagtcaatgatccgtacctgcttaatttgctgatgaagatcaatgcaaagcttggtggtctgaactcgttgctgcaagttgaagcatcttcgtcaataccacatgtgtcgcaagtacccaccatcatcttaggtatggatgtttcacatggtcatccaggacaagatagaccttcggttgcagcggtggttagttctcgtcaatggcctcttatctctagatatagagcatcagtgcacacccaatctgccagactagaaatgatgtcctcgttgtttaagccgcggggtactgatgatgatggcctcatccgggaatcactgatcgacttctacactagctctggaaagcgaaaaccagaacacataattattttcagggatggagtcagtgaaagtcagtttacccaggtcatcaacattgagctggatcagatcatcgaggcatgtaagtttctggatgagaagtggtcacccaagttcactgtgattgttgctcaaaagaaccaccacaccaagttctttcagacggcatcaccagacaatgttcttcctggaactgtggtggatagtaaagtttgccatcctaagaacttcgacttctacatgtgtgcacatgctgggatgattggaacaacaaggccgacccactatcatgttctgcacgacgagataggtttcagtgccgacgagatgcaggagtttgttcattcgctctcttacgtgtaccagaggagcacgacagccatctcagtggttgctccagtgtgctacgcccacctcgctgcagcccaggtgagcacgttcctgagattggaggagatgtcagacgcgtcctccagccagggaggagggcatacctcggctggcagtgctcctgtgccggagctgcctcgcctgcatgacaaagtcaggagctccatgttcttctgctagctgatgtgcgtgcgcatcaggatcgagctccatgttttgtgttagtaaggcctagttagtaaggctgtagaaagaatgtttaatgtttgcatgctaaagtccaaacaatcaaaaccactactatatctaccagagcactgatcgatcaaacaacaagagtcagcatcaatcaatcaaaaccaccactattctatctaccgatcaatctactctatacctgaagcactcactcgctcgcaaacaaccaagggatcatggatccttgagtagctccattgtccagtccctgaccttgacgaagcatttcatggacagcctctcgtacgccatctcgtacatccggaggttcatgtaggcgaagctcaagtaggtggcgatgcactcttggtgcctgtggtacagcgccgggatggtcagagcggccaccacacttgcgtagcaggcggtcgggaaatctgtaacgctgccgacgatggacacgctccacaggcagaggaaggctctgtagaagagcagcgagtccctgcccagagcgatgtcccggaaagcgtccgaggcggcgtccagagcagagcgcagcagcgccgccgcctcgtccacggcctgctgcggaacgcgcagctccgggacgggaggctgcggcctgttcaggaggcgcgccgctttggcccacaggaagagcacggtgaggagcaggagcagcacgttggaggcgagggacaccaaggtgtagccgccgtacaagagcagccaggaggagacggtgcccgccagcaggcaggcgctcacgtcggcgcggccccggcgccacagcagcacgtcccagactgctgcagcaatccgatccgattccgatccagatatattagttagtagatccaatctcgggcggccaatccgtaataataattggctgagagaaaaggtgggagagagtaccgaatcctccgacggcacatgtcccggcgccgccgccgccgccgccaacaccaacaccagcatccaccaccatcgtcgtagttaatactaagggaagggaactagagaaggaagggaggggccgatgcaacggaagaaatggatggaattcgaccaacagctagctagagcgaagcagaacccaatcccaatcaaaacccgag

SEQ ID NO: 32338 - DNA, 820 bp, Zea Mays
agaaaacaggcagaaaagatgcaaaacagtgggttggcgagataaacaagctcacctcctcagcctgcagtgccaaccagaacagtccctccctcggcctatccggctactcagcaccaagaacagacggccaagtgcactcgcgcctttatataaaggaatccaccagcagcattagctttggtttcttctccttgtatgcacacaaacccatcgcagggcattctcgagcatagcttctctgcctctctctcccctcctctcctctcgtccactcctttgtccaaagcttcgagatggctcagcagaaggtggtggtcagggttccaaccatgacagatgacaagatcaagcagaaggccatcgaagctgttgcggacatttacggtaacattttgcacctctggttgactgtcttcctgttctttttttcctctcttctggatgatggattgttctgctgttgaggcttggaaaatatgttctgcaaaagaaggcattggatatgatatttccacatactagcatattgtttgtttcaatgtttgcccaccatacaatgttcaaggcacatactttgaatgattaggctgagtttaagacagaagctcgagaggataaatcatattaggccttgtttgaatgcacatgtatccacctcaatccatgtgtgttggggtgagtttccataccaattcactccaacacacatggattgtggcggatccatgggcatgcaaacatgcccttaagaattcgcttataaaacatgttaacgcaaagatgaggaccactcaggacatccacgtgtggtcggaag

SEQ ID NO: 32339 - DNA, 3216 bp, Zea Mays
agaggttggcctaatgtctctgctctaccttgacctcttcatcatagtgttcctactatactagaagcctttactgctttgccctccactaccatcttctattgacctacattcatctacactaaaaggtcagatatcctttcattagatgatggtgggacaaatggtggtatggtgctagattcaccaaccttagagttgtgtgaacatggtggcaacaaaagttaagatggtggcacaaggtagtccttgtatgagctttcatcgatcacatcgctgctacaaaagctgatctaactctacctgctcaacctgacaaatagccttatcatgtgtctgctactatctatgttgctcatctaaaatcacttgacccctctagctaagtgttatagctcatgggcacgcatccactatgttggtcaacatataatacccaaaagccttgggagagttctcatgtgttaatgccaattctagatgtgaaattagctaagagaacatataggataagtagtgggcgtggggaagctgacgatgagccttaaatccatctggcactagatcctcaatctcacataatatggagtcaccaacatcatactctatgtgagagatgagtgcatctagaagccactattttatgttgttgagagactcatcgtacacaacttttagtagtagtatcctcttcataagtgcatgaaggatcctcactacaggtggaatgttcactacagctctatatgattgctcaacaaacaactagtgagatagagaggttacatgggttgtagggggtatcacttgttgtgtagtctattgggtgggtcagcgaaaccataataaacattatgtatccttgttagtgacactataaaatcagataactctgatgtccttggcatagatcctatagtggtacccttagaatatgaaccaaaaccacttgtagtcctagtcaatccaatggtgactgagagatcccacatgatagaggaacttaatgttcttatcatcaccgcattggcaattttcttaactagtctatgcaaatcctaactacaaaagcaagataatttaacatggttgtaagttaaaatgcattcaaagggacaacacaagctcatattttagtgaaattacttagatcaagaacattgagcttgttcctcaacttaaaaatgcatgcctcatctaaaggttttgttttagatatctataattgatctgttgtcctcactcctagtaaaatgtcaccttttgctacatgatctctaaggaactgatggtggatatctttgtgcatggtgcgagagtaatgaattgggttgttggcaagttttacgatgcattattatcacccaaaaggggtaacttttcaagaattacaccacaatctagaaggttttgcttcatgtaaagaatttatgcatgacaggtacccatcatgatgtactctatctcatcggtggacatggcaacactatttttcttggggaaattccctgtatgccatcggaaaatatacttattccttgtgtgccactggccccacatgtcatacacacaaaaaaattacgtatataccactcagtggcacacaaggatgagtataagatctgatggtgtacagggattttttccatttttcttctagatgtgagatgcccttgacactagtgatttaacaagcatatgacaccctttggtagtgcttttcctattaatcttgaaacccgtgtaatccaaattgaaatagccaacaagttggaaactagctcctttaggacaccaaaggcaatgtttggtatgggtttaaggcaccaaaagaatttattaactacaactaactgaacctctttaggatttgtttggaatctagcacatatacacacactaaacattatgttaggcatagatacagtcaaatataacaagctactaattataaaatggttgagagtttgatcaattaatttatctcctcatctaggtcgagattagcattgatgtcttgattggcttacattgatccatgcatattgaacctcttggaaagatccttgttatacattttttttagagatagatatttggaatcactgctgacttttcatttattatgcgtaggacgcaaaggtaaactgtggattattggtatagctattccactggtagcaattctgctatgttcaacctttacctttctgtggctgaggaggccaaagaaagatttatgtacgcttacaattcaggagtgctgagttcgcaggacagagctggtgctaataggattgaagaaaacgccttggtttggacaattgaacagaagagttcagagtttactctttttgacctttctgagttactggaggccacaaaatcctttgcagaagaaaatagacttggacagggaggtttcggccctgtgtacaaggggcaattatcagatggtcaggaaattgcagttaaaaggcttgcttcgcattcaggacagggtttcacggagttcaggaatgaagttgaacttatagctaagctacaacacacaaatttggatatggaccctaaaatttcagattttgggttggcaagaatctgtagctccaatgatgctgaaggaaacacaaagagggtagtcggaacatatggctacatgtctccggagtatgcctctgaaggcatctactcggtcaaatctgatgtgttcagctttggtgttctacttcttgagatccttagcgcgaaaaggaattcaggttttcaccaatatggagactttcttaaccttctcggatatacatggcacctgtgggagataggaagatggcttgatcttgtagaagcatccatttcgaaagagatgcatgaagcagaggctaggcggtacattaacatcgcactaatgtgcgtccaagaaaatgcggacgatcggcccaccatgtccgacgtagttgctgcgctaaatagtgagagtgtggttctacctgagccaaagcatccggcttacttcaacctcagagtatctaaatctgtggaatcagcagttgttgttgaggcgtgcagtctgaatgagatgaccatcacccaagatccccaaggcagataggtcttccacctgatttcgtttcgctggtcattattgtacatgataatgtggacgtgaatggctatccttgttccagctttgaaactaatcattatggtcttcat

SEQ ID NO: 32340 - DNA, 299 bp, Zea Mays
tttggacaaactgaacttgagtcgcgcaggatgttcacttggcttgggtatttcagacgagcagtacatgaggcacgattacaatagcagggtaaataacaacaccacgaggaaggacgaccatggtgttgctgaggcatcggacgagatgagcgcgagatagaaagacacgcgactagagacccaagcatccgcggtggtgatttggacgacagcgaactagtggcgacaactcccggccagtcgacgatgcaccggcacgagtgtcgtgggatagcagcaccacaacagcagtcgag

SEQ ID NO: 32341 - DNA, 924 bp, Zea Mays
ctgtattgctttgtcgccccccgcagatagaaaggcttgccagaactgattccgattttgctccatttctacatcatgctggaattccatctgtagacttgtactacggagaagaatttcctggttaccatactgctcttgacacttataattggatggaaaagcatggcgatccattctttcttcgtcatttggctatcacagaaatttggggactattagctcttcgattggccaatgatcctgtgttaccttttgattatcaagcttacacttcgcagttacaggagcatataaaaacattgtctgccctgacgagcaatggccatgcagtaaatttgatgaatgggtgcgtcaatgatctttctggtgcagctatggaagttctgaaggagatgaagaaactacagcagatggatttatatgatgaacacgccaggatgagaaggcgattgttgaacgatcgcctcctacttgctgaaagaagcttcctgcaacctgaagggctccaaggaagaggatggtttaagcatctgttgtactcgcctccggaggactacgaaagcaagctgtcgttcttccctgggatcgctgacgccatctcacggtccgccaatctgagtgacaaggaacaggaggtggcaatgcagcatgaagtgtggaaagtctgccgtgcgattcaaagggctgcgagtgttcttagaggtgaattcagtgagcaaaaaccgacgaattttagttctttggtgaccccatgagatgtgtttgtgcaaacaaataacaaacaatggttatttagtatctgcgcgaaatggaagtgtgatgaagaatgtgatgcttttgggcgtacactttacagcgcagcgttggggcagcagcgagtagagggccgtttacgcatgtcaaaatggaattgtgatgaag

SEQ ID NO: 32342 - DNA, 1015 bp, Zea Mays
cttgttttctgtacatggtgactgggttggggagtgcaaatccgtcagcattggactgttttactcatctataggatctgattttgggtgggcgcagttgcggagatgcagaggctgggggatttcaggctccctcccttcttcaactacccgccttacttcactttacagcctgtgcgtgagacgcgggaaaagcaagtgcagttatggaaggatctgatacttgattactgtagaagtcaaaagatacatacaatatctctagaagaagatttccccttgttctccaatgcaaagattgagagatctcttagctacgaagcaaaggaagtgttcctcgcagctctcgtcagtgaaggtcgtgcagaatggatggacaaaggtcacaagaagtgcctaattctttggctaaggatacaggattgggcaaatttcatattgaactttgtaaaggataacgggttggaagtaatgactatcgaagaaatacgctctggaattgatacacgtggaactgaactcgagggaattgatcgtggtgttctcatgcgggctctgcggcagttggagcaaaagggaaaggcagctatcttcaaaggcacctctgctgatgacgaaggcgtaaagttttcggtgtaattcttttgcgatccttaaactggcagactaataatctcgttcagccggtgcccttgaacatggcatgagacacccatagcctcgatcattcagtgccctttgaaaatggcatgacacatccttgtaaaaagcagtagggctgatcacattcttcccgagtagtatcctcttcagtgctgcggtaaaatttcccaactcatcttttgttgtagtgaaaaatcggccaagcctgattaaacattgtggagtggttggtaagaagaagttgaactggtcatgcctcttacgctgattgattttccgatatctaagcaaaggtgttcatgaaatgtacgcgggattaattctgggtttattcgaaatgggcgtaagtttc

SEQ ID NO: 32343 - DNA, 1929 bp, Zea Mays
atgccccgccgcgcgctccgagctcaatcccccgcgcgtgaaaccccgagctcaatccgcccgccgacgtcgtcctcctcgacccgtaaggcttcctcgcccgctccgtccctgcccctgctacccgtttgcggaaatcctgagccgaccgactgcttgctttctctgactgagtgccgggtgcgcgtgtcattgagtgtctgtgcgtgcttccacgactcaggaaagtcccttcatacatgctatttaccctcttctgatgatgacaggaaagactacctggagatcccctgggctgagctgcgctccatggtcgaaccgtcctttgctgagagatcgttgatctaccacaaagattacctcagcgatgcgaccatcgtgacatcttctgcggtcaatatcactgaacacgttgtcctgactgttgacggccactctcttccatatgattatctcatcatagcgactggccatgctttggcttctcctgccagcagagctgaaaggataaatgaattccagagagataatgggaagatagagtcatcagaatctgtgctgataattgggggtggtccaactggtgttgaactggctggagagattgtggtagactacccagggaagagggtgacccttatccatagaggaccgcgtttactcgaattcattggagataaggcttcaaagaagtgccttgattggcttacttcgaagaaagtagacgtgctccttcagcaatcggttgacttgggctcattatcagacacagagaaggtgtacaagacatcagacggagaaacagtaacagctgattgccactttgtatgcattggaaagccactgagttcgtcgtggctacatgataccatcctaaaggaatccttggacagcaaggggagagtaatggtggaaaaggatttaagagtgaaaggttttaataacattttcgcgattggtgacatcacagatattcctactcctgcttctgcggcggaggccaagcaggagtcggtgttggagacggaggaaactaagcaggcggtggcagcagcagcagcagcggcaggaggtgtgcaggccatggcggtcaccgtagtgcgggacgttgagacgggtctggacacgagtaccaacgaccgggacggcgacaagccttcctggttcacacctaagagcaacactggtggtgccagtggtggcttctaccagcccttcaacagcaacttagctggtgcaggggctagcactggcatccaaaactttccaggtgtacggctgcgaggtctcccttttgattgcaatgacattgatatctgcaagttctttgtgggactggacatagtggactgcctcctggttaacaagaatggtcgcttcactggtgaggcttttgtggtcttcccaacagctatgcaaacagaatctggtctgcatcataacaggcagaacatgggccggaggtatgttgaggtgttcagatgtaagaagttggagtactaccgtgcaatagccaacgaggtgagccagggtggttactttgagtcggagtatcgccgctcctcacctcctctgaggccccctaagaagcctgctgaagacaagggcagcatggagtacactgaggtgctgaagctccatgggcttccctactctgcgaccactgaggacatcatcaagttcttcctggagtatgagctgacagaggagaatgtgcatattgcgatcagctcagatgggaaagctaccagtgaagcctttgttgagttcccaacagctgaagttgccaagacggcgatgtgcaaggataagatgactatcgggacgaggtatgtggagttgttcccgtctaccccagaggaggcgagcagggcgagaactcgaggcaagcattgaagaaacgaatggcttggctgaatgatctctggt

SEQ ID NO: 32344 - DNA, 718 bp, Zea Mays
gcgtattctagtatacaccaaaaaagagaaaaagaaaagcaccgaaaaactagcaaaccctacctcctctcctccccctcctcggcggcggaatgtccgaccgccgccgcgacaaggagaagccccgcgaccgcgacatcgaccgtcatcgcgaccgagaccgcgacatcgaccgtcatcgcgaccgagaccgcgaccgggaccgggacagggacagagatcgcgagcgagaccaccgccgcgagcgcgagcggaagcgctcccgctcccggtccccgtcggcggatcgggaccgctcccaccgccgccactctcattcgcaccgaggccgtccttccccctctcccgacgccggccgccacaagcgccgccgcgaggcgtcccctgcctccgcggaccatcaccataaggaggaaaagaaggctgccgactctcacgcgacacccggcggaggggacatcgcggccgcggccgctgcggtgggtgacggcgacgtgaatgcggaggaactggagatgatgaagatgatgggcattcccgtcggtttcgactccaccaaggggaagcacgtgcccgacgccgacgtcagcggggtgcgtgccgtcaccaagcgccagccgcgccagtacatgaaccgccgcggcggattcaaccgccctctgccgcctgagcgcaaccgctaaggatgggaaaaggcgtcttgcaacgttgatggaag

SEQ ID NO: 32345 - DNA, 956 bp, Zea Mays
tgtgtctgtgtcggctggctgaccagaacacttgagcagactagcaaggccttcagaccgggagggctccctgtcctgtcccccgcgccgccgcggatggccggagccaccacgccggcatcaggcgccctcgtcaggctctgcctgccttcgctcctcctctttctgtaccgatgtgaggctgttgagatggagagaacccttgcgatgatcaagcccgatggtttgtcaggtaagtacacagaagcaatcaaggaggtcatcttggattctggatttcatatcgtcaaagaaaccgaggtccagcttgatgctgagagggcatctgtcttctatgcggagcattcccagagaagcttctttgacagcctagtcaagtacataacaagtggtccagttcttgctatggttctggaaagacctgacgccgttgcgcaatggcgcactttgattggaccaactgatgcaaaaaaggccaaaacctctcatccaaacagcattagagcaatgtgtgggctggactctgagaaaaattgcgtgcatggttcggattcaccagaatctgcagacagagagatctcatttttcttcggagaagctgaatccgtaactgtggaacatgatgagctatagacgccacactggtatcaggcaagtcagcaaactgaattttgatgtgtctttgaactcttaggctatctcctgtagcttcttactcgtacccgtttcttattattttaaaagttattatgtaaacagtataatttatagtgcaaaacagtgtcttgcatggccatatgcttgtggcttcatatgcagagtttactgatctgctgtgcacattgtgattgctaagactaggatggctgagcagctgaggcctattggccattcatatgcttctgcttgctcaagtgtttactctcgaagtaattatgggcatgtttggttcaaac

SEQ ID NO: 32346 - DNA, 650 bp, Zea Mays
cataggcccagccgtgcgacggtcggtgcccagccccagcatcaggaccgtccgctccgccgccgtcgccttttcatgcctcgtgtcgtctgcgggtccggtcccggtggtctcggtccgaccccaacgaagggcgaggagagaggaagaggcgagatgccgcaccgagcgcggccgatgacggggctgctggtgttcatgggcgtcaacctcgcgctcttcaacaccatcactcccgtctacgacttcgtctgcttcctcccccactgggaacgaaggagagaacaccgccgaagggaacttgaaggtctgcaagcgaagggttctgtagaaactactaactgaactctctcctagaccattcttttttgccgctagttgtctcaagtatcaagatgttcgcaatagctactctttttttttatgtagagaaacatccccttgtaccttgtgatgatttgagatatgttttgaccatttctattttctcatttttattgataaattgacaccattgtgtgttctgtcatatggttaccttatcagttgatcttgttgcatgttgttccttcattcaaataatcaaatgtgtcatctgcttttgtgcaaggacaatgagagtaataaatgccaactgtagtcttatgaaa

SEQ ID NO: 32347 - DNA, 620 bp, Zea Mays
tccactttaaaacaagaaagaacgttacatcacgcacacacgcgcaccaaagccaagcgcccaagcccagcactcgacaccaccacagcgcgcagccacgctcacgcacaccgagctgcgggagtggagtagtggaccgatggggagcagcgggggcagcagcgagcacttcctgcggcagctgagttcgagcgacggcggcagcgcgccgcaccatctgctgcagcgagagtgggagtgcggcggcgtcaccggcagcggcagcaggcgcgggtcgcggaagaagaccagggcgcggggacaccgccgccgcggcggcgggttctgcagggcggaggaggctgcgccggggcggaagcgggtaatggtggtggtggaccagagctccggcgccaagcacgccatgttgtgggcgctcacccacgtggccaacaagggcgacttcctcaccctgctccacgtcctgccgccggagagcggccacagcagccgcggtgctgcggaggacgcctccgcgctcgccaactccctcggcgcgctttgcaaggcctgcaagcctgaggaattaaaccctgatctcccaaacaattgagaaaggacgtctcggcacaaagtttctg

SEQ ID NO: 32348 - DNA, 2971 bp, Zea Mays
ctaggtttggtcgggtttgaaaactcatggattcacgagtttaaatattataggaacaaatccgtacccataaatccatcggatatagatttactaatattaacaaatatacaaatacgaaaattaacctaaactcataacactaacgaaccatcgagtttcagataaccgttgccatctctaagggcatgtacaatgggtatcttaagttgtgtcttagagtgtgtctaggggggtgaatgtaaaaaaactcaagacatgtatcttgacgaagacacagtgtcttagctctatgttcgagacaggagactagctgattggtcactttaatttattgaatgctctgattggtacaatgaatatggtaagacacatgttttagacatgaccattgtattatgtcgtgttttagctgtgtcttgtacttagaggaccgtgcagcagtgtctaggttgtacatgccctaatgcggacgccgcttacgcttctgcacgtggaactgtggaaggctggaagccgctaggcgctagagtcagctcgttgaggcattcagtcaacacactgacttcgtccccgtcccgtcgtgcccgggcctctctctcacatccactgccccgacccgccgccgctcgattgcgacctgacggcggcaatgcacccccgcatcgcatcgggcgccaccggtaagtcgaccgcgccgtacggttcctgggagtcgccgatcagcgccgctgtcgtctccgccgccgggaggaccgccgaggggtttgcaatcgctggcgacggccggctcgtctgggtggagacgcgccccgaggatggagggcgcgcggtcctcgtgaaggaagcggcaggaccaggcggtaaggctcttgatgtgacgccgcagggtttcgcggtgcggtccctggcgcaggagtacggtggtggggcattcgccgtgcaaggggacaccgttgtgttctctaattacactgaccagcgtctgtacaggcagacaataggagataattcaccactaccactgacaccagattatggaccagtagtacgctatgctgatggtgtctttgatccccatttccatcgtttcgtaactataatggaagaccatcggcacaatagctcaaatcccatcactacaattgttgctgtaggaataagtgatccggatgtcaaagaatatactatgctggtcagtggcaatgacttttatgccttcccccgtattgatccaactaaaaaacgtatggcatggattgagtggagtaacccaaacatgtcctgggacaaatcgcagttgtgggttgggtatttcaatgagaaaggagagataaaagaaaagatctgtgttgctggtggagacccaacaatagtagaatctcctactgaacccaagtggtcttcaaaaggggagctgttcttcataaccgatcgaaggagtgggttttggaatatttataaatgggatgaacacagcagagcggtaacacctctgcattcacttgatgctgaattctccaagcccatgtggatttttggtgtcagctcctatggtttccttggaatagatgacacaagtcacaaaattgtttgctcttacaggcagaatggaaagtcatgttggagtgcttgatcaagattctgagtccttcctgaaaattgacattcccttctcttctgtaactaacatagtggtatctggagatagatccttctatattgagggtgcatctgctactcttccagtatcaatagcaaaggtgacacttgatgaaaagagaactatggcaactgatttctctattgtttggtcctcctctgaggatgttgcacaatatgaatcatacttcagcttgcctgaatttgtggagttcccaaatgtgatcaatggtcagcatgcatatgcttatttttatgctccgtataataatttttttcaaggttcatcagacgaaaagcctcccctactggtcagaactcatggtggacccacagatgaagcacgaggggttctggatcttagtgtgcagtactggacaagccgaggatgggcatttgttgatgttaactatgggggaagctcaggctatgggagagaatttcgagagaggcttttagcacaatggggtgttgttgatgtaaatgattgctgcagttgtgctgcattcttggtggaaactggaagagtggatgggcagcggctttgtgtaactggagaatctgctggtggattcacaactttagcctgccttgctttcagacagaccttcaaggctggttcgtctttatatgggatagctgacctagcgtccttgagggcaggaatgcacaagtttgaagcatactacattgataaccttgtgggtaataaacaagcttactttgagagatctcctataaacttcgttgaaaacttttcatgtccagtgattttgtttcaagggttggaagacacggttgtatcaccagatcaggcaacaaaaatatacaaagccataaaggacaagggccttcccgttgctttggttgagtacgaaggggaacaacatggcttccgcaaggctgagaacatcaaatttaccttggagcaggagatggtgttcttggcaagattagtgggagagttcaaggtgcctgatgacataactccaatcaagattgaaaacttcgattaggccttgtactcacgtttcaaacgtcaattacctgccatcaactgctgaagtgatcaacttggtgcacctgtgcggcagacttgccattcgcagctgttctttcaactgaactctagggctctaggctgttgttacgagcaataaattgaagcaaagcttatcaaaacacactagcttttccccgctgtcggtctgtttccaggttccactgtctgtggacgcggagatctcgttgacgcgcgaggagacaaatgggccatgatttaaggggtgtttccgtagttacgaaaatg

SEQ ID NO: 32349 - DNA, 2943 bp, Zea Mays
cctctctctcccctctcctcttctctcatctcccagcgggaaccgcggccggccccacgcgcgggcatgggcatgggcatgcatgccgtgcccgcacgcaagcactcacccacccactgcgggcgctcgtcgatcgccactttcggccccggctaaatcaggatatagaccagtgagggagcgacaagaggcggaggaagaggaggtggtgccggtggtcgtgctgctgctgctgctcgtggtggtggctgtgcaggtgcggagatcgtcgatcgatcgctgcggttcgtcggcggcggtgtcgagatgtcgatggacttcggtgccccggcggatgaccccaaggctttccgcaacatctgccgcgaccggatactgaaggacctgcttaagcctgacaaggataaggagaccaaaagctcatggaaggttcttataatggacaaattcacggtgaagatcatggcttatgcttgtaagatggcggaaattaccgatgcagggatttcgcttgtagaagatctgttcaagagaagggagccaatgccttcaatggatgcaatctactttcttcagccactgaaagaaaatgtcataatgcttctatctgacatgtctgggagatgcccactttacaggaaggcatacatcttcttcagctcaccgattcctaaagacttggttacttacataaagaatgacagtagtgtaataccacgcatcggtgcactaagagagatgaatttggaattcttcactattgacatgcagggctttgtaactgaccatgatactgccctgattgatttatacggtccaagtgaacaaaattccaaaaagttcaacgatactataagcacaatggctactcgcattgcgactacatttgcatcattgaaggaatttccatgtgtgcggtatcgggcgccaaaaggagatgcttccacaacaactaaattcgatatggttccaaagtggcttgctactgctgtttgggaaattgtgtcaaaatataaatcaactattcctgaatttccccagaaggagacatgtgaactgctaattgtcgacaggcccatagatcagatagcacctgttattcatgaatggacctatgatgcaatgtgccatgatctactcgaaatggatggcaacaaatacatttatgaggtatcaaagatgggttcggaacctgaaaagaaggaatctttattagaggatcatgatcctctttggcttgaacttcgccatgctcacatagctgatgctagtgagaggttgtacgaaaagatgaacaattttgttgccaagaataaagcagcacaactttcaagagatggtggtgaagtctcaacacgggatctgcagaaaatcgttcaagcattaccccaatacagtgatcaagttgagaaattgacgctacatatagagattgctggaaaaatgaacaggtgtatcagggagtatgggctccgtgatattgggcaattggagcaggatttggtttttggagatgcgggagcgaaggaagtcatcagtatcctcaggtcaaagcaggatatgagcccagaaaacaaaatgaggttgctgattatatatgcaattgtatatccagagaagtttgaaggtgacaaaggggaaaagttgatgcagttagcgaagcttccacatgatgatatggatataataaattgtttaggatacttggatggttcaaatacaaaaaaatcatcaaggacgggtactttctctctcaaatttgatgcccaaaagaagaaaaatgctgccagaacagacaaacaagatggtgaggaaacatgggctttatcacgttttttcccacttattgaggcaccggaccgtggcatcctccccctgcgcaagccctggctgtatgccttgagggtctcagggtctgctcagcttcaggatgaagcaatcctccccgttcaccttcctctcaccaatacaccgcgcacgaacaaacatgcttcccgccatcaacggatccaggccctagagggcacgtggaagcgggcgaacagggcccttgatagaatgggcaccgaaccatggtgtgtggcgtcacacgagcttgccgttgcaccctgcgtgcaccttgcttctgcgaacagctagcttgatgtaccacatctcaggggccatctgccgcagcacgaagcgaccaggctcgccgccgcgtccagtgtcgcggttcttggtgaggcggctgtcgggaggggaaaggatcaccttcttctcaccaatgcaccgcgcacgagcaaacatgcttgccaccatcaacggatccaggccctaaagggcacagtgaagcgggcgaactagggccactgggtgcgcgggctctgtccttggcgctcgcgcgcgcaacgacctcaggatgctcctcggcgtcatggtctgcgccaccgagccactaccacacctcaatgtcaaggacactcccatcgagacttcatcggtgcagtacatcctgcagcagtaccttgcggcctccggagggcacaagcttctggcctccctgcctagcacctacgccatgggcatggtggccaccgagttcgagaccgccgaccgcctcaccaagaacaacgctggacatggcggcgcctggccgtttcgtgctgtggcagatggcccctaagatgtggtacatcgagctagctgtctgcgggagcagggtgcaacagcaagctcgtgtggcgccacacaccatggctcggtgctcattctgccaagggccctgaccggcgcagacgtgtgctctactgtcagcctacctggtcaggcttctcgactatcggacgtgaaaagaagccagaaggcccacgaagctgttgtcccttttgtgtcgccctgccgaccgttgacgctcgaatgtcgacccctcccgaataacaggctactgctgcgtttctctcg

SEQ ID NO: 32350 - DNA, 1958 bp, Zea Mays
gacaataatgtccttattttggagctcgcgccgcccgccgcccgccgccgcgcccgaacgcagccatcgattccccatttctttcccgcctcctcactcccgcctcttctactcccaaaatcccaaaaccctagctcgctaacgaccccaggcagacgcgccgtcctcccctcccccatggcgctcaagcagaaggacaccgacgccgccgccaccgccaccggtaccaagaagcgccgccgcgtcttcttctccgacaccgatgctggtgttgaggcaaatgagtgtatgaaagtgtttctagtatggaatccaggcgagggagggaaaggaataacagatctaaagcctgttcttcagaacatttttggagaaaacttggtagaaaaagaggaattcctgcatacattttcgaaggaatgtgaatatatcagaactgcagtgacaaatggtagtgccattaagcatgatggctcatatgaatcagatcctgcagttgagattgttcgagttgaactccaaggtgctgctgcatttctttattctcgtctggtacctcttgttcttcttctggttgaaggttccacgcctatagatattggagaacatggatgggaaatgcttctggtagtaaagaaggcaacacaagaggctggttcaaaatttgaactgctaggttttgcagctgtgcataacttctatcattatcctgagagtattcgcttacgaatcagccagatacttgtgttgccaccttatcagggtgaaggccatggtcttggtcttcttgaagcaatcaattatattgcacagtctgagaacatttacgatgttacaatagaaagcccttctgattacctgcagtatgtgcgatcatccattgactgcctccgtttgctcatgtttgatccgatcaaacctgcactcggtgctattgtcttgtctctgaaggagaccaacctgtcaaaaagggcccaaagtttgagaatggttccaccagctgacctgatggagactgtccgtcagaagctgaagataaacaagaaacagttcctccggtgctgggaaattctgatcttcctaagcctcgactctcaggatcataagagcatggacaacttcagggcctgcatatatgaccgcatgaagggggagatccttggcagtgcctctggaactaacaggaagcgtctgttgcagatgccaaccagtttcaataaggaggcatcttttgctgtgtattggacacaggagattgaggatgaggatgaacaaactgttgagcagcagccagaggatctcaagacgcaggagcaacagctcaatgagctcgtggacatccaaatcgaggagattgctggggtcgccaagaacgtcacttcacgttgcaaggataagatgacagagctggtggttcaatgaatctggggctagttgatcgaggtcgggactcgatgtcaacgagagcatggttgaactcatggagttcggatagattcaaggatggaaagctccatgcttgatggcggcacattgaacctcaagggcgcgcagcatggcagccaggcgccagggcctttcggtgctttttcgttcttcaaatccataggctatataaaacataatactccctctatttataaatatatgacaccgttaattttttcaaaaagatttgatcactcaccttaattttaaaaaataatgagctatcatttatttgaattttatattttaaataaatattttgaataaaataaagtttttgaaaaaagtcaacggtgtcatatatttgttggaggtgtatatagtctattgttggaggtttagaggagatcgtcctccattgatggcgtttggttcagcaaacacggtggtaacgataacgtaaagaaaaaacaacgctatttgttacaatgtaatgattaaccgattttgtttggatgggtcaagtaacg

SEQ ID NO: 32351 - DNA, 1502 bp, Zea Mays
ctaaaagacacgtcagccccacacagaagccgacatgtcctgctcctctgaattctgatccgtgcggtgcggccgtgcgggtgtccgtctcctccattgcgaagccgcgagctcctgcgtcaaccagatcacacgaaccaaaccagcgcctcctcccccgagtctcaccgccagcgcccatggcgacacgctactggatcgtgtctgctgcctaactgctatctgtccagcccaggctgcccagctgatcggacgcctaaaaccaaccttttgtgttggctccgcgttcaggttcgtgtgggatgagggcaaataccccacaatgtctccgctcaaggagattgttggcagcatccagtcacaggttgccaagattgaggatgatatgaaggtgcgagcagcggaatataataatgtaaggagccagcttagtgcaatcaacagaaagcaaagtgggagcttagcggttcgtgatctttccaatctggtaaaaccggaggatatgatcacctcggaacatcttgtgacacttcttgcaatcgttcccaagtactcccaaaaagactggctgtcaagctatgagacacttgatacatttgtggtacctaggtcatctaaaaagctctatgaagacaacgaatatgctctctacactgtgacactatttgctaaggttgttgacaactttaaggtccgtgctcgcgagaagggttttcagatccgtgatttcgagtacagtcctgaagcacaggaaagccggatgcaggagatggagaagctactgcgagaccaagaagctatgaggaccactcttcttcagtggtgttatgccagctacagcgaggtattcagttcctggatgcacttttgtgctgtgcgtgtctttgtggagagcattcttagatatggtctgccgccatcattcctgtctgctgttcttgcaccatctacaaagagcgagaagaaagtaaggagcatcttagacgagctctctggcgatgcccatagcctgtattggaaatccgaagacgatgtaggcgttgctggtctgggaggcgaaaccgaggcgcacccttacgtctccttcaccataaattttgtctgagacaaagtatggttcctagaccgtctgtggcctaggcaatataatacttggaagcagctattggaacgcaagcgcggaacgagcatgtatattactctgttgatttatcggttcatgtggtcctgtagttcatatcacagagagatcagccgacggatgctgtaatttctgaggaacctatggaattcctgtagttcatgtggtcctgtaatttctgaggactacctacctatttccctgcagcactgcaccttgtaaaaagacttaacccgtgtctgtagcagctggctactggatttattacatctacaataaaagtcatttttaatggttgtttcataagagttttcagcaatttgaacgatgcggcaagtaactaacaaagaaagagatgaaa

SEQ ID NO: 32352 - DNA, 2510 bp, Zea Mays
cccactaatcagatccccgcaggctggttcactgagccggcttccgagcggcccatgggcttgcccaggaccggctcttccagtcgcctcaacgcgcaggcgccggagttcgtgccgcggggcccgccaccaccgacgccgccccggccgtttgagtactatgcgcctatggtgaacgcagcggatttgctgccaaggagcaacaggcgcgggagccggaagcggagatgctcccgcccgccgcggtgaagacggagctggtgtatctgggcaatttggtcggttggcacggggtatgcatcaataggcaccgtcatcgcagtaggacgcgtgcgtgatcaagcctggatgggacggttttgacacagcacgtcctgtgtgcgaggatctcgaactgggtcagttcgtggtgatgttcttctaggattctttcgtcatttcttttactgcatcgttgaaactgatccagggtagtgcggcggtgttgggggttgcggcgggcctcgccctcatcgtcggcttcgtccgctgcgatacctgtgaagttaacaatctacgctattatcgatagcaatccagcgctgaagtcaagaagttacctgggcaaaaacagtatacccgattctaggtgagaagctcaaagaaggggaagacatctacatctatcaggggtgacaaatccttttgctatgaagatgaccacagggttcttgtttgcgagttcatcctctagaatgtattgggttgtcgccacgaaaaaacacacgaatacataaattcaaataatttctggtgctgtggagtattcataattgtgtgcttttgttgaatccttcatgtaccataattcttactgctttcaagcccttttagaatatgactttaggatgtagaaattggtgaaaggagacaagaaattattctctaaactactattttttataggcaagggaggctggaagcaccttttttgcatgggagctgcatggagagaaattattggcagaaaacaaacttagaccagattcttgaatgtgccaagggaataagcttcgcttgctgcaattcatgtgctgcttggcgccacaaaaggagtagaggtgtgatttgcttgctttgcagggagcggggtcatagtctgaagaactgtcctgacaaaagcgagggaaatttgaagaaattttgctagaactgtggtgaatctggacactgtctttccaagtgccccaagctcattgagaatgggttacaaattttgcaagctgctttatctgcaatcagcaaggacatttgagcaagaactgccctgaaaacaaacatgacatcccatccaaagctccatcttggcgccaacagtggttcacataggtttgctcttgagaattaagttgttaatgaagctactttccgttgccctgatgagctaggatggaaaccacagaggacacctatcatatcatcagatggaagcatcttacacgcaagacagcaagctttctggtatggagctgaatggtactctggattatcaattgttaagtctacaggctctgaaaacaatggacttaagcaacaaccacttgcatgattcaatcccttaccagttgccatcaaaccttacctatctgtaatgtctcccaacctgtacatattattgatgctattcgatttttgaaatttgattcaaagcgaatacaggaatctggcaaaaaataacttctctgttaaaacaatctaactgcaaggaaccattgggtgcagcaatctcagccacaactcgttatttcagaaaattggtgaattttctttcagaattgtatattgtgtaaggcctactgtatatttcagaaaattggaagcctcaattcactttcagaactagacgtatctttcaacaacctcacgggaatcttcctttctcaatgggcgctctgtcgaagctttctaccctgtaagtattcatggttctgatagctctcttcttgactggtatgcagttatatgcaaaacaatcaactatcaggcacatttgatgtccttagcaacattagccttgcgacacttagatgccagcagatcatgaagcgcccaaatggtgctgagctacagtactatcagaagctgaatagattgctgctggaattagagcaaaggagtggaggagtttctgaagagagcagacctgcaaaataaccgtcgtcatgtcagtgacatggccgctcaacttcttcctcttactgcattgtatctgaactgcgtcgacctaccaactacatcactgcaccgactgctatactgcatcaaccaaccgaacggctatatgaaacgacacaatgtcagccgtcagatatgaatattaacttcataaaagtaattgtaacttgtgtaggctggttatagcttgtgatttcacatttcatttgttagcggccaagatttatttctgttagtttatgaccaccactcaggaaagttgattgattctccattccaatctttgttagacctgc

SEQ ID NO: 32353 - DNA, 1333 bp, Zea Mays
gcgagtggcggggagaggaggcggcggcggcaagggcgcgacgggggaggatgatgtcgctgcagcctgcaggagttgtgttctctggccttgagagaaaggagtcgccaattttagtgggctcctgttgtgtttttcggtccattcctcccaaggcccagcatctgccagtcgcatgccgtgacgcacaaaacccacggcggcacggctccattccgcgtccgcactctctatataaagtgtccctctcttccctccaagccctagacgcaccccttcctcgtttcgccgcctccgccgacaccgactgcctacctcagctgccgtcgccatgggcagaaggcctgctagatgctatcgccagatcaagaacaagccgtaccctaagtccaggtactgccgtggtgtccctgaccccaagatcaggatctacgatgtcgggatgaagaggaagggtgttgatgagttcccctactgtgtgcaccttgtctcttgggagaaggagaatgtctccagtgaggcgctcgaggctgcccgcattgcctgcaacaagtacatgaccaagtctgcaggaaaggatgccttccaccttagggtccgggttcacccgttccatgtcctccgtatcaacaagatgctttcctgtgccggggctgataggctccagactggaatgaggggtgcctttggcaagcctcagggcacctgtgctagggtggacattggtcaggtcctcctttccgtgcgatgcaaggacaacaatgctgcccatgccagcgaagctctgcgtcgcgctaagttcaagttccctggccgccaaaagatcattgagagcagaaagtggggcttcaccaagttcagccgcgctgactacctgaagtacaagagcgagggcagaattgttcctgatggtgtcaacgcaaagctgctcggcaaccacggcagacttgagaagcgtgctcctgggaaggctttcctcgatgccgttgcttaacagcgtgaaactggacttcagagagaatattgggacgagagtgcgcggcggagttgtacattttttttgtttttcttctaaaataggatttaggattaggtgttttggatttgttggagttgctctcaggtttaattatttttaatccctaaaataccaaacggatgactaaaataggtattctaaataggatttctagtgactagggtttaggagggtaactaatgggatgtttggtttgaggaatgatctagtctattatcttctcactcaatatttttgtttggtttgtggaatagaatgggttgatccatcaccgtctcattctgtatagttatt

SEQ ID NO: 32354 - DNA, 273 bp, Zea Mays
agccccctcacattccatgacagaatacaacagttggcattcattaatcaaaagaagttcctctactaatccagaaagtgccacacatgaggaacacagctgaagaaacaggactcgaccagccaaccagcgtcaacagcatgcttccagtcggggacatcatgcgactcacaaccagaattatgacagaccgaaccacagacagagcaagccacaagaaaaaacaccactgcctcgcccacaacctactacccaaaacagtcatcaaaagca

SEQ ID NO: 32355 - DNA, 5558 bp, Zea Mays
aagaaaacacaaacaccttagaatcggcgattcagtcccccttgagtccccgactccccactcctgtctcgactctttacctaagcttctgctcggccccatccccgtgcgtctcctcccggctttcgtctcgctctgagctcgcctctaccatggcgactagggtttagtagcgccgcagcctccatcactgccatcctcaactccgtaccggatccggaagaggcgtcggttcgtcctcaacgtcgccaacctccgctccccgtcgtcctcaccccctctatctcgtcaaggcttgatatttaacgggctctgggcagagtttaacaagtttcagcaatggggtttgataatgaatgtatcttgaatattcaatcccttcctggtgaatatttctgccctgtttgccggacacttgtgtatcccaatgaggccctacaaactcaatgcacacatctctactgcaaatcctgcttggcatatgtagtggcaaccacacaagcttgtccttatgatggataccttgtaacagaagctgattcgaagcctcttatggaatcaaataaaactcttgctgagactattggcaaagttgcggtctattgcctgtataataagagtggctgccaatggcatggagagctatccgcctgtaccacacatggtactacttgtgcatatgggaactctcctgttgtttgcaatcgttgtgggacacaaattgtgcatcgtcaagtacaagaacatgctcaactctgccatggcttacaatctcaaacccaacaagctgatggtagtcaggtgcagctagcggcggcaacaactcagccagtcacccaagacccatcacttgcttcagctggatctgctgcacctgcagttacaaccctaccaaagccatctttaactacagccacagctgtaacaagttctgcaacagcaacaggaggggcagctggtgcaaccacagcagcagtgccttcttcagccgcatctatttctgcttcccaaactccaacagctgagcaatggtaccagcagcagcagcagctccaatactcacaatattatcagcagcagcatcctggatccaacccttacatgcagcaatatcaacagtataaccaataccagcaggcgtatcagcattacatgcaaccttcaatgcaagtaccatcccaaaatgtggtgcaaggatctgcacaacctgcttcttatgttcagcctcaagtgcaatcctcccaactgatgatgcaagctcaaagtcaaccccaggtccatccattgacaagtcaaccgcagcttcagcagcatccagttcaacctcatccccaaagtcaccctcatctttcccatgttcaactacctgcagatcagtcacagcttcatcaatcaattcagtcagcccaagttccacagttccaaccaagtcatgttcctctccaaccatctggtctccaagtacaacctgcagcacatccatctgctcttactcaagttggtaaccagcaagttgctactcaagcaacggctcatcaggtgcagccacatgtacgagttcaacctccgcagcagcaacatattgttgcacagcaacaacatccacatctgcaagctttacctccacatcaaaatattcaacctcagatgcagttaaactctcaagttcagctgcagcctccacatgcccagcagcaagcttacccacaaccacaggcctatcctcaacaaacacatcatatgcacccccagaatgcttcatatacacagcagcaaacacaaggtgctcttttgcaacctgtacctgtgtcccatcaacaagcacatgtttctcatcatcctgcaccaatgcgtcctccgttgccaagtcaacagccagctttgcagccttttcagggaattcaacgtacaacacaacatggaaaacatattggatttcatgctcagtggccaccaatgggttccaacatttcttcccaggcaccaccacagggattccctgcaaactcatctgtttcttcacaatcagttcaaccataccagcaaggaatgtcttcatcacaacaggtgcattcccaacctggtcagccttatacacagcatcatgttactggcaatactggacatgttcaaacttcagctggcagatctatgactcatcttgcaccaacacagcagtttcagcaccaacaatcagcagtgcttagaactgagtcacctgctgctgcgcaccctattgggcagggttctttagatcttgaaaaacatacttcaaaatcagggaagtcagaaaatgcaattaatgctgctgtcagtgaaaataaaattagcggtgctgactcagctgccatgagacctacaaagcctcaatcaggtgaggaaaacatgaacagtgaacaaaatggttttgttggtgttagaaaagatgcagtgcaaactggcattgtatcacacggtttagatggttcaattaggagggatgggaatactgaccaggcaggtaattcacatggtctagttgtgcagggaggcaaagaccataaggcttcagatgttactaatcgtgagaaagaacaatcatttcagcaggcatcactgcaaaatgcaggggcactgggctcttatgtgcccccaggtgtggtaccacaacatccatctggaccagataaaatgcttcctcagcatattatgaatcctggtcataagcatggttcctctgaaaatatccgtcctccgttgcaacaaccatatggtttgtttcattctggaaagatatcaaggccatttggagagaaccagattcagatgcctatgtcacagcctgggggtatcagacctggtgatggtatgatccgacctcctgtggttggcccattacctggacatcatggtgcagtgttgtctccttttgatcttgaacatttgggccagccacattctctcggaatgttgaacagcaatgactttggtggtgaggggttcaatacttcaaggggtgctgcatatcccggaagacatgataatatcgaagacgatcggaaacattttccagcaccagcccttctggatggtcaaggcttgcaaagggaccctagacattttgagagagctttagttagacctgatggtttccttgattcagtacctggaaggcctccttttccaaaccatagaagtgtaggtttgcatgagggttttccaagaaaacaaaacacaactgccagtcaccctgacgtcctgtcacatggagcagaatttgatcatcacagggctattggaatgcctaatttcagaaatccaggcccatttgctcaagggacaagtggtggtcctggtgcgccccctaaaaaccagcttggctctggtaaccttcctggaaacatacaacatgcttttgcaggcccagacatccctccagctccttttaaccttggtgacatgcatccaggtgaccctcatcttgttgctgactattctcagcatggatttcctaaaactgcagcacactttggtttgggtggattctcgagaaatgggaattctggttggtgccgaatatgcatgtttaactgtgggaccgcagagaatctggatctgcatgtacaaacaagggaacatcagcaatgtgcaatggacattatcctgaaaatgaagcaagatgttgcaaagaggaaaaaactgaattatggaggccccaagtcggtcaacaacaaaaaggtttctgggaagggccattttcgtgggaataggcgctagtgttacctgattcagcttgatgtgaatttgaaggttgctactggtgcttttggacgtttcataggcaattgagagttgagatctcttcagacatcatgttcacgcggttcagagtatttgaagtggaacttgtaatgttcccaaacttttgttgccatgttgatctgcagagttcacatggctatgtttactttacgtatttttgctgaagttctgggattgcttaacatgctagtacccttcttctgtatgcgatgatttatgactactgtttgtttcaactaggctcatgctttgtctaatgcgacctaataatagaccacactgaaacttttacaaagagacatgtaattgtgtcatcagacatccagaacatggtaattttttgttggaatcttttggtaaggggctgatgggaacatgtaaaaggtactttcagtgcctgaaaattatgctagtttttcatagtttaattcaaaaaaaaaaatctaagggtgtggtgtctaaatagagttcctttacaccactaagcccaatttgcttaatgatatattttaaaattattgaatgctgattccatgatatgttcccattcaaaacaagggaggacaaaagtgctgcattctggaataaacacatgggctagagttgttgacatatcattgcatgacaacaacaaagccatccaaatcaacaaaaataatctcattaaagtggtgcctattttgtgcctgagggatccattagtgttaaagggaggtttggaagcctggaaggaaacacaaaagtatgaagaggtttgaattgggacatgtactttgaatgttagcatgagatgggagggaattgatggtaaaccttgtttggaaccaaagtatgtaggttgtgctcaaatatagaagaaaaagaaagatatcttgattttcatatgaatactagtacgtgcatcatgtatgcagagctttttgatactgatactggagttttattattcacttctagttagttagttagttattcgaggtagtgatggttttattatcatgggtttgatgttcagaataggacatcattgaaccctacaagcactaaatgttgtgggtaaaatacctaagtttctaattcactgctgctgggcagatggcttgttcagttatgtttgatatgatttttcgcatgtgatatattttgctgatggtggtgtttctctagatgtctgttttaaatcatctgtatttgctgtttgtttgctaagcagaaactggaaagtgtaggataatttccagcagagggctcctgtcatacttgcttgtttccctaacgatggtaaggatgacatgctttgatatgctgatggtggatgtgcctgggtgccgactactgtttgaacgaactgatcgtgccttgctcattttctaccggcatcggatgtttttgaccgactccagggcacctcatatctaccgttgctgaggtttaaattgtaaaattcccgtcctgtagttctttaattacaactaatgcaccaggcgaacgaaaattcttgtaatgtattcacaaatatttctagagaagtttgcagtgtaaatataacaatgttcgtttcaatggagtgcacctactaattaatgtaccttttaaagtctatttaatataggagtgttagtgtaagaaaccgattttccattcagtggtgtatgactaattaacctacctcccggtgtatgtaaattattgtaatatatttttaagggcactgatgaagttccttgtgtttaaacatttctatatgaaaaattcta

SEQ ID NO: 32356 - DNA, 1429 bp, Zea Mays
ccgcaccatcgccctgagtaccaccgcacacgccgccggggccgcatctctccccgtcagggcccagccgaacactgtcgtcgcctccacctccgcgtttgggccaccgcaagagttcagggctcctctagggttcgagatcaaatccggccagtagagcagcatcctcagcaccacgctcaccatccccctctacctcggcaccggcgtcttcaccctcgggtacacaccacgccttttctcaccatctgagcattgccaaggagctcctctccatccccgatggcaccacttcagattcctgatcagcaggagagtcgttgaggctgagacgacggcacgaatgcggcaaggagcttcagattcactgccattagaaacttgcagtgacaggtaagaaatactgtggtggtttggacctcagttattggccagatgaagggcggaggccattatcagatcctcgtccacctttgggctactgctgataagaggacgagtgtcgtacacctctccaattccccccttcaatgtggtcagtgctgaatcatctacgtcatacagtgaacaagggcatactgatgagagaagggatgacatggatttttctcattcgagcatcaggttttgtgcgctgattatggtgtggtcgttggtgagactgcaacgccctctgtaatcatctctctgacaagttagattatgtgctgaaatttctgttatttttgttggattgtattgttgtgaaagggggcatagtacgatgaattggggactgaaagagcatagcagagcagagggcctatgtaatataattttttatgtataaattgtgcaaaaacaaattacctcttttgggtttcaatcatttgacaacccttggaccctgacattatattagtttacttaccttgaccttgtgatgagttttggaatatttggaggaggttcacatggaccgaacagcctgtttagtagctttgcttcagcacagtaaactatatttagaacatttggatggtaaactattccaatcgttgttgttacatggtatcagaggatttggcagtcaagtcaatgcctcaattgtgagatatagaaatcgatgataatatatgtcagctccggcgaacgagaaggcgtaccgcagggccatgaagtgcgcctgcctagccgctgcggccgttctccacgaggtccggtcactgagcgtttaccattttatggcccactatctccctccttgtcatggcttggtatggcgtggcgcctggattttagccgctgatcggaattgtcgagtgcgtagggtacaattgggatcgggagattggggcacactgtccatttgcgtcagtgagacgtggtgcattataaactgagccgaccatggcctacttgttttcagtcctataaatttggggtttct

SEQ ID NO: 32357 - DNA, 2218 bp, Zea Mays
tcttcttacacaactttttttgctgctacgggggagagatatactaggatgaaacacctatttttatgtgtttatttatacaactagatgtatccttaaatgtgcaatggaccatctagagtcgtaggaaatgtgttttaacgtaaaccaaaattattttttttcacatggacagctctcaacgtgtgtgatgtgcaatttgtccgcagtgatttggtggttcgatattgtaaaatgttggatgggttatggtgtccttcagcactgtacaaagaagatcagtgatgggggttttatagtcatagactcataggtagtacttgcttgcccgttacatccttgtgatgcctcaaccgaactttctcgggctggctgcatagcttcttacacagctttattgttgctccacagctgcggggatgaggaacatactaggataaaaataactattattagtgagggagggatgtctctggatcatgatgtgtatgcaggctaggggcacatgggtttccagacaaatcaagatcacagggtggaccagaatctaagaaggacctgattatacatagggatgggaatagtcaaaatattgcagcacatactttcacttttcgtgaacttgctgcagccactaagaatttcaggcaagattgccttttaggggagggaggttttggtcgtgtatataaaggacgcttggagaatggacagatctgccaccagataaagaacctctagactggaacacacggatgaagatagctgcaggtgcagctaagggcttagagtaccttcacgacaagacgagtcctcctgttatttaccgggattttaagtcgtcaaacattcttcttggagaaggatttcatccgaagctatcagactttggccttgcaaaacttggcccggttggtgacaagacccatgtttcaacacgtgtgatgggtacatatggctactgtgccccagaatatgcaatgactgggcagctcacagttaaatccgatgtgtatagctttggagtcgtgttccttgaacttatcacagggcgcaaagcaattgacaacaccaagacccaaggggagcaaaacctagtggcatgggctcgtccactgttcaaggaccgcaggaaattccctaaaatggctgatccaatgcttcagggccgcttccctatgaggggtctatatcaggccttagctgttgctgccatgtgcttgcaagagcaagctgctacacgccctcacatcggggatgttgtcactgctctctcatatctcgcttctcaggcttatgacccaaacgcccctgttcaacacagccggagcaacgcatctacccccaggtccagaaaccctgctgcatggaacggtgatcagcgcagtgtgcgctcgcctaatcatcaccattctccagacccgcggcggagggaccctgccagggcatccaagtatggagcagaggttagcaggactagctctgccagcgattctggccggcggtcaggtctggatgacatggacccgaccgggtcgcaagtgggaagcccagctcaaaccggaagaagaagagaagctccaagggccaccgacagacagcgcgctgtcggagaggccaggatgtggggggagaactcaagggagcgaacgaatggccatggtagcttcgacagcacgcatgagtgaagccgtcaggttccactccaggcatcatttcagacgaacgatgggtttgagcccactcatcggcaccggtcggatctgatcttgggacatggcgtggtgccgcccggtccgggtgtctgtgaataaggctctctctcttgccctcatgtggcgaatgcaattctcctcatgtccatcccttccgaaggcgatgcttccggcgacggggagcctgaggagcctcctgtaggattcagtcagaggtagacaggtcagtgaagaaaaaggatgcgcggagtcacattggcgagtgtgtgtttttggtggctagagctgagtattttcagctgcatgtatccttttttgtgtatgggtaagagcaaccgtgtcaggtttggctacctgagagacctttgaagctagccagctgctgttgctgctgcttctgcttcttcctccccccttttgggagttcagagctggaatgtaggtaggataggcgatgatgttgagtacagcaactgttttacacccttccatgttgaacagta

SEQ ID NO: 32358 - DNA, 1029 bp, Zea Mays
aggatgacaaaaatttcccactccactcgaattaaaaccctagcggcaaaaccttcgctctgcgccgccgtcgcctgctcccgtcccgccaccacatccacccaggaactcgccgtcggggaggctgctcgaggagccgcgctgtctctcccgtgccgcgaccttcgccctcgccgccgccatgatctgcgcgatctccagcgaggtgccggacgagccggtggtgtcgaagaagtcggggcttctcttcgagcggcggctcatcgagcgctacattgagtatacctatagggctaggggaacaggcaggcaacagcaacagagaagggagcattcagtggagggtggttccagcataaatctaacagtgtttattcaccttgtagtagtactgtttattgtttcgcttgcatttattccagcgcgtcaagctgagtattccctgcaatagacaaattacttccccatttcaaaggtcactcaaaaacaagaagtggagtacttcgtcagcaaacaagattttgatcagcagtttccacagggtagtcagtctagagagaatcttgaacgacatgttctgatggactataagagtatgcttggaagatatttccatgtggaactccaacgtcgtcaatgggccaaggactaccctacacctcgctgtgacaagctaagggagctgtctgtggcgcagaatgtgcatatgccatcagtttgatctcctgttttcatcatggaagaatatctctcatatttgcaggacagcaccgtaacctgggactgtgacaaccttctgcactattgaccactgcaactaccgctgctaggagggccaaaccacctcaagtgccacaggctgatgcccttccacttctttttgggttgctagtgaggttttcttgctattttgttctgatttgtaaatccaagcaagaaatattttcaagtttcttcttagcctaaatatagccaggacttgtacaaaaggtgactatcggttgtttttagtataatgtttcaattctt

SEQ ID NO: 32359 - DNA, 139 bp, Zea Mays
ggacgcagcccgggtgaaaatacatttatgcccttaacactcatctatgaacataatatgaaatattagggattaagtagcctttgtcccttctcgtccatcatcgtacttggtcttcgtcatcacttcaagccgaagc

SEQ ID NO: 32360 - DNA, 1367 bp, Zea Mays
ggacgcatgtgaccgtggaattccattcctcgtgcgcgattaggttgagacgtcgtgatcctcgtgcgcccgccgtacaaacccgtgatcctaattgtgctgatggatcgattggaaatgcaggacgactcgaagagatccaataggcccaaatattctaagtttacgcagcaagagcttccagcatgcaagccactgctaactccagcaattgtcatttccgccttcttactggttggcatcctattcgtcccaattggtctcgcatcgctttctgcgtcacaagagattgtggagctggtagatagatacgatacaagttgtgtgcccgtggctgacaaagttgggttcattcagaacactaaaacggacaaatcatgcacaagaactctaactatccctaagcatatgaagagcccaattcaaatatattaccagatcggtgacttctatcaaaaccatcgacggtatgtgaaaagtcgcagtgataaacaattgcgatataaagatgctgcacacttgacaaaagattgtgagcctgaagtttatagtgctggcggtgccccaatcgttccatgtggcctcgttgcttggagtttgttcaatgatacatatacaatttcggtcaacaagaaagctattgtagtgaataaaaaggatatagcctggcagagtgacaagaagaaaaaatttggcagtgatgtttatcccagtaactttcagaacggaaatcttataggtggcgctaagctaaatgagagcataccgctaagtgagcaagaagatctcattgtttggatgagaactgctgccctcccaactttcagaaagctttatggaagaattgagacagatattatggaaaatgatgaactcacagtggttatacagaacaactataacacatacagttttggagggtcaaaagcactggtcctctcaactacatcttggattggaggcaaaaataatttcattggtttcgcatatctgattgttggtggtttttgccttttccttgcactggtttttgtagttctctacatgattaagccaaggactcttggagacacctctttcttgtcatggaataggggtaccatggactatccaagctaatacatcgaaacattctctttataaaaatagtgggattataggatccatgggtgtggatatgctcctagtgcacatttcaggaccaatctctgtgaccccttcatcctgtgttattatagttccactgatcaacaaccttgttctggagaaatcataaatcaattaaatgaaaggaaagaggtagcgaaatgaaaacacaggtcatgcctttgcaagattcctgaagtaaattgttatgtagttccccg

SEQ ID NO: 32361 - DNA, 7520 bp, Zea Mays
ttcctcctcctccctcctctctttctctcaccaagtcgttcgtcacgcagaggaccggacgctcgtgagaggcgagacgagcaatcgaaagccggaaggaagcctaacctctcttccaaagccaaaccgaaaagggaaaaaaagtattgtcgaagagaaaaggaaaaaaataataaaggaacacaagcagcccaccggcgcatcacaggggaagcaaacaggggagaaccctagtcaacagacgccgccgccctccctggctggatctggccgccgtctcctccgccgcccgacgatcgcctgatgcttgtcccgacagaaaggcaacaataacttccctccattgggtgccttaatattcccggaaattgctactggttccactagttgaaagattcaatctatatgcatctacacatgacatgggttctcgaggaaggatgttatttgaccttaacgaactcccagcagaagttgaagaagcagcagctgctgtcgtgccaaaagaatctgctgctgttgtgccaaaagaatctgctgctgtcgtaccacaagaagctgttgttgtggcgttacaagaagctgctgttgtcgtgtcacaacctcagaaatcccttcgtgttccgacgacatatgccccaaccttgtttcagcgaggggaaggatcacagtcgcaggggatattgaacaataatgcctttaagcatgcatccattggttctggatttcagccttttgtgaggaacagcaaagattcaaacaatacaaaggagccgatgaaggtggaagataatcataattctagtatagcatcactgtccatggtaaacaatcagatcaccgacagtgctgcttcaaaggttgagacttgcaataaggtgtcacaagccattgaaagagaagaaggagaatggtctgatgcagatggcatttctgaaaatgcagggagtagcaacaaagatgagttcactggtaccgcaagcactaatttgaagaaagaatcccaagagagcgagccccatcttattaaatctggtgatgtgactaaagatgatactgctgcggaatgtagtgatgctgaaaaggttgatgcatctgaagatcgggttcacgggtccacaggatcagataacatgcaaaattctgaatgtaaaggaaatcagcctggtgatgatctagatctttgcaacaggtcaagggatgttaaaggagtcgaagccaattatgctttgaggtttgcgagcaaccccgcaaagaggcccaagttaaatgaacacaaagaggccatgttaggcaaaaaacgagctaggcaaactgtcttcatcaatgtagaggatgcgaaacaagctggtacaatgaagacatcaacacccaggaggcagtcatcttttccagcaccgattgttacacgtacagtgaaggaagcttctcgtggtgctggtgaaaaggctgcagaaaaacaaagtcagcaagcaatcagggatcagagacaacctgaaatgatgggatcagagcgaagcaattctgcagatcctagtgaccaatacactgaatccaatggtgatgctgagttgggtacccagggccggtcaaagaaaatgaatgcagaagatccagcctcagatgggtatcagcagcctgtccaaagacaagcttcattcaagcaatccatggacttgaagcaaccaaaaagccgatcattctcttcccaaagaacatttctaacaggaacaaacaatgctgatcagaagccagccagcaaaaggtctattatttccaaaaagcaaacttttgtaaacaatgtacaggattcatctgttgagcgacttataagggaggtgacaaacgataagttctggcacaatccagaggaggcagaacttgagtgtgttcctggaagctttgaatctgctgaggagtacattagagtttttgagcctttgctttttgaggaatgcagagctcagctttatagttcgtatgaggagagtcttgaggctgtgggaagggatgcacatgtagcggtccgagtaaaaactgtcgatagacgtgaaagaggatggtacgatgttgtcgttctaccgatccatgaacaaaaatggaatttcaaagaaggcgatgttgctattctatcgtttccacggcctggttcagctgcacaatcaggccgatctagtaggagagctatgggttcaaatgaggatgctgtatcagaatgtggccggcttgttggtactgttaggcgccacatgcctattgatacacgtgatcctattggagctattatccatttttatcttggtgattcatttgattctaacagtgaggctaatgttctgaataaactccaacctcggagtacctggtatctaactggacttggttctcttgcaacaacacaacgagaatatgttgctttacacgctttccgccgtcttagtgtgcagatgcaaaatgcaatacttcaaccaagtccagagcatttcccgaagtatcaagagcaaccaccagtcatgccagactgcttcaccccaaatttcgctgaccatctccatcgtagcttcaatggtcctcaattgtcggcaattcattgggctgcaacacatacagctgctggcacaaacaatggtgtcctaaagaaacaagaaccatggcctttcacgttggtacaaggtcctcctgggacagggaaaactcatactgtgtgggggatgctaaatgttatccatcttgttcagtatcaacattactatgctgctttgcttaagaagcttgctcctgaaagttacaagcaagttagtggtagcactagtaccagctcagagactgttgcagcagggtcaattgatgaactattgcagagcatggaccagaatctatttcgcactcttcccaagctttgccctaagcctcggatgcttgtatgtgccccatcaaatgctgcaacagatgagcttcttgctcgtgttcttgaccgtggttttatagatggtgaaatgaaggtataccgccctgatgttgctcgtgttggagttgattcacagtctcgagctgcacaggctgtttcagttgaaagaaggacagatcagcttttaatgaagggccgtgaagaagtaattgggtggctacatcagctaaaagcccgtgagcagcagctatcacaggagattgcctatcttcaaagggaactcaatatagttgcagcggctggtagatcccagggttcagtaggggtagatcctgatgttcttgctcaaagggatcgtaaccgtgatattctgcttcagaaacttgctgcgtcagttgaaagcagggataaagtattggtggagatgtcacggctgctgatattagaaagcaggttcggtcttggcagcaacttcaatatggaagatgctagggctagtctggaagccagttttgccaatgaagctgagattgtttttacaactgtgtcaagtagcgggcgtaagttattttcccgcctgactcatggctttgatatggttgttattgatgaggctgctcaggctagcgaagtaggagtccttcctccattggctcttggtgcagctagatgtgtcctggttggtgatccacagcaactccctgctactgttattagcaaagcagctggaactttgctttacagtaggagtctattcgagaggtttcagcaggctggttgtcctaccattttattgtcagtgcaatacaggatgcatccccagatccgtgaatttccatcaaaatacttttatcaaggccgtcttacagatagtgagagtgttgttaaattacctgatgaagcctattacagagatgcacttatggcaccttatatcttctacgacttgtcacatggccgtgagtctcataggggtgggtcatcttcatatcagaatattcatgaagcgcagtttgcattgcgtttgtatgagcaccttcagaagttcttgaaagctaacggtgccaagaaggtttctgttggtataatcacaccatataagttgcagttgaagtgccttcagcgggaatttaaggatgttatgaatactgaggaagggaaggatatctacataaatacagttgatgctttccaaggacaggagcgtgacataattattatgtcatgtgtccgtgcatcaaaccatggtgtgggtttcgttgctgatatacggcgtatgaatgtagctctaactagagctaggagagctttatgggttgttggtaatgctaatgctctcatgcagtctgaggactgggcatcgctaatagcggatgcgaaggccaggaaatgttttatggacctggattgcattcccaaggacttcttaccaatgaaggttccatctaatactccaggtaggaattcttccaacaacatccggaacatgaggactggtggtggacctagaccaagacacttggacatgttctcagaaccgagaactggtatgaacatgaggcccgatgaagatgagcgtctgaattctgttccaagaaatggtagttacaggaatttggatgattttgtccgacctggtgatcgtcccagggataatctgcagtttggagttcccaggaggccaaattcttctaatggcaggagagaagtgtaaggagtgtgttgctatctacaactctggtacagcatggaacaatggtgaagagctctgggacggtccagattcagcaaggtgcagattcatgttcagaagattagttgcctctgcattagatcccttgcaccatgtggtggggctggtcacaagaaagcattgctatcagcagaggatgtgcgaatctaccatgatgtgacctccagtcagtggatcaagacgctttcatggtgggtgattataggctcatgatgtcaggttgaagaaaggctgctgtagccctcagtgttatggagttcgcaggagtttctttctcagaacaaggctgtctgatgtgttttgacattgctatccttgctttagccagctccatctttcggtagatacatacatgcatgggcatatccattttgaaacatgccaggagaaagctcactggctctagagcagggtaggtctcaagcgttgttgcctgattgctgctgcgatcgttgcatgcttgacatgtctagtaggatcagtatgctaacataggcagggcttctgtaccatatgacataagttccttctgtatacagggtcgagatctagagaaaagaagttcattatttcattcagctcatgttgttaccctttgttcttgtcaacatgttctgtgcatattgttgaaagatgttaccatgtttgcagtagtgatatttattttcctgattatcagtggcatgagtctgtgcttgtatgttaatctatggattagttttggcactcggtgacagtgtcctgctgatgtttgatacatcatatttaatgaactcagtttttctgcaactgatctactttttctgatacttgcatgtcgaagctaacagaaatactttaggttagtgaagcagctattttaattaggcacattctctgcgatgcatatatatatatattagagagctgaacatgaggaggtgatgtttcaggagtacaggcaccctgaaatctgaagtgcgccttggatcatctctactttggcgctggtggttttgtggatgtcctctcagtgccactcccagaataccaggccagttgaagtcctcaagcttctgcttggattctagtgtcactctcaactcttgttatcttttgagaagagatcccctgggcccatgacgaactccaggaatgcatggttgcctgcatgatagatgtagagatggcggtcatatagttaaattacacgttctgccgtatgtatatgattttattggagctaatggattttttatctgctttgtttggagaaaaacatagtttgcatctatctctacacgacttgcttttgtaccggaggcacgcagcagcagggttgtatatgtccaacctctgatgggtctgcggtctgccgttgaaagaggggctttggagatctgaaggtattccacgccaggtgctcctgtaatgtgctggacttctgttctgccactttggttacgcagagctgatccattacaaatggtacttgtgatgctttgttgttagcttgtgagttgtctgtttctgcgcttgtgattcagtggccggcaagcgtttttttttttgactcggccggattgttcatcgatctatttttggatcttttattgctctggtgaaaacagctgggccccattcacaaggagacgcgccacaacgctccaaaggccaaaccagagattatctccgggttgtttacacattgaacttgtctttcaccttgaccttgtttatacatgaacccgcctcggatccgtcaccaggacacgccccctaacaagccaccgtaccatattatgccatcacgcggcggtagcggcaacacgcagcggcaacaggatccaactgtggtggtggtagcctttgcgcagccgaggaggagaacgagacggcgacgcgccattatgccggtgaagagcagcgccagcttccgcatgaccgcgctgcctatggtggtgacggcgcagctgctggcggctgccgtgctcacgctcacgctcgtctgggtgctgcactttcgtggtggcgtctcgtggaagccgacatccaaccctctcttcgtctacacggcacaccctctgttcatggtgatcggctttatcatctgcaccggagaagcggtgatggcgtacaggatcgtgctgggcccgaggtcggccaagaaggcggtgcacctgctgctacatctcgtagccctcaccttcgctgccgtcggcctgtacgccgccttcaagtttcaccatgacgtcggccttcctgacatccgttccctgcattcttggctcgggattgccacgatagcgctctatggtcttcagtggttgatggcattcgtgtactttgtcttccccggggctgtgatgacgatgagggcggactacgctccatggcacatcttctttggcctcgccatctttctgatggccatttgcactgctgagaccggactggccaagttcgtctccgccttcatcgcttacccaggcgaagtgtttgtcgtcaacttcaccgggatcgccatcctcatgtttggcgttgccgtcgtcttggctgtcatccttccgtcaagatactagcaagtgcttaacgattataagtccttccgatccatgcttcttctcaagtcatattgttttatttggactgtgcatgcatgctgaaatgattttgatatattgtttcatttacagagctgcatgctgctggcggtataagtttgatatatatatgatgatactagtaatgccatctaattgtcgttttaccttttaggcccctttatatgcaaaggggatccttcttcatgtcctgaacaaattgatcaattttttcttggtgaaacgtggcgcttgtgcattgtaatatgaaaaaaac

SEQ ID NO: 32362 - DNA, 1290 bp, Zea Mays
gtacaacactgtgaccaaggaatcgggctttagggatccctatgtccagtaccaccacctcgcctccgccgccggccgccggggaccatccccgcgttctgctccgaggtttcctctcccgtgagacatgcaaggagctggagttcgtgcaccggagctgcggcgcagcggggtaccgcccctcggtgatatcgacatctctgccgcacctggcggccaccggctgcggccacctcctgctcccgttcgtgcccgtccgcgagcgcctccgcgacgctgtggagtccttcttcgattgccacttcgatctcttcatcgagttcaccgggcttatcagttggtgcaagggagcttctattggatggcacagtgatgacaacaagccttatcttaggcaaagggcattcacagcagtttgctacttgaacaatcatggagaggactataagggtggaattttgcagtttcaggatggtgatccttcctgtattgttccagttgctggtgtaactgaaggggaaaggttgaccctgactctttggttcactagagaccgtgcttatgatgaggatccaaaacttcttaactttctgtctcagacatcattgagctgtgaaccaactgagcaaaattcttatattcctgtaccagcttctgataacatgtatcgcttttcttgtgatcagtctggttttgacatacgatgtgctagagtgcatattctggggtttagttttcactcaagtagtggtgaatgcaatatatctgcgtcaccagctgaagatgacccaatagagttgcttggaaagcaactgcggctcgggaggggagatgatgtctttgagaaaatattttctaacagcttacatgctcttcaggtggtgcaattctactactggaaaaaacatgagctggcagcaaggagggaacaaagtgttgttagttcaggaacagtctgctgtccagttacacatcattcaaaaggaacagaattaccattaccatgcaatcacgcacttgcacaaactatatttggatcatataatactgaggagattgtccagtggaatgattttgcattagctgttgctatgtgggaaaaatattcagaagagttaaagaaacagttgttgacatttttgccatattggttgtccaatgaaaccatttatgttgttgatacctctgagctgcagagagccgaaccaatctaactctccaatggtgatttggactgcctcattcttatgcgacatagctgtggcgtagatatgtttctctcaagctcca

SEQ ID NO: 32363 - DNA, 3827 bp, Zea Mays
gacttattcaattttgactctcgtcggctccggtatttcgacttccaaaatagccctaacatttaccgaagctcctcccgccggcgcgctgcgatccaactccgagatgctcgcaccgcttccgcgcctgacgagcgcgctccgcggccactacgacgctgatcaggcctacctcctccgcaagagcgccctccaggctctcaccctccccaggccgcatgacgagtggaagttcgctcggaaaatcgtgcctggctgggacgatgcttccagcgaagtgcgtcaggcgtataaacaatttatcggggccgttgtggagttgttgagcggagaggcagtgtctgaagaactctaccaagttgcgcagactgtatatactctatttggtggcgatgacacggagtatgttggtgctaaaaaagtcctttccaaaaggaatgagttggagagccttgtgggctacactgtacaagactcagttttgaaaaagctagctcagttagctcagaagctcgattcccttcaacgagcaagtgcctatgaatctgtacacagaatagcggatgatgtaaatgaaaatgatagaattgaatttggagcagacttcgatttcaagccacttgcccgtttcattgttgatgtttctcttgacgcacccttagaaagtgctgaattgggcagtggtccatttgaaaaatggcagtatgatgcttggagcacatccacaactagtcattcaactgctgttaggggttctgtgagtttgaggtggctgaaagatcagtgtgctttgataactaaaagtggtggctcaatgctctcaggagatgaacttgcaatgaccttgtgcagagtgctcctatcaaataaagcaggcgatcagatagctggtgaacttttggacctggttggcgacaccgcttttgaaatagttcaagatcttcttttgcataggaaagagctagtggatgcaattcaacatggattgtcgatactgaaatctgagaaaatgacctcaggtaatcaaccaaagatgccaacttatggtacacaggtaactgtacaaacagagtctgaacgccagcttgataagattaggaggaaagaggaaagacgtagcaagcgcagtgcagacagtggcaataatgatattggtgttgatgatttttcatcccttcttttggcaagtgaacggaaggaggcatttgatgacgtgattggtagtggagaagggtcagacagttttacagtaacttcccttcctcaaggaaccacaaggaaacacatgaagggttatgaagaagtgaagattccaccaactccaacagcatcactgaaacccaatgagaagctgattgacctagcagcaaaagcaggggaattggaattattttcaagtgcagatcatcctcaatttccattaatcaagaaagatgttagtaaagcaaaaagtcgtgaagttgttgaattttttgaatctggatttggtatacacaatgctggaatgatgcgatctgacagaagtttgatggagcgcttgtttggtgacgggcttttgaaagtccttgtttgtacagcaactttggcttggggagtaaacttaccagctcatacagttgttataaagggcacacagctatatgatcctaaagctggtgggtggcgagacttggggatgcttgatgtgatgcagatctttggacgtgctggaaggccacagtttgataaaagtggcgaaggaattattatcacaacacatgacaaattggcttattacttgaggttattgacaagtcagcttccaatagagagccagttccttggatctctgaaagataatttaaatgctgaagttgctttgggcactgtaacaaatgtcagggaggcttgtacctggcttggctatacatacttatttataaggatgaagactaatcctctggtgtatgggataacttgggaagaggttatgggagatccttctatgggtgcaaagcaaagaacatttattattgatgctgcacgagcactggacaaagctaagatgatgcgctttgatgaaaagagtggtaacttctactgcaccgaacttggtcgaattgcaagtcatttttaccttcagtactccagtgtcgagacttacaatgagatgcttcgacgtcacatgagtgaaagtgagttgattactatggtggcccattcctctgaatttgagaatatcgtagtaagagaagaagaacaggatgaattagaagcccttgcaaggaaagcatgccctttagaaattaagggtgggccgactgacaaacatgggaaaatttcaattctcatacaggtttatatttcccgtgctccaatcgatagctcctctttacattctgatgctcaatacattagtcaaagtttggcacgcataatgagggcactatttgagatttgtctgcgtcggggatggtctgagatgtcatccttattgttgcaatattgcaaggccgtggaccgcaagatatggccccatcttcatccacttaggcagtttgataaggatctttctcctcaggtattgtggaaactcgaggaaagaaatgttgatctggatcatctttatgagatggaggaaaatgaaattggagctctgatccggttttctcatcagggaaagttggtcaagcaatacgttggatacttcccgtatgtcaacctatctgcaaccgtgagcccaatcactaggacagttcttaaagtggacctgcatataactcctgaatttgtgtggaaagatcgttatcatggcatgtcagaacgatggtggatcattgttgaggattctgaaaatgataccatttatcattcagagctattcacattaacgaagaagatggcaagaggaacacctacaaagatatcttttaatgtaccaatatttgaacctcatccgccacagtactatatacatgccatctcagactcatggctacatgctgaaacactcttcactgtttcttttcataatttgacattgccacagacacaaataacacacacagaactcttggacttgaagcctcttccactgagtgctcttggcaacaaaacgtatgaggatctgtacagattttcccatttcaacccgatacaaactcaggcttttcatgttctttatcacactgataacaatgtactcttgggagctccaactgggagtggcaaaacaatttcggcagaacttgcaatgctccatcttttcagtacacaaccagacatgaaggtagtttacattgctcctctaaaggcaatagtacgagaaagaatgaatgattggagaaaacgtcttgtaattcagcttgggaagaagatggttgagatgactggtgacttcactccagatttgatggccctattgtcagctgacatcatcatttctacccctgaaaaatgggatgggattagtcgaaattggcatagcagaagttacgttatgaaggtcgggctcatgatattggatgagatacatcttctgggagctgaccgtggacccatccttgaggtcattgtatcaagaatgcgatacatatcatcacaaacagaacgttcaattcggtttgttggtttatcaacggcattagcaaatgctcgtgatttagctgattggttgggcgttacagatgacggtctattcaatttcaagcctagtgtgagacctgtacctcttgaagtgcatatccagggatatcctgggaaattctattgtccaagaatgaatagcatgaacaaaccagcttatgcagccatatgcactcattcacccaataaaccagttctcattt

SEQ ID NO: 32364 - DNA, 2368 bp, Zea Mays
cattatatcgtctaattaaaagatttaatcaccgaaccgatttcatatccgcgttcctgacatttttgcgaacgaaactagaccactcatactatatatatttcaaataaaaaaattacgtgattaagattaatatataattagtgtatattaacatgtaattagtatctattaagcaatttaccatataattagtgtctattaatagattttttaaatttttttaactcatgcaccatgtactcatgcaagcaaccaaacaacatctcttgtgaaccagactggccacatacacacaaccaaacacgctatactgcatgcactcagccagtccagtctgagccaggctcactagatacgagccaggctcacccatacaagtaaccaaacgccccctaagagaacctggaaccggctgcgtctgggagagtggctgggtgccgtcgtgtacgaactccaactatacctatactccagaaatcttcgtgagaggaagtcgagcgccgggagcggcgctcaactcatccgctcaacggggttctaacactatccatggaagaccccgtggcggcgccctcttcgtcttccgccgccccagctgcttccgcagcggctaggatttcggcggcggcggcggcggcggtaacatctgccgttacctctgcgccgcccgctctcgctccgctgcagccgtctggcaccgccgctgcggtccctgaagccgcgtcgacgtgccggaggcagctgttcacggtggagctgcggccaggggagtccacaatcgtgtcgtggaagaagcttctcaaggaggccgggcacaccgccacggcaccgccagtggcgccggagccaaagttcgctgcacatgcgggcccatctggtgctgtaagcagtcattttgcggttgttgcgtgttggttggttacttggttacctgctgcatcgatgtaatctgtgcgctatctagcttagccttttgagttcatgaaaatagaaggattccctgctgactgaaggtaagatctggaagatggaacgtgagggccgtttgtgtttggtgcctgtgctctatcttccagagatgttctacagcgagtatcagttcctcttgtaatctgccaaaaccttgaaagcatataggtccaaatcaatgacacctcatcgtgatggattgttgtacctgttcatgccaaaaccttatcattcttgaacatgatgttcttagcattcagcatttcatcagtgtgaaaagcacatcctgcagaaaatgacccaaaggatccaatgcagtcattgaaaaaattgagtgcctttacatgggaaaacatagcagtgacgaagaggatcttaatgatgtaccagatgatgatcagtatgacactgaggattctttcgttgatgatgctgaattggatgaatattttgaagtcgataatttgaaaactaagcacgatgggtattttgtgaacaagggaagttggatcagatcttgcagagttatggcctcaaggtttcatggatagtgttggaatcaaagatgccatttatagatgaaaggagcgaagaagattatactacagccagcaaaaggttcgcagcgaagagagaatgaaaaggaagaggctggctgcagcagcaaagctggaagatggcttcccagttgtaatgcgagctggtgttgccccacaagtttcacaaccacccataacaaacaacatcacataccagattatggacagaaccaggggtttaaattttttgacagggctcgtgaaacgagctccagtggaattcctgatgacggcaacagaaatattggcgagatcaagaagaaaagaaaacctgaatacgatgttgtagatacacaagctaacctaccaaaggctcccttaccgcatgggagagaagcaaaagccttctaagcctgctgacgaggccagtgctggtagcctgccctccacgtcgacaactcaaactgtgcttggcctaccctaccatcggtgcttggtcataaccaacaacctaactgatcatttcggcatattgttggacatttggttatccttataggctcttttcagctgctgtacaaaattatggcatttccatgtgttcagcatccatggtcaaggccatcacctttccgagtcgagaggatatttgaccatttgcaattttctagcattgcttggttcctttggccaggttatctgtgccacgctgataaatatggtcagatgcagatttgcacccctacaaatatcggttgtaattatgaatcgtttctgagacatgcgttcatattgtgcgatttaaaatctcattcagcgaggtgcagatttaatatcattgacaaccgcacaaaaca

SEQ ID NO: 32365 - DNA, 861 bp, Zea Mays
tgagtgttaaaaagtgacaagtctaagggtaataacctatcaatgttatgctttagcttaaggcatatgtttagttatgatttccaaatatttgaattaggtccccctagctcgaggatcatgatcgttgttaattcaaaggtagctagtgtttgcctaggagttgtaatgccttactagcaatatattaccctcttcggcatagtgttattatcttgtattgtttataattattctcactcatatgcattatgcatatcaattaggtacgttatttgatcgcacgatgtggaggaaaagtgttggattaacctcaaagtgatgctgacgaataaaccagaggaatggatgatctgatcaagtgccaggatggaagatgctcaccaagtggtcatcatctaacaacacttagtgttatcccaggcaagccccggtgcatttgccacctccttgttgttataaaacttttatcacttatatgttgcattaggtgataggagttgagtgatgaaacaattgatgcattgccattccttggaatttgattatcttccttgattcctctttttataaagagaactaaagatgcttagccctgcttagataattaaaagttgttctttttaaaaaaagatgatgtgttacacgggatatgggaaattgttgtgaacaagaaattgggatggtgaatccatatggccatgatggattcaacatccagaaaaagtacccctgtcgggtaccaaaaatgggagaatggttggaataaatctagaccagacactgagcaggaaaggtcgctcgtctgtgtcgcttaaggaccgttccgattgttggcctgctgatctaggaccctttaac

SEQ ID NO: 32366 - DNA, 784 bp, Zea Mays
taccctgtatcccaccccgcgcctccaacttgttcttccgctgcaagacagcagtcccgagctgtatgcctaggggagccgcgagggggcggagatgccgacgctgacgaagctgtacagcatggaggaggctgccctccacaacacgcccgacgactgctgggtcatcgtcgacggcaaggaaggagcaggacacgggatttgccagcaagcttaaggacaacgtggtgcagtactgggcaatcccagcagctgtaattgggatatcagctgttgttgctatattgtatgcgcgaaggaagtgaaagttaatgtgccatgcttgggcagatgatccttttaggctttgttcgtttcatccctaatccatggggattgagggggattggggtggattgagggggattttgacttgtagtggattcaatccctctcaatccccatgggtttgataaaaacgaacagggcattagagggatcaacccatggtgcatggatgggtatatgtactcctgtcccaaattacactatgatgttcgattcttagacacacttaggcaaacatttgcctgattaatgacactattttatcgatatgacaatcaattgatggatttatactcttggaaccaattgtcatgcttgctggcttgaatatgttccatgcagcctttgatgcctttgaatgtcatggattgccgttccatcttttacctttatctcaaccgaattccgtgctatctgctgtttcacattattcataagatgtgaagctgaattgctg

SEQ ID NO: 32367 - DNA, 263 bp, Zea Mays
gcatcaactctccgtcaaaccggcaggtctttggcctagccgaactgtcctacgcgacaggcttcgattctccctctacgcaatcgagcggtatgtttttttgatccgctggtgtgatctatgcgccacaaacttgttgtctccgtcgtggtgctgcgtccgtgctggaaacgctgcacccgtggcagctagctctcacgggaagatgagatcgaatcttacagtgggcatcgactttaacgtgcggccgccctgcacggcgg

SEQ ID NO: 32368 - DNA, 2191 bp, Zea Mays
aacgatctgaaaacatcctccattagtccgcctccggccaccccctttcattccgccgcaacgccaccgcccccaacgcaagtttccggcgatggaccccgcggcggccgcgctaggtgcagtacccgccgctggcgcgccacctccgggcgcagccgcaggggaccagcaggcagctccccgggttgagcggctcagcgcgggggtgcagcagcagttgaacctggaggggatgcgcgcgcgcgcggtggggctgtacaaggccatctcccgcatcctcgaggactttgacgtcatcatacgcaccaatcccagcgcctcccccaagtggcaggacgtgctcgggcagttctcgatggtgagcatggagctcttcaacattgtggaggacattaagaatgtgtccaaggtgtttgtcgtgtacccccggaatgtcaatgccgagaatgcaacaatactacctgtaatgctgtcgtcaaaactgctgcctgagatggaagttgaggaaactactaagagagagcaactattgtctggaataactaatctacctgtgcctacacagattgaaaaattaaaggttagaatagacatgattgggagtgcatgcgaaactgctgagaaagtaattgcagaatgccgtaagagctatgggctgggaagccgtcaggggacaaatcttggtcctacattggacaaagcacaagctgcaaagatacaggagcaggaaggcctacttagagcagcagtaaattatggattacgggtacctggagatcagaggcatccacaatctcttcctatccatctgatagaagtgcttcctttaggagacggtgcacaaaattttggtgatagttctggtagttatcccaaaaatatgtcaacatttgcacctaatagtgtcaacagccagggaaatcagattcaggcatccggaggacagttacttggaaggcctgcgccatcacctggaaccacaggaacccctaatttcgagaatgtgtccactcctccaatgccatatgctaactctcctaggtcaggcaccaatatgatgaataccccttccccccagcaacatctaacaccacaacaacagaggcaaaaactgatgcaacattctcaaccgcttcaccagccggtgaggccatcagctgctgggatgctagcacagagcgcacttcctcaactacaagatttacaggggcaggctcaacaaaaactacaggtccctggtcaacagcaaatgcaatacaaccaagcattgtcacaacagtttcataacagacagatgcaacctggacgtatgcaaccaggcatggctcagagtcaattgaatcaaggaactcagctacgaagtcatttaggccagtttactggagctgcaaataatgcgatgttcaatgctgcacaggcatcatcaaactcacaaatgatggcaaatatgcatggatcacagtcgcttatgccacaaatgcagtatggtatggctggtgggcatccacataggagccatccccaaatgctgactgaccaaatgttcggtatgggagccacaaatagcagcatgatgggaatgcagcagcagcagcaagggctatacgggaacatgcaggcaggtgcacagaacgtgccacagggtatggcgggccttcagaaccagacccagaatcccaacttcactcagcagaggcaacaaaaccaacaatgatttaacactaacgttcacggaggttgaaagatgagcaatatatccgtcgttttgctgcttgtctgttggtctttactcagcttatctgtgagactgatagtagccccaggttagccttcgttttgctgtaaatcattagcgagatgcaggtcaattataattatatacgttgtaactgtgtttcggatatgtctaatatgttttgttggaatcgtgttacgcgcgttccttttatttataattaagcctcgcagcaaggccggcaatcgaattgcatacggctagacgggtgggtagttcaccaggatgaaaatcggtcatcaggtggaccctagaattatttgaggaactcacagatgtactgtaatatgtattccctgttgtctttctggataaatatcccaagatgttattacgtctttcatgcttgcaatcatgaggccccattgcttgcatgcaactcgaaaacgccgatga

SEQ ID NO: 32369 - DNA, 2428 bp, Zea Mays
gtctcccttttgtcaacccagcgtgggctttgaccgtcagctgaatgcttgatgctcgtgctcggtcatctgcagcagttcgcttggtgtcagcttgccgtcgtcgttgtttgctgctcgtggtcgtcgctgaacgccgctcccagtgggaaagcttttctagttcgcgctttgtcgccctctatcgccggatgccatcctctctcgccacctcattgccgcaccgtcgtttttctcgtccagtgctcgcgcagtctttctcaaaccgtgctgccgtctcccaactgcttgcccttgccccctgcacgcgcttgtcatgctagtcaaccccgccacggtcatcgtcatcgatactgcgcttgccggtggctgaagctcgtgtcgccctctccctcactggatttgtgtcctcgccagctcgctccagactcgatctcgtcgtcgttccatacgtcgtcaagaaatcccaagcgtcaggtgaagacgaagctagcagcatgatatttaccaagtgctcgacaaaaaaactcgaacaagtcgtcgatcgtcatcctcatctacgccaagatccgagaagattagacgcagaagaaaataaatcagtacgcggtcggagaatactcgatgcagataaagatgaagcgcgattcgacgtagcactcactctatttccggtgaaatgctgagctgaaaggcgtcgtcgatttcgtggtttcaagtcggatttaattgatggtaagttgcttcgttattccagtcaactaggtgtttaattcgctatcgcgtagcactatttaggtctgtaatatttctgtctatatgcattcatgtgcatcgtgcatttcaattaggtacgataattaatcacgtgatgcggaagacgaaccaagtcgactcgaagtgcgggctactctgcatggtggtggtgctggtagacgaacctgccgatcaagtgctaggacaaggatgatcatcaaatggacttcgcctaacaaacactaacctagtgttattcaggcaagccccggtgcatttgccacctccttgtgttttaaaatctttatcaccttgtttgatgcattaggtgataggagttgtgtgctaaaccgttgatgcatttccttccttgaaaattgattacccttccttgatacccgttttgaaaagaattttatgatgcttagccctgctttagcaaacaaaaatgttttgttttaaaacaaaagtgatgcttcagtgggtgggaatgttttcaaaaataaaacttgatggtagatccatcacggccgtgatgggttcaacatcagaaaagatgtacctctgccaggtaccaaactttggattgaaaataataaagctgagaccgggcgggtgacttgcacgagaaaggagtctcggtgtagtgtctccgtctgagtcgattaaggaccttgtcgatgtaggcctgctgaccgaggaccctttaactggtcacatgcctcatcatgggtaagctttgcctcgggcagactaataccagaataagataacacacaatgatagtggagagattgcgagagtagtgtgtaccctccgtggcaagaggctggacggtggtgtatctgtgctcttggttggcgtgaacctgatctggtcttaagaaccccagtggcgagttgacatatgcaagggttaagtgctacatatgtcatgtgattggagatcctcagctgagtattaatcgattcggatcgccgttacttctcggacatgaagacttggtcactgacttacacgtagcattccagtgaacttaaagggttgataaaagacggctagtgcaggtcaagtgattgaactagggtagaaataactctagatgcaggtaactttacttaatctgacaagtaaaaagggattttttaggatccactcatagtaagcttttctgcaaaacagagtatttgattcttgataagccataccttgaatccctctagccagcatacccttgagagtcttttctttagttgggtaagtcttgttgagtaattccgtacttagggttttattccctgttgtttttcaggttatagttttgtgctgctgatgatggtgttaagtgtcggtgggctcgaccttcttataagtctaagtacttcttctgatggtcacttaagctagcatatatttcaaaactaccaataatctataacagttcaaagttatttctttgaatcactttttgtaatcactccgatcatgtacatcataaaaattgatgtaacttgtaaaatttggtaataagatttccgctgcaaaatgttggtatgtgatttatgtttactttatcctgcggtcctggttgtaagtggtttatccgaggtccttggggcactcggacagatcctgttaagttatctggtgcacatgcatagccgtctgaggt

SEQ ID NO: 32370 - DNA, 1273 bp, Zea Mays
cggctaatgcctgtgtggtctttttagggcccatgcccatgtttcagtttccttcatggttctgtgcttcttatataactgtggaatccttctgttcatctaggctgccgaaactgctaagctctggtgtccagtatgcaagcaaggagatctacgagaaacacgtaatctcatatactgtactctctgtaatctacggcttgaccttggagaagataagatgacgctggagttcttacgagaacggttggccaatgcacatatggatcactttgacagaggatgcaaatcagcacccaagttctgtttacagactatgtttggcctgactgcgctctacatacagtgtgcagaatgcagtacatttgatatcgtggtataaccaacaagatgctgatatgaatcaacacttcaacggaggaaagaaatgttacaaaacttacttgaagttatttcatcgcttcatgtaagattagctggtgaagttatggcaagatggctgcaatccgaaaggtggcacacactcagcacctgaacacgttcatccattccagcttctggtcaaaacaattgacatgcatgcatgcatgtggaatttccacgtatgtccaatttaaatgttgcaaccggtgtaaggtggttagtaaatatgcacttgactatggcaacatctagtttccagcttacttgaaagttgaaactgcaactacaattggaaccaaacactacccaattgatcttgaagtcgtctttgggctagctcgcattcctttgcagatctgctaccggtggcgagcgtgtagagatggcaatggttacccgcgacccgatacctgatgggtatttactctattagggtatatatgtaggctaaataatctacccgtgggtctgttattggacaaaaatcttcacccaatgggtaaacgggtattagaacattccgccttcacccatacccgttaacccgtgggtataaaatacccaatataaacttagcccaagcataaacttgaactttattcattcatcttttttactatttaacaatcttttatgccataatgtcatagaaggtttaacggcaatttaatgaccatgtaatggaacatgtaatatactatgtagtactatcctagtgttactactttatccaattatctttggtgtgttgaatgtgtggttaaatgatgctagaaattttgtaatggtatttatatggatatacttgacatttgtataatataatattttgatagatgtacaatttttg

SEQ ID NO: 32371 - DNA, 322 bp, Zea Mays
aggctaatttagaaatgtccaccaatagagatgatgtctgccagaggaacacataaggttccatgtgtgcagtttgctttttctgatggcactgtactatctgagtctgttgagcaagcgccagatatgcgattttacccaaacagaaccagatgcaacctcttgggtaaaacatacagaaagaggtttaccaacaagtggttacaggaaattcatagtacaggggacgggtgtggatgtcgaatactatcgcggttaacatgtggctaacccgagaattcaagtccacaaaagatggtatagattcgagagaatcaccagc

SEQ ID NO: 32372 - DNA, 3744 bp, Zea Mays
cccacaccagaaggagccaaccccccctcaggccccaacccttttcccacttcccgccggagcgctctcctcttcgccgctccatcaccgcctcccaatcccatgggcgacccgcaccccctctcctccgcccacctcaccgctgctgcctcctcggctcgagaacaccgtggccccaccaacgagcgcctcgccgcgtccgatccttccacgtccttcgctaagcgtcctagggttgcggcggagccgtccgattccggcggctgcgttccatgcgtcgaggcggacgtacgagctcttgtgtcggtgtccggaggaatttacccgctggcgcgggcaggagcgctccgtggactcaccgcggtccttgagaaggtcgacaccagcagctgtgtcagcgcagcgatcacggactgttgctacaaatgcgcggtggagctcatgagggacgacgacaatggcgtcaggttagccgttgtgcgattggtggacgcgtgtgctcgaaatatttcagcgagattggattttgatgccaatggctatggtgacctgatggacatgattttcctacagctaagctccatggctagggacatgtgcacgcaggtgagaatggaagcattcgctgcacttggtaaaatgcaacgagtttctgagggtgttctgctacaatcgctagaaaagaaggtcatgaaaactgacaggatgggtgtttctatcatcaacggccaaaaattacctcctaaactaaaaattccctgtgctgctgggattttttcccatggagttgaagatgaattttacgaggtgagaagaactgcctgcaaatcattaggagcgctggcaaagttttctactcagtacacagagaaggccttggacttgttgatggacatgatgaatgatgatacagaagcagttaggctgcaggctctggaagcactatttagtatggcaacatatggatgtttgagtgtgcaggagaagcacatgcatatggttcttggatagaatgaagatttttttctcaagcatgcaggagagctgcgtatcaggatatattttttatatcctcagtttatcatgcaaccatgctattcactgaaatattttgttgcaattgtaggaaaatattttgtagccactagccagagatcctcaagccaataccactgtaccagcgtattaaagaaagagtattggcacagatattattcagagaaatctttgctgatagtgatatgtacagttgaacatgtaattttcaagggaacaatataaaacaatatttgaccatgaacatatatgcaataatgcaaggataatggacttagccagaatatgaaacattcgtgcaaatataattttcggtcaaaacagttcggttttgtagttcctaaagtggcgggtccatatttttcgattcttgtgcattttactgtcacaaagcaaccttagctctagcttttaagtagatgaaaagcatgcataatcaaaagacgaagcaggtttgaatcttgtttttgttgaaagttctctctggattctgaatgacttataattgggtttgtacctgtttaaaaagatctttcaaataatctagacatatctttgctattgatattgctaaatgctagtaaaaatctctgaccttatgtatgtataactgtttttgtagtttcttgggttgctggttgatgccaatgtcttaattcgagatgcagcacgcaagatctttgggttagtcaacatgccaaaacttcaaatattcaaatctgcagttgatggtcttgttacaagtttggagaagtatccagaggaagaggatatatatggtattatgttttccattggtaagaaccatgggagcttttcagctaacatagctaaacatttggccaaagagattactatggcatctgacggagagcttatcttggacaaaccaagggtcaaagcattgttaatagtgtctatttcagcacctttttctgatgataagcacaagcagctgggtataccttcgattatcttctcgtatgcaattcccctactggagaagatctcatgcgcactaggagaggttgatcaggattcactcttatcttacttgtatcataaaggtggaatgccattttgggaaaacaggtcagtatctgcagagtttggagaatctgaaagctgcaatgttgaaacagtgaaaattggtgcccatatagaaaacactgcaaaggaagccaaatgtctagatgaagttctggtaatgaaatccatactagaaatagttgaaggagtctggactatgagaatgtcgtgcaatgtttgtgaagttcgaactattttcagaacatgcaaagaagagctgagattattggcagaaaattcttctggatcaattggtgcattattgagctttctgagtgagtatcttgatgcaatattattcattgttgaaatatggcagttgattcagttggacaagccttatacttgtggcctaacgtcacttgatattttactggagaggttggatatgtctgtaaggaggatgaaatattgttatattggattaaatagagtattggaggtccaagttttggagctttctttgatagctcatttatgtagactctcaaagattgcagtgtgttccaaggtagttctgggtaaggtgctctgggtaattaatcgcttagaggatctgtgtgctgatgggtcctgtgaactgtctgacttcagtggagaaattaagaaggcctgtgataccaaccgtattggagataatctgattggcaacatcaacaatttgtttcaactcttccatctgaaaccaacaacagactttggaatgcttaaagtgataagtgcaatgttgcgggtctgtgataacgattctgaaaatccattacaatacatttgtggattaccggtgggtgtcagctttaaaatatctctgtggaacatatctggtcaccatcgactgtggctccgcatgaccattggtgaatctgtgcaacataccttcctagaattttctcgttttgaaggcaatgatgaggtgatgagtggctctatggttgttcctttgtatgctactccaaagacatgttcatttgtgcttcgggtatgtctggtaatggaatgtccatctgcagggatcagcacccaccagggtggacatggaggaccgagtgattgtgtggttcaactctctgatgaactgaatgtttattttgttagtgctagccaatggtgatgattaaaataagcgaccatatgctttccatgctcatcgtcttaaaggcttttgcttgagtggacattcttgatccaggtctcttctggggaaaagggttcagttgtgctgaaatttttgtagttatggcaaaagcaatgcagatgagctgcatgctccatgaccgtatgcatagtgtggagtgcaagtgggttttaacctggtcgaagcactttgagttcgttaggagctacaacttcagacggaaagtgaaggcgtgaagctcaccaagtgacgatggagaaagtgcagcgtgggggtgaagctgacgatggagaaggtgcggcggaccacgctgcgcgggtttttttttgtcaccaatttgtgtggccttggccggcggtgagtgagaaacagccgggtcagaaattcgcaatcctgcagtacggttcatattatattaataatacttccgttttcgaaaatttatcttgtagttcatttcttca

SEQ ID NO: 32373 - DNA, 2600 bp, Zea Mays
gcgaggggatgctgcagatagtctagcgccctcccctgtcctgcgcggctgcgcgccttatccccgccacgctccacctccgccccacacgcgcaagcggcggcaccagtccaccattctcctctcgatccgggatccaaatcggccgcctcatcgcgaccctctgtctccatccgctccggcgtgccacccacgcaggctaacgtctgggctcccctccttatcgccgggctccgcatcgccaatagtctgatggcgccgcagttgcagggctgcaactggatctcctcctggccgcggctccagcagatgtccccttggccgccgcgctcctccgaatcgccgcggtggagcttcctgcgtctcgcgacgcgccgacgcccctgcgcaggcgcggtccgcgccgtcgcgagcgcgggcgcggtgggaaccgagctcctggagatggaggagcaggccgaggacgtggacgagagggagaggctcaggcggacgcggatctcactggcgaacaagggtaacacgccatggaacaagggcaggaagcatagcccagagacgctgcagcgaatccgtgagaggaccaggatcgcaatgcaggaccccaaggtgaagtcatgttaagaaaaagttggtgaatctgggtcatgcacagagtgaggagacacgggtaaggatatcagtgggggtgaggcgaggttggagtttgcgtctacaaaaactaatggtccaggatggttgctttgtggaatggagggacatggtagctgatgcggctagaaagggttttgctggtggagtttcccttgaatggaattcatataaaatcttgagtgagcagatgcggcatgattggttggagaatcttcagaaaaggcgatcaatgccaaggccaagaggtaatagacgagcaccaaaaactcctgagcagaggagaaaaattgcagaagccattgctgcaaagtggttggatcaagaatatcgtgaacgagtttgtagtggaattgctagctatcatggatcatcttctgcaactaaaacaccgagaaagccaagacctgctggagaaccaggtgtaaagaaacagacgacaaggaaaaaacctatgcaagccaaacctgtaattttagaggatgctcatggaaaaagtgcagctcttaagagaaagaaaagcgcaactccctacaaagatccgatggcagttgaaaaattggagatgatatcaaagattcgagctcaaaggacagcacaggaaatagaaaagaaagaagctattaggagggccaggacactgattgcagaagcagaaaaggctgctgatgctctggaaactgctgcagcgatgaacccttttgcccaagcatcacttatagaggctagaaagcttgttacagaggcaagaatatcacttgaatgtgttgatgatgaagagcctcaagaaactgcttccaatgatgtgtcagggagctcagtgttactgaacttgcacgatcaccgtcatggactggagatgcagaatggaagtaatttgttgaagcaagagaataaacctgccaatgggatggaatttcctccaagcagtgtcaatggcctcgctttccatcttgatgtttctgaactcagcggaacaaagcaactatatcagaggatagagaattccatggaaagggcttttcttctcccttcggcttcgtcaaagcttaaaagtgcgaacggagattatggaataatagatttacatgtgaggcagtcgatggtcgatgacacggcaaagcataaaggcatcacagctgaaacttgtcctccagggacactagagctagaagaagatcctcccagtcccaggtctgcagaaaaggctggaaccagggaagattaccctgggggaaaaccggaagaagacgcaccctcatcggaagaaaaggctaggatgaggtgggtacgtgggaggttggtcaaggtaaaaacaaacggacctggggatttagaaatctagtattaggcagcaaatctggcctagataccgttgacaggcaatcgagtttgctcacttccatttagccaccattttgtatgccattcgcatgatttggtgtttacgacctgcacctgctcgatgggaggaaccaagtataaaatgtactagcgttgacaggagtggcgtggtcctggggaactttactgatttgcagtctacagtgaacgtgcaggagcgagcacattacgatcaccctgttttcctcatatgcgttgagattgtagttgtggtaggtaataggagctggatctttttttcttgtaaggccttgttcggttagctctggattgcggtgatttggtgggtttaaatcccaagtaggtcaaactccttaattttttccaatcacattcaattcatgggtaacgggattaagttgtagtcgactgtgaaagcatgattcgaggaagtctggaaaaagaaacatgcaaatggaacagtagcctggtcacctggttgcatcaaatgctatgagcctatgactgagggccgaggtgccccagtttattgtacgaattgacaattttacccgctgctcagtaacgaaaccacgtttagcccg

SEQ ID NO: 32374 - DNA, 1942 bp, Zea Mays
cttcttattcagttctgtttcgtgccaatcagacggcggccgcctcctctccccccgctgccgagctcacccttccgcctgccgcctgaacttgtctcgcccgcggcagatctgctccttccgctcgctgcaccgcaacccggataggagaccgcgcgcggtcgagaactacctggggaccaacgtcctcgaccagctccggtgcggccggcacacagctccacagatttggacagcgcaattacttaagctatttgtattcggatctgatccaaccctggtggtcagctggactcatcgcccatggagcacactaagtcaggccccagcagttggccagaactggccgacgtggtgccggtgccgcaggacgatgggcctagccctgtggtgtccatcgcctatcgagatgactttcgtgaggtcatggattacttccgcgccctctacctcaccggtgagcgaagccctcgcgctctccgcctcaccgccgaggccatcgagctcaaccccggcaactacactgtctggcatttccggcgccttattctggagtcactagattttgatttactagaggagatgaaatttgtcgaaaaaattgctgaatgcaatccaaaaaattaccaaatctggtgagtttcattgtacatatattttttcacatttagtaattcactgcatatcttttttcacatttagtaattcacagaaactaatttatctttggtgtctgcagattttgcatgaatgattggcaatatcttgactaaatatcttccatagtttttttaaactttgatcatcttttatctttgctctggaaaagtggaaatcatgactaactgttgatggtccaattttattaccaggcaccataagagatggcttgctgagaaattaggacctggtattgcaaacaaagagcatgaattcacaatgaagatacttgctattgatgcaaaaaattatcatgcttggtctcataggcagtgggttcttcaagcgttggggggatgggagactgaattagaatactgtgaccacttacttaaggaagacgtcttcaataattcagcttggaatcagagatactttgttataacaagatcaccatttcttggtggccttgcggcaatgcgtgattcagaagtagactacacaattgaagctattctagcaaacgctcagaatgaaagcccctggaggtacctcaagggtctatacaagggtgagaataacctgctagtagaggacgagcgcatctctgctgtttgtttcaaggtcctgaagaatgattggacttgtgtatttgctttgagtttgctgctcgatcttctctgcactggtttgcagccttcagatgaacttaggtccactcttgaaacaataaggagctcccatcctgaaaccgcggatgatgatcctgcagccgctgtttgctgtatcctgcagaaatgtgatcccctgcgggtaaattattggtcttggttcaaggacactctttctcagatctcatgacttcacatgggttcaccccttgtccgcgctggtccgggctctgtgagatagacatgttttagatagtttcattggacacccaaacagagcggacagagtgtatggctgctaccttctccgtgactgaaagcagtgcttgtaacgattttgtttagtaaaatttgtgagtgttactgctccaaacaacaccttatgcaaccatatttgaatatttcacatgtaagcttgaatccaggtgtgtttgttaatgtattacaattgccatgggagcctaaatgagacccataatcacttccactagagtcggaagaccgtgtcgagcagttcactcatatggtcacttaaagcactcttctgcactgtaaattgtaatattcgcagagttttaaatatgggtatgacgatgagtacgctgctgaaa

SEQ ID NO: 32375 - DNA, 2119 bp, Zea Mays
atggcctcggatccaaccagggaaggaaggaatccaagccaccccagtccgctgcttccattccatctcccttctctcgccttctgcggcactgcagtgctctgctgcctcggcgtctccacctcctcccggcgacggcagggcatccgatacgacgccgcgcttccttccgaatcccaagccgcaccccgcaccctcccggtcgccattcccgatgctggtgttctcgagcgacgacgactgctgcggctcctcgtactaggggggcaggatcgatcggcagactcgcagaactataggatatcacagaacagttcttgaggtacttattgcagcctaatagtacatggagcgatattcagatatgagaccaaaggcagaagtttcatatctcggaaggggttccagattctcttctagaaatcaaagttcagaagagaggactaaccatagcagcgataaaccgggaagcagcacaagattcaatcctacgaaagcgagaattggcggtaatcaagggaggccaagatatgtatgcgattcatttaaatctccaagctcaaaggtgtcgcctgcaggctcttccaaatttccacttagcaagtttgaggagaggcgaagacagccttttgtgccagggtttgacattgctgaaagtagtagaagaaaggctgatgccaagcagctacagggtagtaagaaaattgctgcagagaacgacagttcagacaatctgcgaggtgaatcagaaggttttactactgaacaagtagtaaaaccagaaggctctcatgttgtcggtcattcaggtgtttctgcgtatacagtcgggtccctggtccaaactgcttcactaggttctaggacacacagacagaaacacaaagaagtgaatttgggtactccaggagcatcgtcttcaactctgactaacaggtctactatacctggaaattctaccatgggtgtgaggccagcttatggtcatgttaatggagggcagatacatggtcttaaaaaccttggttgttcttcggtacctgatgctcagccatcaggttgcccatctgagtctgttattagtaggaggaggtttgagttcatgagaaagagggcctttgaccaggaaagctcttccagatcagtgaacttaagcttaggtcattcaactcctacagatattcgcagaatcagaatgaatgaacaatcactttgtcaacaaataccacgaagcagcagcagaagccatcaggaatcggcaggttcagttaggacaagacgaccttctcctcatgccactaggatgagtgttcctgatggaagagcagatggcgtgctttctctgcacgagtcatccacaaaggatgtacagccagctcaggaacatctttcattggaagaagtctccactgagagttcaataaggccattctttgtggaatttgataataacattttctcgtctagtcatcttcgtcgctcgagtactcgagctgaaaggggaagaccaagctccctttttgaagaaagtcctcgacaaatgttccatagtctcatgggggagagggacagacatagacacataaccatggaaggaattacagaggttgctttctaaaatgtttcctatactggttccagttgttctgttttcgttgttagatcttatgccattataatccagttaaatatatagtgatactggtcttgattttgataaatatccataactttgactacgatggtggtttaagtgtaacattttggaatgaaataggtttattttctgtaggttttggctgcattggagaggattgaacagcaagcagagctgacctatgatcaattgctaatgctggaggctaatctattttttggcgcctttgcctcctatgatcggcatagagacatgcggatggatattgatgatatgtcctatgaggaattattggccctggaggagagaataggctctgtgagcacagctctttcagaggagcagttcacaaaatgcctcaaaagaagcatatatagtcaggtcgctctagaagtgaacaaatcaaccgttgatgacatgaaatgcatcatctgtcagaactgacctgttgtgtgggacagt

SEQ ID NO: 32376 - DNA, 638 bp, Zea Mays
gacatttccctgctcccttatctccctcccccacacggtgcttgcccctgctccctcctttctgactgtaaggttgcaagcctcggtgccagcaatttcctcgttggtcgagcccctccctatcaccatcctcgtcatggcgccctggtggttgtccttgtcagtcgtgcctctcctgtgtgctcgactcgcctgtgccatgtctaactcctgtctcctctctagccctgatgtcgtcgctggtcctccccacgctagagaagaccaccgtcggatcatcatcgtgggcttggctttgccaagccatcatcgctcaccatctcgttgatgccctttctctgtcttcatattcgtcagcaccctagtcttctctctctacacaacaaataggttactggactcgccatgttctctggtcgagtttgaccctccttgctgacagatttgtcgtcattctgtatgtcgtcgaggagcaactcctgggatggttgggtggagaagaagaaaagaagctccagcgcatcgcacacctggtgctcgacgtaatggttgaatcgaaatcgtcgtcgtttccgtagtctgatttagttatggtacactagttgatcacgtgatgtggaggacaagaaccgaattga

SEQ ID NO: 32377 - DNA, 1247 bp, Zea Mays
ctcaccctttggatgtacaataattgcaatttaggtcgcgctttcgtaatctcattgcagacgcttgcgcaatctgcggttgatgtagccagtagtgcctgtagtggcccacgagatttcagctaaggagagagagaattgcagaaaggatgagggcattgcaggaattagtccccaacacaaacaagacagatagggcagccatgctagatgagatccttgattatgtgaagtttcttaggcttcaagtaaaggttctgagtatgagcagactgggcggtgctggcgcggttgcgcagctggttgctgatattccactctcagttaagggcgaggcaggcgacggcgggggggcgccgcagcagcagcagcagcagcacgtgtgggagaagtggtcgacggacggcacggagaagcaggtggcgaagctgatggaggaggacatcggggcggcaatgcagttcctccagtccaaggcgctgtgcatgatgccggtctcgctcgcgatggcgatctacgacacccagcaccccctggacggccacggccactcgctgaagcccgagcccaacgcgtcatcctagtacagtaacgtcgtccttagcgtgccttccaattccaacacccaccccccttctccctaaaaagtactgttaggcgccgatattatccggaagaaaaaaagaagtgtatgatataccgagcgtgcgtttccagtgtgctgacccgtgggataggaaaggaccgaaaattgttggtatatgatgattatgtagcctcctgtttgcctgttctgtttcaaatcaaagcaatgctcatgcatccaggtttcaatgtgcctatgagtgcaagtgatgggcagcagagagtctggcactgctctcatgctgcctgtttccctttgggcggtgtagtgcactggccatagacttgggtgggtggtggtagggccgcccgccggtcgccccttttggtagtgggtgtttggaccaatggaaagaggctgctgatgtatgtgctggtaattctgagcgagcaaacggttgacgaaatctgaaagaatgtggtggtggtggtggtgggtggtgatagcttgtctttttattttattttaaaaaaaatagagtgggagcggaggtctgggtcaatggaggcccgagcgtgcgatgatcggctgggcgctagtggggagcgtgctcctccgggtcttggcttttctgcctacaagtcgccgtcttgataagaac

SEQ ID NO: 32378 - DNA, 863 bp, Zea Mays
gtcgccgtggtgccgcagtttgccgctctcggcactcgttcggcttcctctcttctctttccggcctatcagcagtcagtttctctcgtctggctgatggcgtccaactacgtcgacaccggggcggaggagggcaggttccacggccaccacagcacgacgccgaccagcgcggcggcgtcgccgaagacgctgcggaggagctcgtcgtccgcccacagccacggccacgggcccaagtgcgtgtgcgcgccggccacgcacgcaggctccttcaagtgccgcctccaccgcagcagctcccacggccacggccacggccacggcagcaacccggcgtcccctccctccccggccaccttcgccgctgcgccgccgccggccgcggccgcgtcctcctcccgcaccgtcgcggcgcagtgacggcgccccaagaaacgccgacccagcagcagtgaagagaggagaagagaagagagaaacggcaaaagggaaaaaggaaaacacactctctctgttattatgcgacacgagaaagggagcttatttgttcctcccttcatcttcacgtacgccaacggcagaatttcccatttcgtttcacttcctcctccccccctcgtcttttaaccttttttggctgagatatccatcgattctcgctggaatggtcttcccctccttcggtcagaagaaaccctccctggttgtactgtactaggcaatgcgcatcctgctagatcgcctccgctgaaatggaaagcgtatgtgtgatggtgacatgaagttcacttgtgtaattattaccatttcagtaaatccatgcttcttgcaggagttgtgatcttggtggtgggtctgct

SEQ ID NO: 32379 - DNA, 1919 bp, Zea Mays
gcaaaagtcgtataaagacaccgggacctcgtcgtcgcttccccccactgattccgagtccatctttccccgccgccggccgtgatccctcctcgccgctgaccgccccgcctgccccggcattctcccgctccagatccagggccctcatagagcctccgctcgatctgcccccggatcggattggccgccgcgcatctcatggtgagtttgattagctgctggtgctacatctatgagcttgcaaggtgaggaagctgtccacttcagcgtcgtcgacgccaaggactgcaaacagagtgcctttgaagtcggcgataagacgtatgttatttgtagatcagatgatgatttgaaaacatctgctgttaaaattcacgacaagctcactcagacttggctctcacccacaatacttggggaacagccacttctaaccaagtcacagtctgtgattcctgtcagtgatgagaagatattagttatcgagaagggtgttcccttgaatgagtccatctggttccttgagacaccccctttgttaagcaacaacggaaaatcaaggaaacagaagttgtttcttggagcaagggagtaatcggcgttggccaaaaaccagttgtgattagtggtccttctggtgttggtaaagggacattgattgcaaagttgatgaaagactatccatcgaagtttggtttttctgttagccacactacaagatctccaagggaaaaggaaatagatggtgttcactaccacttcacagaacgaatcaagatagagaaagatataagcgagggcaaatttcttgaattcgctcatgttcatggaaatgtgtatggcacaagtatcgaagcagtcgaatctgtaactgatgagggaaaggtaagattaatacaatctttaataaaactttctgaaaggtgaactgcttcatctttccattgctttttcgttgaagaggtgtattctcgacattgatgtccaaggagctcgatccgtgagggcttcttctcttgaagcaatattcatctttgtatgccctccatcgttcgaggaactagagaagcgccttcgggcacggggtactgaaacagaggagcaaatccagaaacgactcagaaatgctcaggctgaacttgatcagtccaatgaaccaggtctctttcatcatcttttggtcaacgatgaccttgagacatgctatgagaatttgaagaagttgctttctctggatgatgaccaagaagattcagatgatttttttaacaaggaggacaaagaaactgcaagttactctatcgtgtccaaaactgactcagaaattttgttgcaatctgagactaacgaaggcaaaaatggagccatacacttgctggcacttgatttgtcgtctctctcaggcggtgcgcctggacgaacaaggggccttaagattggctcagttaactccttttgacaagggcttatattggcgttttagatgacccaaagcattcttcaaaatgatacagcagaagcactgacttgaattttggatcaattcccatgagctgatatcttcaaaaacatcttagttaggaaaaagaaggaaacgaaaatggaatttatttccatttgttatttgtttgggtgccacaaggaggcaaaatcatagcaaggaattgtaccttattttttttagggattgtgtacttttctgctgttgagaggtatttggtggttggataatgtgatggagcctatctaaatgttctttcatagtggtctgaataacattgagctcattgctggattatgttgtgattctttcaactcttgggtcatgttgcacagaactaactcgtagttctgaccaaagagaaatgtttttttatgttaagtacgccctgccgtaagcaagtgtaaactttggg

SEQ ID NO: 32380 - DNA, 853 bp, Zea Mays
gtagagatcagtggcccagaggccgggactgggaacaggtggcgctcccgcaatcccgcagcgcctaccaaactactgggccacaaataatagggtccctacaaaccgcacgtcgaccggcccacggagcatcaccaccgcggcagctaatctcggccccaagattcagaatcaccgaggcgcggcgaggcgacggcggttggcgacatgatggcctcggtgcccagccgtgttgcgctctccgcggcgagccgcctcccgaatctccacgccgtggcagtggataaggtcgatggggcaagtaggatgcgtgctgtccacggtgtttctgtggaggtagaattgtgggggatcccacggagtatgagagcagacaagtactcttccgcttttgcaatggttttacggttactgccaccgcacatctcatcttggagttgattttatttgagattatgtttggttgcttgtatgtgagagtcacaatctgcataggtgtatacaaaataagctattttgatgttattaatctgcatctacatatacgctcaaaattatcgtatgtagctagacaaggcggtgccatccaatcaaactgattgtgaacagagaatccttctgtttcctgctatgaaatggccgccttgtgttggctagagggcgaggacctgatgtgtggtgaaattgttgcgtctgttctagttagttgcaagaactagtgtgcatggtgaaggttaggtggttcacttcattggcattttcaatcagctatctgttagtttcttgttttattgcttcagtatgccttattcatggactgtgttttgcactacagctcttcccattcttttag

SEQ ID NO: 32381 - DNA, 2148 bp, Zea Mays
atctcccaccgctcgccatggacctcctcgacgcgaggcaccgccacacgccggattcgagctcctccccacatgccgcctccgacatgggtctcccgctcgccggggctgcctaccagccctacgtctctgagctcctctccttctccatcgagcgcctccacaaggagccggagcttctgagggtcgacgcggagcgagtgcgacggcagatgcaggaggtggcggtggagaactacggcgccttcatcgccgcctccgaggcgctctccttcgtccgcgcgcagctcgagagcttcgatggccacctcgaggccatgatagaggagataccaaacttaacatctggctgcactgagtttgttgagtctgcacaacaaattctggaggagaggaagcttaaccaaacattactagccaaccacactacattgcttgacttgcttgaaatcccaccattgatggacacgtgtatacggaatgggaactatgatgaagcacttgatctagaagcttttgtgagcaaaatatcgaagttgcacccagatttacctgttgtccaaggattagctgctgaagtaaagaagacagtacaatcattaatttcccagcttctccagaaactccgatcaaatattcagttacctgagtgcctccgtattgtagcacatctgcgtcgaattggagttttcattcctgaggtgcagggaagcttggctttctggaattcttgaagatctggaccaaaggaatgtttatgattacctcaaaggcatggtgacttgccacagggtacatctattcgatgttgttaatcaatatcgagcaatattcaacaatgataaatctggaaatgatgagaactccgaaggtgggctgcttttcagctgggcaatgcaacaagttagtaatcacctcgctactcttcaagttatgttaccaagcataacagaaggtgggtctctgtccaacattcttgaacaatgcatgtattgtgcaatgggccttggcttagttggattggatttccgtggcctccttccgccaatctttgaggagtaattggtgtttaaattattgaattttatcactgactctaaaggggctttgttattgatgctgttatctgcattttgcagcgcggttctaaatttattctcaaagaatatgagtatggcggttgaaaattttcaggttgttttggattcgcaccgctgggttccgatgccatctgttggctttgtagcaaatggtgttgtcgatgacacttctgatgatgtgactccaccttctgttttaatggagcatccacctcttgcagtgtttgttaacggtgtttcagcagcaatgaatgagctaagaccgtgcacaccattgagcttgaaagtcatccttgctcaggaggtggtcaagggactacatgcagtctctgactccctagtaagatacaaagctatgcggatgcttcgtggaaatgagtccgctcttttcctgtcactctgccaggcatttatcgaggttgtacatccttattgtgccgcatgttttggtcgatgctacccgaatggggcaacattgatctcagagtgtcaaggcacactggacgctgtccgtcagctattgaccatacctgcaagatctaacagttccagtatcgaaagaaagcagtcaggagccattgaaagaaagcaatctgttgagagccctgggacagcagtcacgaataacgagctgtcagccgatggacctgggctagagatcaacgatgctgctacaaccaccaccccaccggtagaggacgacgtgagtacccatccaccagcaagtaagtagcttggacctccgtttgaatttgttaaagctctttatcaaggcctggtttagtcaaccagagaagaaattgctgcaaacattatattcatcgataataattcatagttttgctccagttctacagtgtacacaatacctcactggatatttgtatcttattttttttatcactcattaaatttttagctgttcattgttatagtcaatacctagatgttgtagagtgtgtccaacctgaacattcagtaatatgatgagtacaaacggtgttcatcgtgttgactgcacacttctgaaataaaagatctgattcat

SEQ ID NO: 32382 - DNA, 2698 bp, Zea Mays
cggggcgcaatgggggttccgagtcttggaggaatgtgcaactgagtgactgctgagctgtagataaatgtgaggagttgaggacattatttacaaacaaatggtatgtagtattccagatctgaagaactagacggagcatatacaacagaagtgatagtatatgaatagtaaggattttctccaacaaaaattcttccataatctctagatctatcacattaagttatgtcacatgttttgctgaaagcaatagtaacagactcatagtgtccttctggaagaatatgtcctgaagtaaactaatgtaaaagtcaacctttgtaattaattcgagcttagtagtggtcttgtagtgacagtactttagtactttattctcatgacttcttgtgcttactaagctttggcagtaagcttttaatttgcatcttccagcagaagctatatgttagagtcaatttgttctaactgtaaaccatcaaaataactcataactgtatctggtaatacacaaactaaaaattcttgttactctgtttgaaatatcgttatttactgtagttgtttctggtgttataatgtaataaaaaagacagatccagtatcagtggcttccacatgcgtgaagtttaggcgaaggaataaccgaggcaagctttgccctgtatcttgcagagagactacactgactgaatctaggacttctggattaatggaaaggcttctcaccactttgttagacttgtccttctctggtgttatactgtcatctgataaaataattcaatagcaagctaagcaacagtatacttcatacatggcagagctcaactttgacttctcagggcttaaaattgaatttatatgacatagcttgtttcatttcagatcatctgtttttcttaagtcatcgcttgtttgattgggttttcagttagcaacatcatagttagcagcccaagattaagaattgtagtatcttctgaagattaagacctcagtcattctccgaaagtatcaatacttggaagtatgaaactgtagatcatgaacacagtgtttcgtcaatgttttttgaacaacttatgttatgtgcttgatttttaaaggagtcagttgacaaccagtgttcatttcttttcagctttaatagtaaataactgatcattaggtgcaattttctattcaagcaaccatgttacatgatcagttggtatttatggcacatcaattttgttagttgcgatgctagcattctgaactgtgtcatcatggtttgcttttagaactattatacatagataataattgatttggagaacacttcaattcctgtaacaaacacgcaagttacgctagcatgtcatgtcatgtgcttattaattcaaaaacaataattgtgtgcatgaacaatagatctgtacggattgtttcaatcgtcaaatcatgaagcatccgctgccgtgatggaaatgcattgcattattcatttccgattctttgacatcatacattctatacgtgtatccttactgttttttattaaaagtggtgattatatagatcaaaatataagtagtgccgatatcatcatttgttgtcagctaacggatcattccttgtgccttctaaatatgattgaaattgtcaatagcaaaatgttgaatacctagctattgaaaatttgcattgtcaaggtttcacgcaacataaagatgtggtgctattttttttagttctgttcatttttcatagcaaagtttggagtacttttattttgttcccctttattcaccttaatctatgcagatttattatctatttatatgcagtaataactaaaaacgactgtgctgctatgttataaaatgattctttgtacaagttatttaatctatcatcacaatttatataaggtaatttatggtcatatagtcatgtctgtcagatacagtagtcatttcctcttttggcatatgatatttggttcttcaatagagaaccaatgatatgtatacttattaaccagtcatggctgccgctaggccgctagtactttgtttacttaggattgattttgaagaagattggcaatgcaagtaagcttccaacaggtctgagcatataaaatggacttgatgcatcactctttttagaaaggtaaaacctgagctcaccaaacactttctagctctgccttgagggaagaatagcaccattgaaaggacaatgcaaacaccaaacaaaaagggcgaagcgcagcaaaggggccggaaaagaagtcctcaacgattttctgttaattgaatgatatggcatcctagagtttgttgagaaacataggtgccattatatttgtctgaagtcccaaagctctcaatctattatgcctacaaggctagctgcatatgcatcattagccacttacacttcaattattcgtgactaagaattcaggaatctttttcttgattatatagacttctgtacaatctgtctcccttctcttatttacttggttgaaaagaccaataatggataagaatctattatttgagaggttaagatgtgatcacataagtccctgtaattgttgctccttgctaacgttcacttaatgagaaaaaatactaataacataaaatttctgccactttacttcactcattgctcattgaagtaaaaaatgttgtgg

SEQ ID NO: 32383 - DNA, 2785 bp, Zea Mays
catcgagcaaggcagcaatcacaaagcggaacggcaccctagggcagcgggagcccgcagcgcacaccgtcgtgccgccgtccgcctgcccccccatcgccctgcgccggtgctccaggcgcgtctcgcccgactcagctacgcacttccgctggccacccgcggcctgttgggcggctcgacctcgttcccgcccttaccctcgtcgcatcggcctcgcagcctcgatcgaggccgacgacctccagcgacctactgcccaggcccaggtagagcgctaggggcctccagtcaaacccatccttgccgttgccggccgatttggtttcttgctttagagatgcaggaggtttctgatccaccagaaacagtaaggaaagcagaaacaaaaaatattacttccattgggaaggatgtgattttcgagcaagatccatgctcttcatatcagttatggggcagtatgaaatttgaagaagatggccatttgctgtctcaggcaaagagggatttgtcacatttggattatagagcacagtctgccgacaccaaatatgttactgaacttgggtcacatgcatgtttgaaggatccattgccaatgggaagagattatcataggcagaagctacaattttctacttcagactgttcttttgagaaggcttctgcattagaagcagcatcaagtagcccagatgcattagggacaatgagaaccaaaatcaaatccagcaccctcagtgcaagtccagattatctttcgtcttatcctactgctgctccttgcatgcggaagtgtccaggagcagttgaacttgatcacggtttgggtcattcagaacattccaacagaagatcagaccaatttactttattttcaagccgtaatggtcgatctgtagaaaaatgcaaagagatggttcaatatgccagagggttccaccatgcagatgagatcaatcatgttccatttcaatggtgctttgaggatgaaggtccttcagtatcaagaggcctgcagtatggcgatgagatcccttctttatctaggaagaagtataacgtggcaccttcacgctcaagtcagtggcactatggtcctcaaaccgcactgtcctcaaggagacccgactatggtgatgagatcccgtcactctctcttcactatggttaccgagataggacccatttgcgttctggtaattggtgccatgatgctgaggcacgtataccgtcaagataccagcaaggtacttctcatggcaatggtcactcaaggaattgtttttccaggattaataccaacgagcaagccaaagttatcacaagcaaacatacctttgcaaaacctaggatgattaacagaaactgtagtgaccaacataggatcaatatgaaaggtaatcgctggagaaattctgaggatttaatggaccaagttcgtgggccgagggcaaataaattgaacaatgcttcagtatcctccactgtgaaagatatcacaagtccattgatccgtagaaatcagtataatagatcagatttttcagttcaatataatcaggccaagttttttatgataaagtcatatagtgaagatgacattcataaaggtatcaaatacaacgtttgggcaagtacaccaaatgggaacaataagctggatgctgcataccatgaagctcaaaatttaatggacagtggggaaaggtgccctgtcttcctattcttctcggttaacaccagtggacagttcgtaggtttggctgaaatgttaggtcctgttgatttcaagaagaccatggatttttgggaagaagataaatggagtggctttttccctataaaatggcatattataaaggatattccaaatcggttgttcaaacatataattcttgaaaacaatgacaacaggattgttacttttagcagggacacacaggagattgggttgccgcaaggtgtgcaaatgttgaaaattttcaaggaacagcctcagggaacatcaattctggatgattttgatttttatgaagaaaaggcgaatgcacgccgcacccaaaagagaggaaattcagagtcgacatatggagctcgattctctgatgactcgaaatctattgtatgcacatttctgtttagagctgtgatgaaacatgttttcaagaatattataaagcacagcttttgttacctgatctttataattgaactggatgcacctctgcgaaaaatgtgcttgccgccgcttttcacgtccttgtgtaggattgcatagcatctgtgaatatgagaataggaaaatttggaggcaaacatggagagttggagtttgttcgagactttggagtaatgcaaatatagatatctgcacaactgaaataaagatcaagatgggtcagtgaactagttgaaggcactgacgctccttcaaagtgtttatatggttgcaattgaaactgcttataattgttatatagtgtttacgtagaagcacggatgtgctggtaaatacagccccggtgcaattttaacaccagacgtttcctgaaacatgtttactttgatatattatagaattccacagttttgttgttttggtgctctcctacgtgctagagtcaatcttattggcatttcacggttaggaacagaaaacccaagaatagctaggaatatcttgcttcaggacacaacggtagcctgttgtggtaacagatgaggacataaacgcttcagtgcgtgaaaatgctaaagaattctgttcaaaagaatgcca

SEQ ID NO: 32384 - DNA, 1016 bp, Zea Mays
tgtaggtgacttttaataatattcccattgccggtcacaaaactcaagtattgtcacagatctttttattagggacataaagaatctattttgtgtggctacaaaggttacccatgctggcagaagcaatctactttcgtgtacgtacgaccaacctactaaaacatgccttgttttatgtatgttgctgcatcccgtatcagagaacacatagctttcgtctcctggggaactaattcgatgccacccgcaactccttttttataaatattatgttgtttgcttatttaaaaccaaacttcatgtatgatacatgttctgtctatgtactcttaagtttgtgttaattgtgctacaacatttatctactttacaaccaaaattgcctgttatacatacatacacaagttcgtccacgtcaacatttatctactctacaaccatcataacacactatccaccacagtatcacactatacatacatatgttcacttcgtcacgcgcgcatgggcgcgcgcaatacactagttaatagtaggcagcccaggatccacagaagaaaggtatttggcccacagcctgaaagtgaaagttgcaggacctgtgttgctggctggtgaaggtagccagcccactgaagactgggtccactgaagaccatcttggtggccacgctcggcgctcggcaggtcgctggaggagaacggaggcatgtaccgcgtcgtctccaaggagtgggaccatgaagatcgagaagatgaccatggcaaggctcagggacgacgacgccgtgcgtcgcgaccttcgcgacatcttcatcttttggttttgaagcacaagagaattggaaatcaacaactggtgtcactggttattcttaagaaccatttgctaccgaatgtagtccaaaggctccttaactcacaaacacatgagacacaaaaatatagaaagaccaaatattctcattcatctattctgttcactggttataataaatggtggtgtcctctct

SEQ ID NO: 32385 - DNA, 273 bp, Zea Mays
ctgttctcaaccgcaccttgctccctggatgcgcgcgcagcgttccgtcgtccctcgtcgtgccgagttctcctctgcgcgcagtcgcgtccctctgcttggctatggccaccgtcatgcccaggatttgtgcatccttctctgttcgtcctcagcaaaaaaaactctggacactcggaccccgcctcgaccaagtcttctgtttcggccgtcgtaggttgtcatcgttcgtcttcgttcgtcttcgtatcgtgtagcagcgcgtcccttatc

SEQ ID NO: 32386 - DNA, 1072 bp, Zea Mays
accaagacccattttttaaattttaaacaatccagtttctgcttattttctgaatgacctgaaagctagcgatatgcccatatatataactacttttgatcaacctgaacactttctcaagtcattgcatacagagcaaaaatcttgatatttgcacccactaacaagatttatttctgtgtctcagtccctctgcatggtccacaatgatctgattcctttggtaactgttgtttatctgcagtcgaggattccagtgttgacgtatcagcagcgacagaaaatttccagagcttaagcctacataatgatgagttagctgcaaaaaagactgctgaagataaccctgtagtgttaattcctggtcatttgcaagttaccaatacagaatgtgttagtttgagctttggcagttttggatctggtgcattttctaggctactcccacaaaagaccactgatagcaatgtggaattccttgtttgagaggattctgcaacagtagatccaatagatgccaggaatcaagattactatgaaagtggtgcaataacttcaccagcagaagaaaatcttgaggccatgctaggaactaacatggagaagtcgatgcaccttctgtttcacaggctaatgagctcagtcaggacgtacttgatccttttgtacttaaatatgacgtgccatcagtttcaagtcatgcttattcaaacatgaacactccacaacctagcacaatagaggacccacaaggaaacaaccaagcacatactctttcccatttgtctaacatgatggattatggctctcatcaagtgactcctccccctcacgatgactttgcggacagatgtctcaattctagtggtgcagctacgaacaacaatctgatgtcctgatcgagagcgatggagctaatgttcaaacttgtgtgtttgaacttgtgaactaaaaatgtgaactgtggatgtgaacttatgtgaatttgtgaacttatgtatttggacttgtgtgaaattgtgatatgaacatatatccatgtgtttgaaatctgtattgtatgtgatattct

SEQ ID NO: 32387 - DNA, 1759 bp, Zea Mays
acggcacggctgacgggcctttccgttccgccgctcgcattctcccaaccctcaccaacggctaaatgcttggaggtatatcgtcgaacacctgacttgcgttgcgtgacagcgcaccccgagaccccgataagatgtggcggctctcttcggccgcggcgctcctccgacgctcgctcgccgccaccgcgcgcctctccgttccgtgtggttcagataacaccgacgatgacagggtcattcaggcgtttaagcggtgctgctcaaccagtgcaagcagtggtgtttcagatgcatcaccatgtgctgcttatgtcgagaacctctgcagatctggcaatcttgttgatgctgttcgtgttcttcgacatctgcatgacgagcagatccatgtcggcctgcacacctttaatatgttactgcaacacacagctgaagcaaacatctttactctttttgccaaggtattcaggtacctgctgctttcagaacttactcctgattcaacttcatatatgaatgttgcattggccctccagaagttggatgactgtgaaatgatactcaaatttgtaagagaaattttggaaatcacacactctagagatgctacagttatgaatcgcattatctttgccacagccaaatacggacacattgataaaagtttggtcattttcgaagagttgaagaaatatgaaaccagcttggatgttgtcacgttcaacactgttttggacatgctagggaaagctggacgggtggaccaaatgcttggtgaggtgaagctaatggaaaaacttaggcattttcctgacattgtgacatacaatacactaataaactgcatgcgaaggcttggtagactagatttgtgcaaaaggtttgctttggaaatggtagagagaggcatcactccagatttgaggacatatactgcactaattgatagttttggacggtctggccatattactgaagccctggaaatgtttcacgagatgaaaaagtcgcaccaaccttcagtttatgtctaccgtgcattgacaagcaacttgaaaaaggctggacattttgaactagcacaaaagctcaccgaggatatgaattcaagtgcttcagagttaataggcccagaagatttcaagccaaataataagggtataaggtttagaaaaaatggctaagaggtcactggttgatttttgaggcctgaattctttttatttgcgctatgtgctcacccgtagtcccatactgctatagattctggcgttggttggaatgttttggagaatgaagctcaaagaattagagagatacaaagctttaagatggcagaagcatgatggttaggcagacatgcagtgatacagggtcaagaggacctactgacctgaatgggcatttttgctgcatcattttaagcagctcacgagtcacgagaaatttgaagactcacccatttagacgacctgaaaggctgcatctgtgactcattgatcgctttatgtaacataggcacactgcaggatttggctgtgtgcctgtgacataggcgaatatcatgctaggcagaaacatgaaaaactactgcttctgcaattagtttttttcctgtgaatctttaggcatgaaaagggacaagtttccatattttctccgtttctttacccttgtaatcagagagtgtataacgtactatgagttgacgaagttcaatttattatcttagctattcgatcgtactatgtactcc

SEQ ID NO: 32388 - DNA, 1490 bp, Zea Mays
ctattattgtctatgtcacgcaacggaggacacagatattgcagttgaactttataagctcagtatttccaccctagatctattgaaactagcatccaaagaggaacagggtgattatgtcggtgcatggtacagtatgcttctgtcctgtgctcaagaattgaagcatggcgtggcactttggcaagagttttatcatgcaaatgtctgcgacagagtagtttctgaaggcggtcactactttattgctcttggggagatatatagagttgcacagattttatacttatccttgcagcgtttcaagccctgggttcttgcagatcctggaatgttgagtaaaatgttgtcttgtttggacagctgcacttatgcttggactagtggtctggaaacggctcttaagatggtcattgacagcagtcacatagattcatcccttgctaaagctctgatggagtccattaagaatattacaaaacttgaggtgcccaatctacaaaaaaatattcccaacaatgagatgcaatgtagactaactctcttgccaagtagtcttctgccaggattgaacttggtcatttggaatggtggtcactattttgttaaagtcgcaaatctgtgggcaaatcggatatctcctgatcctcctcttctgccaagcaaccccacctcttcaatgaacaatgcagcaacacacagccagtcatgctgaataacatgtcaaacatctgaggctgtgacctacactctgatggaagcatcaaatgcatgttgtgtaaaacatattcgtcaagttatcttttttatatacgtaaactgagcaagcaccgtgctgattgagggctgttcttggaagatagagatccaaggtgactgttcctttgcaggtcattcttttgtacaagttgtaatttacaacattctttccatagtgccggatgatgtcactaagtatagcaagtcgaaagggaatgacaagtttggaagtggacgtctggcaacgactgccaacaagtctctcgagattgcatccttccaacgactgtcaagtatcctttttgttttttttccccaattcaacggcataacagctattcgcaagattattgtgttcagaacaagtccagcgcttgaattcatggtgggtggtttctgatgtttagttgcttgtttggctattgatgagtgacgagagaaccgaaaattgtgtaggtataaataaatataaaggccaacatagcaatgcttttgtcttggtacctgtatcaaaggtcattggacattgcaaatttcaaccaaacaaaggaatgaaagtttgaaaatacaaattctcatccataacctccatgatgacaatgtgtaaacgtcgtgacttctatttatggtgatgggcttgtgttttttgaagtataggtgattgacataagaggaccgctgaggcagcagcaagtttcgttcaatgcagctgcagcttcatctatgatcat

SEQ ID NO: 32389 - DNA, 4165 bp, Zea Mays
ctgctccaccgccgcagctgccgagaagacacgcaaaacaaaaccccaagaccacaaggaaacacgagcgctagtggcaggtggcagcgagtgagaaggtgagctcgcctccctcgcgcctcccattcccccctcgcgcagtcctatcgtaggaatgggatgaggccggggcccctccctccttcctcctcggcgcttctcccgtgacaagcctccattctccagtccgtgagcactccactccctgtctccgcttttgtttctctcgtcccaacctccccttttctgcgggtttgatccgcacggtacaggataggggaggatggatttgtccaggttcgcctccggcgtcgggcccagccgcgtggccccgcgggcgggcctgcagatcggcgccgccgagaatggcttccgggcctgctccctgcggcgagcacggcaccgcggcggcgggaacgggaacctcacggccgccgcgtccaccctccgcggccgcggcgggctcttctacctggctcccacgcgccggagtcatcccagtctccggctcttctacctgcttcccacgcgcgggagtcatctcagtctccgcgccagatggcggccgcgctgccagggcaacgactcattggcctacgtcgacggccccttggagaccgctaagggctccggcgaggtcgacgacaacgtgcccaccagctcggggtccgacgacgacaggggcctcgccgacgtcgacggcctcagggagatgctgcagaggtccaggaacgagctggaggtggccagggtcaacagcaccatgttcgaggagaaggcgcagcggatatccgagtcggccatcgcgttcaaggaccgcgccgacggcgcccagagggatgtgtgcgcggccgtagccaccgtgcaggagatcatcagcaaggaggcggacgccaaggaggccgtccagaaggctaccatggcgctgtccatggccgaggcgaggctgcagctggccgcggaggcgctggaggccaaccggggctcggtaggcccgacggaggttagcatcgaaggcatggagcaggaggccctcctgtctgcacaggaagagattaaggattgtcgggcagccctgtcgcggtgcgcggaggagctgagtcgtgtccaggacaagaaaatggagctgcagaaggaggttgataggctgacggatctcgctgggaaggcccagatggatgcgtccaacgccgaagaagatgttgccaatataatggtgctggctgagcaggcggtggctcttgagatggaagcctcacagcgtgtcaacgatgcggaaatggtgctgctgaaagcggagaaggccatagcctcgattgataccgtggtggagctaccgtcacctgctgaagagcagagaagcactgaagaagacagcgtttctgaagggtacgagtatagcagcgatgtcactgatgatgtttatgtaagggatgaggtgtcaagtatcgagcgcctaatggtcggtgacttgactgttcagggctttgagcagcttgaaccatcccgtgaaatatatgatgaagaaagcagtaataagatgtctgttgagcctcagaaagaagctgagtctgattcagataagtcgaaacaagggaagaagcaagaaatggaacgaaaggagcacaccaaggaaccactgagtgctccaaaagcactggtgaagagatcatcccgtttcttctcggcatctttcttctcctccaaagttgatggagagtttacacctacatctgtcttccgagggttaatgaaatcagtgcaaaaacaagctccgaagcttgttgttgggatattgcttctcggtgcaggggcattcttcttaaatagggctgagaagagtcaactatttcagcagcaaggcattgccacaagtattggaaaggtaacctccacaacaaagcccatagttcttgagatacggcgaattccacagagagtaaagaagctaatagagctcttacctcatcaagaggtaaatgaggaagaagcttcacttttcgacatactatacttgcttctggccagtgttatttttgtaccattatttcagaaaatccctggaggcagtcctgttcttggatatcttgctgctggtgtcctcattggtccatatgggctgtccatcatccgtaatgtgcatgagacaaaggcaattgcggaatttggagttgtgttcttactatttaacattggacttgagctttctgtggaaagactaagctcgatgaagaagtatgtctttggcttgggatctgctcaggtgctggctactactgctgctgttggtgtgatagctcattgttttgccgcactaccaggaccagcagcaattgttgttgggagtggcttggctctgtcatccacagctgttgtcttgcaagtattgcaagagcgtggtgaaagtacgtcacgtcatggacgtgctacattttctgtgttattgttccaggatttggctgtggtggttctgttgatattaatacctctcatatcacctaattcttcaaaaggaggggttggtttccaagcaatagcagaagccatgggaatggctgcagtcaaagcagtagctgctataactgccataattgctggaggtcgtctgttgctccggcctatttacaaacaaattgctgaaaatcagaatgctgagatattttcagcaaatacactccttgttatttttggcacaagtcttcttacagcccgggctgggttatcgatggcacttggagcttttttagctggtctgttactagcagaaacagagttctcattgcaggttgagtcagatatagctccctatcgtggtcttctgttaggacttttctttatgacggttggaatgtctattgacccaaagctgcttctgtcaaacttcccagcgatctctgtgatattgagtctcttgataattggaaagacattgttagttacatttgtcggcagggtgtttggggtttctgctatagctgccattcgtgttggcctcttgcttgcacctggtggtgagtttgcttttgttgcctttggagaagctgtcaaccagggtcttctatcacctcaattaacatcgttgctatttttagtcgttggcatttcaatggctctgacaccatggttagctgctggagggcagtttctggcatcaaaatttgagcagcatgatgtgaggagtttattgcccgtggaaagtgagactgacgatttgcaagaccatatcattatattaggctttggacgtgttggatcattgcacaactcctgtcagagcggttaattccttttgttgcacttgatgctggaagtgatcgggttgcagctgggcgtgcacttgatcttccagtgtattttggtgattctggaaagcagagaggtactgcacaaaaattggagctgaaagagcttgtgctgctgcaattactttggatactcctggtgcaaactacagagctgtctgggcgttgaacaaatatttcccaaatgtgaagacatttgttagagcacatgatgttgatcatggtgttaatttggagaaagctggtgcaacggcggttgtccctgagaccttggagccaagtcttcagctagctgctgctgtccttgcacaagcaaaactcccaatgtcagagattcaggaaaccatcaacgagttccggaatcgtcatctgtcagagcttacagagttgtgtgctacgtcaggaagttctcttggctatggattttccagagctacgtccaaatcgaagtctttcacctccgacgacgaaaaccaaacagtggatggcacactagcaatctgatgctgatgagataaaatgggatccccttgctagcgctagattggttgcattgttcagtagataatcctgtttcatgtggaaggagggtggaataattattcatataagagctgtcataaaagttggcgtccatttttgtatgttagacacttagtgcttgtttgagagtaatggaagggactgagagggccaaaatcctttatgccccgtttgtttccttttattttgaggacttggaatctaactattggaataggctatttttttaaaatgtgacattccaccacttccaaagttatcatatgagcctatctctaatt

SEQ ID NO: 32390 - DNA, 1827 bp, Zea Mays
cctgctttcactccattcgcgtctcggggtttggaccagccacccggcggcggcgggcaaacacagacagggccgcagggccgagcgaccggagcgccgccgccaccggcaaagccacggcacggcacccatggagtcgcgcgccctcctgcacgcccggcctgccgccctccctgcccgcgccggcctgcgcctccctccccagctcccgcgcccgcgggcagtctccttctcccccgccgccaagcccgcgctccggtccccgctcctcgcgtcgaggggccccttcctcccgcggcacgacgcgcttctggggaacgggttcctgaagcagagagcggtcagcgttggcggtgacgtgtccttccgcgcccaggcggcggcggcggcggtgccggcgccgcagccggaggagtccgctaaaaagttcctcggcatcgacgtgaagacgctcaggaagatcgtgccgctggggctcatgttcttctgcatcctcttcaactacaccatcctgcgggacaccaaggacgtgctggtggtcaccgccaaggggagcagcgccgagatcatccctttcctcaagacctgggttaacctgcccatggccatcggattcatgctcctctacaccaagctttcaaacgttctctcgcgggaggcgctcttctacaccgtcatcttcccgttcatcgccttcttcggcgccttcgcctttgtgctctacccgctcaggaacgtcatccatcccaccgcgctcgcggacaagctgctcgccgcgctcggcccgagcttccttgggcccgtggcgatactgaggatttggagcttctgcctgttctatgttatggctgagctctggggcagcgtcgtcatctccgtgctcttctgggggttcgctaatcaggtaaaaggaaaggcagccattgatgttgtttgcaacccactgggcaagtccggcggtgcacttatccaacaattcatgatcctgacgttcggatccctggcgaattcaactccataccttgggggcatactgctggtcatcgttctcgcgtggctaggcgcggcgagctcattggacaagcagttctcgagcttggctaaggaggacctgaagaaggataaggctgcccgagagaaagtagaaccctcgctgctcaaggcgcctgcagagggcagtgatgatgtactggcggagcagacaaatggatctgtgacgccccaagcaaccggaacggagagctcgccgtcgaactcatcccccattcaataatagctccagcatcataagttgtactagctaggagagttattacagcgagcagaaataattggtactccctccggttttttttatatatttggcgttggttagtgtaagggggtgtttggtttctagggactaatgtttagtccctagattttattccattttagttccaaaattgccaaatatagaaactaaaactttattttattttctatatttagcaatttatacactaaaaaggaataaaatgaagggactaaacattagtccctagaaaccaaacacccactaaatttgactagctagcgtcaaataaaaaaatggaaatggaggtaatattaaaataactcatggttttcaagtctgtaacggcgtgcagcttcaggctgctagtgatttttgtttgtaacatgagcaaattttgacggccggcggcgaacgtcgttctgggaatggccccgcccctttgtgccgatgtcaaatgcataaactgtgtgttttgagccgatatgaagcatggttctctctcaagagtgttagctgaatgttcagtagga

SEQ ID NO: 32391 - DNA, 959 bp, Zea Mays
ccctctcctccttctgccgccacaagaaaaaggaaagcgccgccaccagaaatagccattgacagcaagtccggagagagtagctgggtggagatatcgccacgtctcaagtctcgggggcgaattcaggagctttggtcgcgttgaagggtctcgcgcgaggtgttgccgtgtatggtgggtgctcggctggtcgggaactcgccgccgtcgtgggatctccgtgtccggccactgcgggtcgtgccggctcacccaccatctcctcggtcgtcgacgagccagtgaccaaggatctaggtgtttagcaggtttgctgagcaggagctcattgaaggaagggaggattattagacaacagcaagcagaaatagacccttcgaatcctccaccggctaggacagatctagtggttgcagctcagatgcagatgctggaatagatggcaaatactttaacggatatgcaaactcagatgcggcaggaacgtcaagagatgcgctaggaaaggcaagagatgcatgaggaaataaggcaagagaggatggtacgacagcaacaagcaccaatgcctccaccgccaccaccagttccaccccgggacaaccaccgggagttcatgagtcacaagccaccgacattcgccagctctccagatcctctgcgcgctgatgattggctgaagtcagtggagaagatattgaatatcacccaatgctctgaccgggagaaggtgttttatgcttctggtcatcttaatggtcctgatgctgattggtgggattcttacattgctgctcatgatgctgccaataatatcacctgggcataattcaccacacagttcagaaactatcatattcctattggactgatgaagataaagaaaattatatatgtaggtagctttgtccatactgaggtcttggaattgtacattaatttaggaataaaaaaat

SEQ ID NO: 32392 - DNA, 981 bp, Zea Mays
ctctcctccctctcttcactatcccgctcgttccgttgaggtcgctaggcatctttgatgatcccgcccgccacgccatctccttgctcccgctcgactgtgcgtgctccacttcacgcgcctatttcttcaccagcagtccagcacgccctcctgccctcacgctcgctcccctccctggacgcccgtgcagctcccgcgccctgccatcctttgccctgttatcctcgcgccggcgcgccgctcctgtgcctgtcgtcctcaccatccttgcatgagtgctctggggctccctccctctcgtgtcgccatgtacaccatcgcgtccccgttcagcaccggccgcaactcatccctttttctcagtttgccccaggaaggctggatccggaggcacattgcccggagggacagttggatcaatctggtgttgaatcgatgccccgtagggtggttcctcccacaagctcccatggccgggtgcccgggtgctagaggatctgctcaatgttgagcaagtcgacatggaggcctgcaatgtggattcagctacttttaggaggattactacgtggtgaaagcctgtttcctgatgcccttgcttggggacaaacaattgttggtgcccagtgaggtgtcaacactgatgctacagaagctacggatgccttgatggaagcgggaactgagacatgggaggtggcgtagaggtgtttacgttttctattgtaagcgtgaatctgtgttgggtcggccaaagagacagcctataaaatgtaataatattgggtccaaaaatgagaaggaaaagaaaagaatactgatcacaccaatcaacttgtgtctcacgtttgccacgcttgcttactcggtggcggcctgtggcgtgctagcgacgacacgctgacagccaagggacgtcacaagtacttacccctaggtttggagaactgcagtttcaaagattggtggtgtcatgtt

SEQ ID NO: 32393 - DNA, 2281 bp, Zea Mays
caagcgggggcataattgtgatatggtatacactattcttttaatagatagtaaagatagatactataataataaataggaggttgagatcgcgaggggagcaagcggaggtataattatgatatggtatacactattcttttaatagatagtaaagatagatactatactaataaatacaaacaggacgatagttgatgtagcggttgattcaaccttacataaaaccaaatatagcacgaaattaaggaaaaacaataaatgaagaaaaagaaaagccagtcaaacccaaccacctcggcatcggggtctccttcccctcctccggttgtccggtcccccagaaaccgtgtccttccgtcgtgacagctcccgaccttctggcggtcttcccctctcgtagtcggcgcgaatcccgaggtggaggaggaagaggtagagggggcgggccccatcatccatgagccttgcgggctccgcgctggaggcagcgctactggcggtggggcgcggcctcgacgcagctggagaccaccggctgctttactgcaagggagacggaaggctcgtcgcgctcgaggaccgtgcgcgggacctcccgctccccgacggcggcgtcctcccgagcgtgccccacgacgtcgaggtcgagcagtgccgcagagacctcgagcgcatccgccccttcccgtccgggtccggcccaagctccgccgcagcggacggtccctttgtctgcagcttcgataagatggctgagtatttcaacaggaagtcatgtttgtccgagacagtaccgctgggttccttcaactctctcttcagcttcaccggttcttggaagaatgatgcggcgaccacgaaggcccttgcgattgatggctattctctgcctctgtttcgagttaaaattaggaattctgaactgacgctgcttgagagcgttaagcgaaggatcccaaatgtttgggatccatcagcattggcaagctttattgagaactatggtacccatattattatctctgttacggttggtggtaaggatgaggtatacattaagcagcattcattgtcccaattgtcagagctggagttcaaaaattatgcgagggaaattgggagggaaagatttgcagatgtggaaaataagtcaaatgcatcttctatcaattacagtgagaaggatatgacagtaatattcagaaggaggggtggttgcgaccttgttcaaagttttagtgattggagaggaactgttgcctcagcaccagatgtcataggcatcacctttctatcaattgtctctcttgttgacgatataccaggaaagaagcaccttgctcgtgcagttgagctatacttgacctatctctgttggccgtcgaccagttgttggcctcaaactgattttggaaggagccaaacagaatcgtctggctattcatttgcagcaccttggctcattaccaaaaatattcctacctcattgggactcctatattactattggacctccaaaatggcaaggtcctgaagaacaggacagccgatggtttgagccaatcaaatggaagaactttgctcatgttagcacagcacccatagagtacactgaaacaaatattacggacctatctggtgtttatattgttacaggagcacagttgggagtgtgggattttggtgcaaagagtgttctccaccttaaacttttgttctccagggttcctgggtgcacaattagaagatcagtgtgggaccacagcccatcaagttcctcggtacatagaacagatgaatcttcgtcatcctcaagtgataatgctaaacttctgaagatcgttgacctgacagaaacattcaagggcccacaagatgcgcctggccattggctgatcacaggtgctaagttgggtgtcgagaaaggcaggattgttgtgcgtgcaaagtactccttattgaattattaaccaaatgtttaaatcattcaatcactctgatattgagcactgtgttttaaggtagcatttgttcttttgtttttcatgtatggcttttgttcccccttgtaacatgatgtggatcatgtttcttgttgatgatgccgtgagtgaagcactacattcgttctcgaatatttgacgtccactagtccactagttcattactaatcagcgataaataaaaaagaactcgaatatttggcgtccgctagttcattactaaacaacgataaataagaaagaatggagggagtggcatatgaagatgttatggt

SEQ ID NO: 32394 - DNA, 1602 bp, Zea Mays
agttagtgtagttttcaagtgcttgcctggtttgggcatacgatgaaaaaaaaagaccttcaaattcatcattgtttcgaaagaatagttatttttcctctaaatggttcactgcggatttatgaaaaatagtggtgcagatatggatatcattgatgtcaagtacatacagaaatgcaaattcgtggttgcctctggtattttcgatggttacgacatccctcaccagccatccaatatcagccgccggtctcagaagctgttctgcttcctgatggtggtggacgaagtatctcttgattttatccaaaagaacaccaccgtcaagatcgacagcgctggagggaaatgggttggcatatggcgacttctaacagtgcaccgcctcccattcgacgaacctagaaggaacgggaaaatacccaagatcttgacgcacagactattccctcaagcttggtatagcatttggattgacgggaaaatggagctcatagttgatccgctgcttattctcgagaggtacctctggcgtggaaaatacacattcgcggtggctgtccacaagcatcataggagcatctacgaggagggcgacgcgatcaagcgacggaagcgctacgcccgccctttggttgatcttcagatgaagatgtactattacgaggggatggagccttggagcccgaagaaaaagatgcctggcgatgtgccggagggagccgtgctgatccgggaacacacagcgacgaccaacctgttcagctgcctctggttcaacgaggtgaacctcttcaccccacgcgaccagatcagcttcggctacgtggcgcgcaggctcggcgacgctctcgagctcttcatgttccccaactgcgagtacaactcgctgttcgtcctgcacaggcacacgagggagcactcgtctaaggtggagtgggccaaaacggtcgacgagatcgtggagaaggggctgagggagagtagaggagggttggggctgtggactccgtaccctgcggacctcagctccgtggaactccctgctgtaagaagaacttcgccggcaggataaggctaggctgtcaaagaccacaaagctcccagcctagcctgccgatcctgtgatctttgattcgttcatggttgtacagagtagaactccactgtttgtttgttttttttggcgtagattctgtaggctgacgcttggagtttgttgcttccagttctgtacaacactcatctacggaggtagcacagaaggatttctcacaaaagaaaaatcatgactcgtcaggtctagtatagggatatcaaaacagcattagaagtcgtcacacacaaaacaaccatagcacctgaaaatgatcagcgccaacgcatcatgcacttccttaattttaatgaatcgtttgcctttcccctgatacaatcacatcacatcagcattctgtgacctaccaaatgttcctacaccagaatcacaggacgcgcgtttcctttacatttacgtctggcgcctgacgtgtggggccacaccatagccgcagctggccccacggccctacacgtgagtcagccagttgcagctatgttcac

SEQ ID NO: 32395 - DNA, 3131 bp, Zea Mays
tttttttccttcgacttcggctatgaccaatgccccacctagctgaataggcgtaacaaagctacctgaaaaaggcaaggtaaggtgtaccttaaattgaaatcgacaaattgcgttttgccagatggattctttagaaagattcccggataaagttcagtataatatttagttagaatctaaataaaggcgcatacgtgggcgggcagggggccccactacttcttcattcaggggggctagcctcatgacttcccactgggcgaggggtgcacctaacccacctactcactcatcaattacggtgttcagctgacttgcacagaaagacccctattgtttagtaatttggcgcctgattgactgttgtcaactaatcttttcaatgttcgattctactctatgttagaacatttcagtgaatgctatttcgatctaagtggtcctattctctgtcccgtgctaggaagcattactcctcttttcattccaaattcttcaataagaccgatacgattgattggtctgtgcgtttctcttattacttttttgtatccccctgttcctcggatacaattcgatccttctacggccaattctcaatttgtggaaagccttcgatggcttccttatgaaaacatccatttgtatatgggtatagacggtctttcattattcttcgtgatattgaccacatttctgatccctatttgcatttcagtgggttggtctggtatgagaagttttgggaaagagtatattacagcatttctaattcgtgaatttctaatgatcgccgtgtcctgcatgctggatcctctactattctatgttctttccgaaagcgtgccaatccctatgttgtgcggagctgagcatcttctattcgctgggatcaagcttttcctctgcaggggccttgtgcagtaaaccccctacgggcggtcccccgtcgtcgtaaagtagtcaaggtccccgcgaagctttcgggaagaggggtagtcttgtgcgtaagcatagcatttctggtcgaaccaccgaaccacacatctttttttggtgggagggtactccgagtagtgggtacctcgtaggacctcgacccgcctactcaggtcttgtatggatatgcaggaaggggtgctcctaggtgtgtgtaggggggtgtgtttgttcgcgagaatggattcctcgtcaagtcagggggggtgtggacacacttgcgcgaattcgggtaacggctacaagggataaaaataaaggaaactgtacccgaccagggatggacgtaaactcgtaagctaccgagggtagggataatcgtccaggtcttattgttgtttaaagccgccccgccacagcaggcaggttagttcctctgtcgttgccggagagttcttggcgaagagaccttaggataagttgctaaaacaaacggaggggaggatcgacccgttcagtagaattccgaagaaagactgttggcagcaggtggagacatttctttggcccccttccaaataaatgcgggcagggtagagctcggcagagggttcgagaatagggtagggtcctgtcctaataaagataaataaaggggcgggtccctttatgcatgcatcttcgtacaagtggaggccggaaagatcaaaccaatagaaccgctcacatcacagtagtcgtagttgcgtaaaggccgtggggggcgaccataacataaggcaatgactttcacggatctctctctatctatagatataacgaacgggcgggttcgaaaggtagggttttttacggtcgggtcccctaccactagtccggctagccttcttcgggcaggaagcaggccgggcccgacgggcgggcatctcccgcaacgcaagctgcattgttcgccaccacccgagaagcaaaagattcgagagtcaaggcggaaaagacaagcatagtggtctaatgacaagggccgacgacggaagctcgggacggagccgtatgatgcggaagtctcacgtacggttccctgagaagggagtggctacccactggagcttcgaccaaccaccaccggtcaattccgctttggggccacccctgactctaccatcattataggggtatggggttcgagacaaagaaagatcaaggcagcatatcagtttttcctatatactttacttggatccgtttttatgctattagctattctgttgattcttctccaaacaggaaccaccgatttacaaattttattaaccacagaatttagtgagcggcgccaaatccttctatggattgcctttttcgcctcttttgccgtcaaagtgcctatggtaccagttcatatttggttacccgaagcccatgtagaggcacctacggctggatccgtcatcttggcaggaattcttttaaaattgggaacctacgggtttttaagattttcaatacccatgtttcccgaagcgacactttgtttcactcctttcatttatactctaagtgcgattgctataatatatacttccttgaccactttaagacagatcgatcttaagaagatcattgcctactcctcagtagcccatatgaatttggtgactattggtatgtttagtccgaacataccgggaattggaggtagcattttacttatgttaagtcatggactggtttcttcagccctttttctatgtgttggtgttctatatgaccgacataagactcgacttgttagatattatggaggtttagtgagcaccatgccgaatttctctaccattttcttctttttcactttagccaatatgagtttacccggcactagcagctttatcggggaatttctaatcttagtaggagctttccaaagaaatagcttagtagccacattagcagcgcttgggatgattttaggcgcggcgtattccctttggctatataatcgtgtggtttctggaaatttaaaacccgatttcctctataaattctccgatctaaatggcagagaagtttccatatttctaccttttcttgttggagttgttcggatgggtgttcaccccaaagtgttcccggactgcatgcatacatccgtaagtaacttagtgcaacatggcaaatttcattga

SEQ ID NO: 32396 - DNA, 972 bp, Zea Mays
tggtacgggtgacaggagatgatacaggcgaatcgttgcagagagatgtgatataggggagagattgctgacgtagtgggtgaaattccgttcaagacagtctcagtcatccacttcccctctgcaccttgaacgtcctccgcagaggcagctccccaactgttagaatggacgacacggaagccgccaagaacacggccaccaccggccccactttcgcctcccctctcttctctttctccaacctcggcggtgcttccttcggctctggctttggcttcaaatccagcgctcctctgccgcctgccatcgaggtccagctctgcgaggaatcacccgttccggcagctaggttggagccagtcgtggtcgatgactccttgacgatctacaagggcagagtgagtacatctgacgtgtttggtgtcaaagactctgatttggtccctggaaaatatgaaggtgggttgaagctgtgggaaggttcattagacttggtgaaagccctgaattctgatatcaaagaagataaatttcatctggaaggcaaacgcgtattggagcttggatgtggacatggcctccctggcatttttgcgggtctcaagggtgctgacctgattcatttccaagatttcaatgccgaggtgcttaggtgcttgactataccaaatgtaaaagtcaatcttttcaaggattcaccagaaggaacatgtacatgtccgattgttggtttctttgctggtgattggagtgaaatggataagctactactttgcggggatgctgagcaagacaaaacagccagtggtgatacagaagtgcttgcgctaccctgggggtgtggtttacatggcagggaagaagcattactttggagtaggtggtggcacaaggcagtttctgcgcttggttgaaaaagacggaactcatcagtcatcactactcaagacgcaacccaagcaacaactc

SEQ ID NO: 32397 - DNA, 1791 bp, Zea Mays
cttttacttttcccgagttaggatttgagagttcaaatgcgctatgcttaggctactactgatgttgtgaaagaagatgacccaacaaacaacgtgccagacactatctttgcgaagattggcctgcagctgcacaggagggagaaccatccccttgggattctgaagaacacaatttatgattactttgacaagaacttcactggacagtttgacaagtttgatgacctttgcccccttgtttctgtcaagcagaattttgatgatgtcttggtcccttctgaccatgtaagccggagttacaatgacacatattatgttgatgatcaaacagtcttaaggtgtcataccagtgctcatcaagctgagctgctaagggatggacgtacacactttcttgtaactggagatgtttaccgtagggattccattgattcaactcactatcctgtcttccatcaggtacttttgttttgccgtactcacttaaattttcttaatgaggtttgttttggtaatctttaacacatgtagatggaagggttccgtgtgttctctcctgatgaatggtcaggttctggcttggatgggacagcatatgcagctgcagaactcaagaaaacactggaaggattggcaagacatctatttggtaaatcatttgtagcttgttccttatcatttgaggggatgacgaaattgatccttgtttcagataaactatagaaaaatgtcatctgcaggtgctgtagagatgcgatgggttgacacatacttcccatttaccaacccatcctttgagctcgaaatatattttcaggatgattggttagaggttttgggctgtggagttaccgagcaggaaattttgaaaagaaatggcaggagagatcatgtggcatgggcctttggattgggattggagcgtcttgcgatggtccttttcgacattccagatattcgactattctggtcgaatgataaacggttcacgtcccagttctcagaaggcaagcttggtgtcaagttcaagccattttcaaagtttcctccttgttacaaagatatgagtttctggatcaatggtgcatttacagaaaacaacttatgtgaggttgtcagaggaatagccggggatcttgttgaggaggtaaaacttattgataatttcaccaacaagaaaggcatgacaagtcattgctacagaatagcatataggtcaatggaacgttcgctcacagacgaggagattaacaatcttcagttgaatgtcagggaagctgtgaaagataaattgaaagtagagttgagatagcagcagctaattatgctgtcatagcatggactaaattttgcctgtctttatgtaaatcaattaaaaaggattttttatctatcgagaaaatgcgccatttgttcctggcattgatcacgttctcttctgtttagggaagagaaaaggtccctgttccatttgggaatcatatcttgtaattcataaggctttgtttggttgcacagggatcaaaggagattgaggaggattaaatccctctctattcaattttgactaggtagagatttaatcccctctaacctccttttaatccccttgtaaccgaacaagccctaagatgatgagctgtacacttctcactattttggaggacatgtggtttgggaattcatgtttggcctttcaattcaattttggccgttgtacattatttgtaacgaacaagtaaaagcactctgtatataaagtctaggatggttcaaatctgaaattaa

SEQ ID NO: 32398 - DNA, 6241 bp, Zea Mays
gaagatcttctcacacagtttgagaaaaccttcgaacccctgccccatccatacagcgcggtacgtagcccatgtgaaaatgatagcgaccaaggattaggccttagaccggtgctttggcgtgagactaacgaggtattttttttacccccaacctgaaatccgctcccatggggagttgaactcaggatctgagaggtgctactcacaccacctaaccaactcagctagtaactataaataaccattttcttatatgtagagattgttgggaaatgcacttgttttcattatgaggccctaaggcctgtatatatacatcggtacatgaggataaatatgcactaaacaccttattcaatggggatatataggtacatgaggataaatatgcactaaacaccttattcaatggggatatttaggaatacatatatatacatctaacaccccctctcaaactcaaggtggatcaatgacactaagtttggagagataaaactgatgctaagctctggtttgcgccctgatgaaggtaccagccaactgaagctctgaaggcacatggcgaagaacaatgacatcatcatcctgaatctgcgctcgtgtataagaagcatcaacaccaatatatgcttagtaagctcatgctttaccggatcacgaacaatactaatagcacatgtactatcagacaaatgagaagtcggtatagatacagaaactccaaaatcaacaagcaaccaccgtagccaagtcacctctgtcgtcgcaagagccatagcacacaactcagcctttgtactcgaacgagaaactgctaattgcttcttagtcttccaagcaatgagggaaccactaagaaaaacacaatggtcagaaagagattaaggatatgagaaataactagcccaagtcacatcaaaataggcatggagctgcaaggagctagaacgaggaaagaacagatgacaagagatagtcccacgaagataacatagaacacgaagaagatgattgtagtgaagttgagtgggggtagatacaaacatattcagaatatgcacatgatacgagatgtcatggtgagtaacaccaaggtaaaccagactaccttcaatgtgacgatatcgagtagaatccgaaagaggctcgccattagtggcacaaaggcaaacattgagctccatggggtcttaacagtgcaatgatcagagacacacaagggtgactagcaagtaactgggcacgaagaggctcaaacttttcacgcggatgggtaagcctagacattttacccgctacacgctacccgaacccggacccgaaatacccgaacccacagtacccaaaatctatttcggataaaaaatgctattacccaaaattagtttgggtagtttggctagcagcacctgatacccgaactacctgtaacaacgggtaatatgccctggcgtgcgaggtgtcggagtctgctatctgcgaaccgtggagacgtcagaagtggagtcatgcgacgacccatgagcccatcaagccaaggcgcattcgctttagcttcatctgatccgacgcccgacagtcgacgctgcataacctagcagtagccgccaactgtctccttgtcctcggtggcggtacccgcctgcgactacgccggacgccggttgcttcttcaccagtcaccacggccgtacactccgttgcacagtcgctgcccttactcccttcgtccctcgtccacggtccacctttgcccagttttgatgactggtagttctaaattcttttcctgtaaatcttcaagccgtatgtaatgtgctttggcctttgggcgtatggactctggaatgttgggtgtgtcactgtcagtgtgagcatgtaatgactgttgttcgatgagagcagatagcttctgtcaaatatgctttgggcttctgtcaaatatgcttttgatgagtgatgaccgctagttctattcaccggaaatatttcgggtaaatcgggtataccgaactcgaacccgaaattacgggtagagttttttcttggctgtaatggggtaacaatttctattacccgaatttatcaaagcccgaactacccgacccgaattaaacgggtaacccgaaggtcccgaacgccagtcttatggatgggtcaagaagtcatatgtgcgacgaaactcaagatcagtcttttgatccagacagaactcacatgtgctaggagacatctacagactaagagtatcaagctgacgctaggcgtcagacatctggctatagaattcatcaactgtagaatctccctgacgtaaagaccactcctgacgaatggcagcaagataagtagatgtccagcacacacaacaatcacgaagaagggtccacatctgatgagaactgtcactcaacaaactctgtagaaaagcgagcctccacactagcggtgagaatagaaccagctcaagcatcctcatccatccatatccgatatgcactctactgagcctcatatgatgccagctgatcatcataatctgcaagtagagtgcatcagctgctccctatactgctccattactcgtcttattaagaaaatggctttcatggttgaccttctagagttctaggcacgaaaccaaattggttaaaagagattctcattattcctctcaggcggcgctcgataactctcttccatatcttcatagtatggctcgtcaacttaatttctcggtaattagtacaactttgaatttattcttgtagatcggttccgatatactttaccactcagacatctttattttggacaaacccagccagaagtatctatattttgggatgtaggtagtagtcgataatgtttgttgtgtatggaaaaaaatcaacatatccctgggtgatttagcttacagccgaggatctggaaagcacccacaacttatgccttccacccccagatgggctgttgccaatggagctggagttatattaagtgtctgtgatgaggaggtagctcgttatgagacagcaaatttaacagcagcagctgttcctgcgcttctgctacctccgccaacgacacccttggacgagcatttggtggctggtctgccccctcttgaaccatatgctcgcttgttccatagatattatgcaattgctacaccaagtgctacacagaggttgctttttggtcttctcgaagcacctccatcatgggctccagatgcacttgatgcagcagtacagctagttgagctacttagagcagctgaagattatgcttctggcatgcggaattggatgcatctgcatttcttgcgtgccattggaactgcaatgtcaatgagagctggtattgctgctgatacagctgctgctctgcttttccgaatactttcccaaccaacgctgctttttccaccactgcgacatgctgaaggagttgacgtacatcatgaaccactaggtggctatgtatcatcatataagaaacagttggaagttcctgcatctgaggccactatcgatgccactgcacaaggcattgcttctttgttgtgtgctcatgggcctgatgttgagtggagaatatgtaccatctgggaagctgcctatggtttgctaccactaagttcatcagcagttgatttacctgaaattgttgtagctgccccgcttcagccacctacactgtcatggaacctgtacttaccattattaaaagtattcgagtatctacctcgtggaagtccatctgaagcatgcttgatgaggatatttgtggcaacagttgaagctatacttaggagagcttttccttctgaaacaccagagcaatccagaaagccaagaagtcaatctaagaatcttgctgttgctgaacttcacacaatgatacattcactctttgttgaatcctgtgcctcaatggaccttgcctcccggttgctatttgtggtgttaactgtttgtgtaagtcatcaagctttgccagggggcagcaaaagaccaactggtagcgataaccattccctcgaggaagccactgagcattcaagattaacaaatggaagaagcagatgtaagaagagacaaggccctgttgctacgtttgattcgtatgttctagctgcagtttgtgccttatcttgtgagcttcagctgttcccttgcatttctaagaatggatcacattcaaatttaaaggattccatgaagattatcatacctggaaaaaacaatgggatcaataatgagctacacagtagcatcagctcagcaattattcatactcgtagaattcttgccatcctcgaagcccttttctccttgaagccatcatcagttggtacctcatggagctatagctcaaatgaaatagttgcagcagctatggttgctgctcacgtttctgagttattccgtcggtccaggccatgccttaattcactctctgcactgatgagatgcaagcgggatgctgagatttctaccagggcatcatccctctaccatttgattgacttgcatggtaaaacagtgtcctccattgtgaacaaagctgagcctcttgaagctcacctgacccttacaccagtaaagaaggttaatcaacatcgctgtgaggaaaacaacaccaactcatcggatagtgccaagttggaaaacaagaatggttcaacacataagaaaaacggtttctcaaaaccacacttgaaatgtgcagaagaggttctgaacggcaatgttgcaagtacatctgggaaatccattgcaagcttacaggtggaagcatctgatttggcaaacttccttaccatggatcggaatggggggtaccgagatgtctgcagaaagcacatcagctcaccaaggatggaggaaggttgtggatgcactttgtgatgtcgtttcagcctcaccaaccaaggcctcagctgctatcgttctccaggccgagaaggacttgcagccttggattgctagagacgacgaacaaggccagaagatgtggagagtcaaccaacgtatagtgaagcttatagcggagctcatgaggaaccatgacagccctgaaaccttggtgatactcgctagtgcctctgaccttctacttcgtgctactgatggaatacttgttgacggtgaagcttgtactttgccacagcttgagcttctcgaagtaaccgctcgagcagtccatcttattattgaatggggagatccaggtttatcagttgctgatggcctttctaatctgctaaagtgccgtctttcaaccaccatccgctgcctttctcacccaagcgcgcacgtgcgcgcgctcagcatgtccgttctccgtgacatcctggaccacggatccgtgagccccaacaagatcagccgaggggaacagcagcggaatggcatccagagcccatcgtaccggtgcgtggccgcaggcatcctcaactggcaagcggacgtggagaggtgcatagagtgggaagcccacagccgccgcgccaccgggctgacgctcgccttcctcagtacggcggcgaaggagctcggctgccctctcccgtgctgacgaggccgctcccggatctgatctgacatcggcggccacttgacggccagtgctggcagcttgctgcgggaccggcgagtaggacgctaatctctcgaccaaggacgactcgccggtttgttcacgtgatatgtgatcaaactgatattagatggtgtttccaaagtatatatctactgaggggcttgctcccatgatgcgattttattccaatctgacgtcagatgctttacgagcatatttaactgcttgagctgtacgtagcttgtattacttgtaactttgtgtaatatggttattattgccgaagaagcagaacatagctttttcttttttttctctctcttttttagactgctgctagatccttatccatgcgttgcaacggagcgccatatagattgaagttccccttgcagggctccttgtacggtctataacatgaacataaagatggcatccagtagtcaatcagcaactatcgcaatgagattggtcttctgcacgtgacccagtttagctcccgtgcagggctctctgtaacctactgtgatgtcccatgacatgaacataaatgtggcaggtttatcattcaataaccaaacagcagccgatatgtttcatctttatacataagtgctgatctaat

SEQ ID NO: 32399 - DNA, 535 bp, Zea Mays
caacttggccccaaatcgtggagtggaaaccctactcgtccccttccgcagccgtcgccgcccaattcccccacccaattcccactctccgctcgacagatccatacatgatgggagaggccaaggagaacgacgtttatgaggaggagctcctggactacgaggaggacgacgacaagacggtcgatggctccgctgctaagcccaccggagaggtcgcaaagaagggctacgtcgggatccacagttccggtttcagagacttcctgctcaagccagagctgctccgtgctatccaggattgtggttttgagcatccttccgaaggcaagcttctttttatctattgttgtcagttgacttcggtgttcccgtccgtgaaaactgcaaggtggctgcaaactcatagtcaccatgatactcagttgtcaagaagataaactctctactgaggcagtagtttttttagtttttgagaagttgaacagctgaaactcttgtacatacatatggaataagatgtcaaacttttatc

SEQ ID NO: 32400 - DNA, 1188 bp, Zea Mays
cttttccccgctaggttgaggcgctcccccaaacgctaggaaaggtggagatgcaagttagttggacagcgaatcacagccgaaacgatctgaaaatgttgtttttgatgtcaatgacaatatgacctcaaacatgtccaagaaagaaaaaggtagggaccatgacgaagcagcaaactgtgagaactctgcagttagcacaagcagatatcggaatggtcatgaagattttccgcgctaagagagattggaagacaggttggaaaaatgaagattgtatcgaggacattgctgtatgtgttggttccgatgatgaagagggttcaacagaagaaggtgcaggtcgaccctaaggatcaagaagactttgacagggcactgaaagccattcaagcttggagtcacgtaagctgactactgaagcagcggacaaaagatgtgtgggaatccggtggtgttagcgaggtgtgcattcaaggtgcttgtgaaggaaggacataagcagcagacaaagcaaatgcccatccgggggggactgccccactggtgccagagcaacagaatgctgctgagctcgaggagaagcagaacatgaagcggaaaattcttggatacaacgaaaggtaggaagaagaagaagaactgaacggagcgttcgccaggaagtgggaacggctggtgtcaaggaggaaggactgacgagcaccctgctggtcgcgttatctgggacggcccaaacagaggtggtggtgtacagtgcagcacagcggcactacttgggttgctggtgggttcttccgtggctatggaagggaggtgagctgatgccactgcgttcatggtttggtttggtaatggtttgccccaggaaagagccacctcagtatcgttccatgaacgtatttgcatcaggagttgtgcgacgtgagaacggtttgcatcaggagttggctcgtggtatgtggaactagtttgtttatgttgctatgcttgtacacaggaccgttttcactactacctcagatcagatgtcaggatgcttatggcgcgcatgatctgagcacgagaattttcgtacaattttcttcttcagatgtaaagtctctccttcgctgccctgcttactcatattatttacgctgcacatgctcctggtgcctcctattaccatgtttatgctttcaacac

SEQ ID NO: 32401 - DNA, 3158 bp, Zea Mays
ggacgcgtcggagggcggaggcgggattgagggcccgcagcggcctcgtcatgtgggaggcgggcatggcgtcccagttccagccgaccaggctgagggagaaatgggcgagtgagcggagggaggaggccaagagcttggcggagctcgggacgcccgtaacgaggctcggggcacggaagccgcggcttgccatggtgtttggtgacctgtatcccagcgcaatgcagcttcagatggtcagcgtcgcttcggttctggaggccatgggctacgaaatgaaggttttctcacttgaggatggcccatgtggaaatatctggagagccattggagtaccagtgagcatactacctgaggacacaaacttacctatttcagtagattggttagactatgatggcatacttgttaattctattgaggcaagaccagtattctcaagtcttctgcacgagcctttcaaatccatacctgtaatttggactgttcatgaacattctcttgcccatcgtgctaaagaatataatgcaagtggaatgattcagctcataaatgcttggaaagatgtattcagcagggcaaatgttatagttttcccaaactatatattaccggccccccctcagaagcatttagttaccatgaagatgtgaggatcagtttgggcttgagtcccaaagattttttgattgctattgttggtactccgttttcatatggtgataatttgatggaagaggcacttgtcttgcaagcagtaagtcctttgttacggagatatcactctgagaatagcgcacaatctgaattgaaagtaaagatcttcactgggaacataactgagaagcataggatggcccttgagtctgttgctctaagtgttggcttcccaagaggtgcagcggagcatgttgctgctgaagataaggacatcctccttcgtacagctgaccttgttatatattattcttgtcttgaggagcaattattccccagtgtgctagtcgaagctatgagtcttgagaagctggttatagctccagaccttggaattattagaaaacatatcgatgatggagtaaacggacttctttttccaagaaagaatgttggcatgttagctcaagttcttcttcaagcagtgtcgaacggtaaagtgtctatttcagggcaaaaaattgcttcagctgggaaggcccatgccaagaatcttatggcttctgagaccattgaaggctatgctgtgctattggaaaatgttgtcaagttccccactgatgcattacaccctttaactgttgatgagatacctttagctctgaaaaaggagtggaaatggcacctatttgaggatgtgaagcatttacaccatatgaatacgagtttgtctagctacaagatactcaagaaactagagcaggagtggcatagaaaccaaatggagaactcttctttgagtacaacaaagatcagtgacacattctctgcaattgcctgggaagaacagagagcaaatgaggttatggacatcaaaagaaaaatggaggaagacgagttgaaggacaggaatgaccaacctcatggaacatgggaggaggtgtacagaaatgtgaaaagggtagataggttaaaaaatgaattgcatgaaagagatgacaaggagcttgagcggacaggtcagccactttgtatatatgagccttttttcggggaggggacctggccatttctgcaccagagctctctttatcgtggagttggcctgtcttcaaaaggtcgaagaccaggagcagatgatattgatgcttcttctcgtcttccacttctcaacaatgtttactacagagatattcttggtgaatttggagctttctttgctcttgccaacagaattgaccgaatacacaaaaattcttggatagggtttcagtcctggagaggtacagcaagaaaggcaaacttatcaaacaatgccgaatttgcaatcttagaagctgttcaatctcaaaagcatggagattccttctatttttgggttcggatggatcaagatccaagaaaccacacatataaagatttttggtccttctgtgatgcgatcaatgctgggaactgcaggttagctgttttggaggccttccaaaggatgtatggtgtacaccttgatcatgacctggattctctgttacatatgcctaatgatggagacacatggtctgtgatgcaaagttgggttttgcctacacggtcattcctagaatttgttatgttttcaagaatgtttgttgatgcactggatgcacaaatgtacgacaaacaccatcaaactgggcattgcatcttgagtcttcacaaggaccggcactgctactctcgtgtcctggagttgattgtgaatgtttgggcattccacagtgcacgacggatggtctatgttaatcctcagactggtgcaatgcaggagcagcaccatctcagtggcaggagaggtcaaatgtcagtgcagtttttctcctacaccactctgaagagcatggacgaggagcttgcagaagagtttgacttggatcatccggacaggaggtggctctggccacaaactggagaggtcttctggcagggtctctatcagagggagcggatcatgcggcagcaggagaaggagcggcggaagcagcagagcagagagaagatccagagaatcaagaatagagctcggcaaaagacgctgggaaagtatataaagccaccgcctgatgatacaggtggctcgaacgatacaacatcagtagatttgtagcattttgaccatgatgattcttaccgtggggaatttggttcattatttgtaacggctgtccttggtcctcactgagaacccccggacggttgtgaatattttgtcagttttgtcgtgccctctggtgtctgggtgctttacaggcgattttgtaacatatctaggccattgagttgtgaagctgccatcttaggtgtaaatttgggtttccgtagggttgtttttgtccatttcgcttatgagcttctctataacagacagttaacacttaacagctgctccgcatttgcagtctccttggtacaaaatgagtcgactgatggtatcaatctgtcaagatatatttgggtgaacc

SEQ ID NO: 32402 - DNA, 4785 bp, Zea Mays
attccgaaaaaaatcactaacagaaggacggttcaggaagcattgacagatagaagatggattgctgatatcacaggatcactctcggtgggagtattattggattatcttcatctttggaatttaatttcagattttgagctgctgccagatatagaagataaacatacttttagtattgctgcaaatgggacttattctgctaaggctgcatatgatgggttgttcatcggggctgtgcatttcggtcactatgaaagagtttggaaaacttgggccccctctaaatgccacttcttcctctggttatcggtgctaaataaatgctggacaacagataggttggcaaagagaggacttgatcatccggagaagtgtccgctttgtgaccaagagtctgaatctttggatcatattttggtttcttgtgtttttgcgagagaattctggttccggctgaaggttgatgtgcattttcagactacaaaatctggctcctacacctagtacggtgtcttttacgggttggtgggagatgatagacaatggctccggagatatgattatgaagggtgtcaactcccttattgccttgggagcctggattatttggaatcatcggaatcaaattgtctttgatggaatctcccctagtgtttctgcagctctttgtcaggcaagggaggaacaacagttgtgggaaatggcaggagctaagggtctctcctttcttgccgcaaccatcaggggcacctagctgcctggtttatcgctgatgggctggttttgtttttcaggatctgtttgttctttttttgtttttttctcttcttttttctttggtttttttatcccctccggggaggtcttttgtactttggtctattttggaccctcttttccttctacttaatataatgatgtgcagttctcctgcgctttcgagaaaaaaaaacgtcatccgcggcctcaacgaatgctttgccaacattggtcttcacctttgacgtgggcgcctttccccacctttttcgatgcttgctctgagctccttcttgaagtgctcaggccatcagggcacctccattgacccctactgcccttgcggcctctatcattccgcctgctcccgctagtgcgcccttggtcttcggggcctgacctctggcttcctctcgtagtcttgtgtgctttgtggagcgtcggggggctcaggcctagggcctttaggtcccgtaggtcatgagtgggactcaggcctaggactcgactcgtcggtcgtgggtgggaggcggactggctccttcctacaccgcggctcggtgctgggcgcagttaatgtggcgtgcgtagtattgatggtgagagcagccctagggccagatgtggaatccactcgagtggctctctggcggttcgtctgatctccttgccaggcttcgcctcgtccgacctctggcgcggtgcataggggtcatctgggtgcagattcacataggcgagcttctccctatcttatctctcactcgtggtctcgtgggggcccggggatccgatccccgacactcgggatatggatcgccgacgtggggaaaggaggcgctggggtggcagctacacccgcgggaggctagggaggcgtaggccgagcgccgatggccgggtgtagggggatgccgccgaccgcaaccgagaaggggaggtctgtcaccggaggaggaggtgcggcagcggccgtaatcgcaatcgtccgcgcgatggctgcagcggtggttggtgcagtggacgttcgtgccgcttgcgtggggagggaggcgagcacatgaaaaggagaaagggagggaggcagtcgtggacgccgagaaggtgcgggcggacgcggtgacgatcgctctgggagatgcaggggaaggagagggaggggttgccggaggactgctccatgacggtggcgatggccgggggtgcgccgacggctagagtgcctggtggttagggaatgtagaggcttgataccatgttggaatagaaaaccctaaccagagttgatagtgcattaatataatagagttaggtgggtctgaggcccattacaatagaggcattacaatagagcatacagttacgctaacagtatcaaatgcctttgaaatctctagcttcaaaaggatgtatggttctttacttttatgtagggtctgagcaagctgctgcacaagtaagaaattgttgtgaatattcctcctaacaaaggcgctctggttgttagaccagcttaggcagcagggtgccaagcgataagcaaaaatcttggttaccaactttgcaaagcttgagttttaggacttgagctttacaagatgagtttacagcttggacttgatcagatcccatctgaggaaaaggatctccagttttggcacttgaattatcaccattgtcgaatagccaccctaaaatcaaagtatttaatttcttctgtgactgctaaaaggttgaaataacttttctaaaagaaaattgcttgtccatgggagacccctgggcattttttagtttataagttagcaaattacatcctgattggtgattggctaggaaaactagctaaatcagtttccagggaggtaaccacaaattgctgagtcctggatttgagcacaggtggccttcctctcaactgggaagtactttctaatttccttttcagatgtagatgtaatatttccaagaagtacaacccttttccttttttccttgcaccaaaccttttgtaactttgttcccagataccgggttctcggtcttgttagaagtatattactaaacaatctatctgcctacactgcattgttcagcagatgctggattagataaaatgtgattttaacaagtactccctatgttccagtttattaggtggtagtgcatttttgagaaagggcagattgttaggcggcatacatagcaaggcattgcattataaattcctgtggaagaaacacagccgttttatccgacccgatccaacaagtgaatgcaatgcaccagatcagtgtggcacctggcgtgaattaaatcttgctcacactctggtgtgtgtactcttagcgcctttaaattgggtgtggagggagtgtatatgggtgcaaaaataacatagctttgtacaagtaaacaaacatggttggacatcacttttacctaagatttttattgaggactaactgtctctgcttcttacatcctagactgaaaattttccattagatgtccacattgccttggaatgtattgattgtgctatctctttcagcatcaacatgggaaataaggactttgtatacatcaggatcatcgagtccaaaatgtgttgttactcttatgttggagattgctccaagtttttggggcagatggaagagaaggcactcaaattttgacaaaagcatcccttttgctttgctcagccaagtagcaggtataagagagtacttcgcagccaatccagccttgacatctgagctgccttcaacagtagtgaagtcaaaagcatctgaaactttgatcatccagagtgaacatgaagattctgaacttggtgatgaattttatgatgcacttactagaggtgaatccttcgaagatggggatagtgatgatgatgatgatgccacaactccaaagctttggttgagacaagtgaattggttacaaattctagtccagttactgttgaccccagccacttccatggcacccttcatagagcgaaaactcaaaatgatcaaaattcttggagtgcacctggtggggagaagtttatgatcagagggaagacttacttaacagattatcacaaggttgttggcggtgatccacttctagagctacttgcggtcgattggttcaaagttaatgaacgctttgattcagttgccttacatcccaaaagccttgtgcaatcagaagctgcaaagaaacttcctttcatattggttataaatttgcaggtgccagcgaaaccaaattataacttggttatgtactacgctgcagagagaccagtgaacaaagattctttgttgggtagattcattgatggaactgatgcataccgagatgccagatttaaacttataccaagcattgttgagggttattggatggttaagcgtgctgtaggaacaaaagcttgccttctgggcaaagcagtaacgtgcaattatcttcgccaggataactttctggagatagatgttgacatcggttcatcatccgttgcccggagcattattggtctagtattgggatatgtcacaagcatagttgttgatcttgctattcttattgaggccaaggaagagaaagagctccccgagtacattctgggcactgttcgtctgaaccgtgtgaatcccgacagtgctgtatcaatctaattacgtttctagccgatctatgcaaatttactcttatcctcttttattctgagagaaacagcgtggcattttgaaaatgtgaaatagcattactatttgctgatccccaatcgagggtaacatatgtaaattggcatgaggcatgactacgtgacgcctttcgtaaatagaataaatcaatggttatgtaatattaatatcccatatacgcgtgtcataatctatgtggcttaaaagtggcatcaagtcatctagtttcctgtgttaacttcttattccttaggtagtcagacattaacagtgtgtttggtttgaggaatgaagtgatccatctttttctcac

SEQ ID NO: 32403 - DNA, 2117 bp, Zea Mays
gctttcagcctcatggccagcgcgggactccaccactcctcctccccctctccgcggatcacccaccgaacccacgcgaaaccggcgtccagatcttctcccccgcggttcagatccccggacgcagccggcgccttctgacttgggttggcacagccgtacaggttgctttgcgctgcggtggatctcctggcgtggcgacatgggcctgggtttgggagctcttctcaaatccggcgggctctcggtctcggatcacgacgccatcgtctcgattaacatcttcatcgcgctgctctgcagctgcattgtcatcggccacttgctggaagggaaccgatgggtgaacgagtccatcaccgcgcttgtcatgggcctcatcaccggaggcgtcatcctgctggttactaatgggacaaactcacgcattcttgtgttcagcgaggacctgtttttcatatatttacttccgccgataatcttcaatgccgggtttcaagtaaagaaaaagcaattcttccgcaactttataacaattattttgtttggtgctattgggactctgatttcctttgtaataatctctcttggtgctatggggttgttcaagaaacttgatgttggtccactcgagcttggggactatcttgcaattggtgctattttctcggcaacagattctgtttgcaccttacaggtgcttaaccaggatgaaacacccctactctatagtctagtttttggtgaaggtgttgttaatgatgccacatctgttgtgctcttcaatgcaattgaaaaccttgatattgataattttgatgctattgttctgttgaatttcgtcggaaaatttctctacttgttcttcaccagcaccatacttggagtagctaccgggttgcttagtgcatacattatcaagaagctctgctttgccagctgttggacctgagtggaattcttactgtcttcttctgtggaatagtaatgtcacattacacttggcataatgtgacagaaagttctagggttaccaccaagcatacttttgcaactttatcattcattgcagaaattttccttttcctctatgttgggatggatgcattggacattgagaagtggaaattagctagtagcagtcctaagaaaccaattgctttaagtgcaattattttgggcttggttatggttggaagagcggcatttgtattccctttgtcgttcttatccaacctaagcaaaaaggaggcccgtccaaagatctccttcaagcaacaagtaatcatatggtgggctggtctcatgagaggagcagtgtcaattgcgcttgcctataacaagtttacagcatctggtcacactgaagtgcgagtcaatgctatcatgatcaccagcacagttattgttgttctattcagcacaatggttttcggcctgctgacgaagccgcttctcagtctcctcatcccaccaaggactggactgaacacgtcgtctctgctctcaagccagtctatgctggacccactccttactagcatgatggggtctgactttgatgtagggcagatcaactcccctcaatacaacctccagttcattctcaccgcgccagctcgctccgtccatcgcctttggcgcaagtttgacgatcggttcatgcgcccggtgttcggggggcgaggtttcgtcccctttgtgcctggttcgccggtggagaggagtgtccctgaatctcacctgggcactgtgacggaggctgagcgcagttgaaatgaggcaagagggatgccgacaattttctgtagatcttcagacagataccactcatactcctattttattttcagaatccactggtgcgaattgttctttgtagtaccttgtgcatatagttttatatagagctgctacacaagctgctgtaaatttctgggaggcactcccaactgtagattactgcaattcatctgtaaatttcaatcttgttcaagaagaatgatcatatattggcatgttttttcttagcagttgtataattgtgagcctgacacaacaaatcccttttaccccaagaatgttaaatgtagaaaagacaagattgtcaaaactcc

SEQ ID NO: 32404 - DNA, 6169 bp, Zea Mays
ggtcactctgcttacacaccacgccgagccacccactaaagcgtcgccgtgaaaaactaccaaaccccttcactgctccctcccatccaaaaccctaaccctacagccaccgcagtggctggccatgggggcgccgcgcgagctcgagctctccgacgaggtggagggcgaggaggacggcaccaccgactttgttttccgccttgccggtgaccccatcccgctcctcccgaccgactccaacccgctcccgctcttcgacctgctgtcccctcccgcgcgcccgctcgccgtctccgaccgacacgccaccgtcttcctcgcccaccccagcgggtttatagctgtgaggaccaaggagttaatcgaagccagcaaggaggcgcgcgagaagggcaagtcgagcactcgctgcgcgcaggactgctgcgtcgccgacgtgcccctccccggtgtatcccttatcgcgctctcccatgatgagtccgtgttagccgcctgcacacatactgagatccagttcttctcgctggcgtctctgctcacacataaggacgtggtaccatcctcatcatgtagcctggaacgagctgtcactgtgaaagatttcaagtggttaaatcatgcctctgcagcatatattgtactctcaaatggtgggttgctgtgtcatgggaatttgggtgaaggcctgaaagatgtgatggaaaacgtcgatgcagttgactgttgcaaagaaggaaatcatattgctgttgcaagagggaacaaacttaccatattatcaccagattttacggaaacatgctccatgtccctcttgttccagttgtggtctgacggaagtgattcaaagggcactaccatcaaagtggattctattggctgggtacatggtgatagtattgttattgggtgtgttcgattaaacgaagatgacaatgaagaaggataccttgttcaagttataaggactgaagaaagcacattttgtgagagcccaggcaagacagatgtttatacctataacgattttttccatggcattatggatgatgttttaccacccggagctggacctaatcttcttttgggttatctgcatcgctggggtctcatggtggcttccaataaaaagagcgtcgatgaacacattgcccttcttaagtggccatctgcacatgatgatgaaaaaactgtaacatatcttgaaatgttggaggataaatacagtcctaggattgacttgcaagagaatggcgatgacaatgtcatactagggtttggtgttgagaatgtttcattatttcaaaagatcactgtaccagttggacctgaacaaaaggaggttgcccctcaacatattctcctatgtttgactggtgagggcaaagtagctgtatattacctcgccaggatttcggacccttctgatttacctcatgctactgtgtctaccaatgaggactatggtgaaaaacatatttcacctgcaactgtatctgaaaaggagttgactccaagtgttgcaggctcagtatataagagtactctcacagaacatggtgctgagccatctagtgcgcaaacaggtagcaaccagcaggaatcaataaatgtgaaaaacagtagctcagcttcaaaagaacaggaaacaactgacaattcattgtttatctcttccaataagaagcccttagacaccaagcaagtgaatgtgactggtccacctgcagccttgcgtagcttagcgttaacaggaaacacaaaacctacaatattttccagcttttctactgaaggcatgaatccaacaggaggcaatgcacctaatgaattagcttcttccttgcaaccaagcagcagaagttttggaaacaaccaaactggtaaagaaggcctggattcagttcaatcagtgggaatatttggtggatctcaaaactccaataaagatggcaatgtctatggtttcaagtcttcattattcacctctagtggatctgtccctgccaagatcggagaaaggaatgaggttggttttggagttccttcgctgcaaaccagttacaccgctgatagaaaagtttttggtgctccagttgccttaagctctgtaccttcatcatctatatctccggctaaaccttccccaattggatattcatcaagtggatttcggacagcaaactctgaagcacctcaatcattgcgtggatcacctccgtcacagcaatctatgggcaaatcacataacagcaggacacaagcaccggcagaatattctagaaactccaagaagggcacaggattcgattctgaacaagacttgtctaaaaaattttacagtataaatgaaatgacgaaggagttagatgccctactagcatatatagaaaaggatggtggttttagagatgcctgcataaccatccaacagcgtcctctttctatgtttgaggatggcttacaaaactttttgcagctgttgcaggtcttcaagggcaaagtagaggagcaatgttcaaaaattgaagatctgaggaacaacatgtttcaagtttctgctaggcaaacttacatgaaaggaattgttagccagtcttcagataatcagtactgggatatatggaaccgtcagaaattgagtccagaattcgaagtgaagagacaaaatattctcagagctaaccaggatttgacaaatcagctggttgagctggagaggcacttcaataatctggagatgaacagatccagtgaaacaggaagagtggcttctaatcgaagagctgtttattctaacaagacaagttcgagtcagacacaattatccagtgtatatagtgcactgaactcgcagttggcagctgctgagcagctatctgaatgcctttcaaagcagatatctgtgttaaatattggttctcctagtaggaagcaggggatggtgaccaaaaagttgtttgagtcaattggtttagcccacacaactgatgcaaccaaattttcaggcagcactcctaagccagttaagcggtttccatcagtgaatgagcattcaaagggaatattagggtcttccaagggtggtgagcctgagactgctcgaaggaggagggaatcactggatatgagcctggctagtttggaacctcagaaaacaactgttaaaagaataacacagcaacaacgcctcaagatcagcagtgatctaccattcaggtcaaacaagaaaatatttgattctcaaatggcagcaatatcacaggaaaagtcaagcgatagctccaattcatctatagtagaatcatatgtaagcagactgcgttctctgagtgaagatgtaaacgataaactgtcaggaccccaacagaaccctttgttcaaatgggtaaaggaatcaactgggtcatctcaaacctcagagcaaaagcatttcgagttaccagggcaaatgaaaagtactgcacagtcttcaaaactgacaccatcttcaccaccatcattcagttacacacgtatgggtgcacaagatagtatcaacccatccagtgttccatcctttggaacaaaacatactgtgtctaagccaaatactctaaccttcaaaaccactataagccctaaaagtaatgccaacacagagccaaatatattaccttctataacagctccaaaaacttctctaagtccactgtctgtaaaaactgctggggagtctggagatttgcctacattaactatgaagaacagacaggatggtcagtcaatgccatctttggggaacataaaaggaccgggtgcttctctgcagaacaagggtggcatatttagagatctcgacaaatcgtcttttaattctgaacattccaagcctgctgcattacatgagaagactgaccagctaagtggggttggcgatgctgtgcagaacactgtgaaagatacctccaaaatggcacctcaaccttctgctttcttgccagctcctgttactcagaccaattcatactccttaaggccgactgtttcttcttcagccacatcaggtgcgaaaacttcagatgttttatctagctcaatgcagaaagtttctccaatagtacctgggggtactgtgtctagctcagtccctactcctgctaaggattcatcaactggattgagtcaaaatgcttccaaacctgaaacgctaatatcaaaggtaactagtaccatagtttctgcaagttcgacttctgtcatatcagtcactgaaagcaaaccttcagtgcctccaacaactggcgccagcttgccttctactcatgtctctgctcctcaaacagcaccaacaacatcggaatcagttttcacttccacaggaaaaaatgtaggaccaaacactgacaccatctcaaccgatgaagatgacatggaagaggaggcaccttctgcaagtgccgaactgaacttgggagcccttggtggattcggccttgggtcccagccttcttcaagtcctcaaaagtctaatccttttggtgcctcctttggtacatctggcaataaaagttcaggcacaccatttactttgacaaccagtccaggacagcttttccggccagcgtcgctaagcattccttcagctcagccagcccaaccatctcaatcaactagttctagttctttttctaattcgttctcaagtgggcttactggatttggacagcctgcacaaattggatctggccagcagtcagcttttgggaagcctgcacagattggagctggccagcatgcaggatttgggcagactgcccaaattcaatctggttttggccagcctgcccaaattcaatctggttttggccagtcagcacaaatcggaactgggcaacagtcaggatttgggaagcctgcacaaattggggctgtccagtcaggatttgggcagcctgcacagtttgctgctcaacagacacttggatcagtgctgggttcttttggacaacctccccagttaggaggcataggttctggaggatttggtggattttcaagtgcttctacatctgctggttttagttctttatcttcaggtaatgctggatttgctggtgctgcatcaggtgggggcttttcagcaccaactgcttctgcaggtggtggttttgctgctgctgctactggtggaggttttgctgctcttgcttccaaaagtggtggttttgttggtgcagcttcatctggtggtggttttggaggtgcctcccagggaggtggctttggcagtgattcatcgcctttgccatctcggtgtaaagcaaaagcaatgtgcctagaaaatccaaaatgacttataatttgcaatcggcggagtacaatctttggtgctttggagccgaattttaatttcggatggagtggtggtggattcggatcctttggtggtaatcaaggagctgggttctcggcatttggagcaagtggggctggaagaccggcagctgatttcttgacgcagatgagaaagtaggctccaggcaaatccccagacaggtttacgcattagctatagcatacacatgaggcgagttacttttatgttccactcttaagcgttgtttcggcacaggagctgtagcataaacatgaccgcagtataccctggactggatgagccctcgcttcgctccatctattgatgatggaggggggctaccatttgggagccttattgttttctcttcttttacaagacacagcaggtgtcaacagcagcatcgacggttggtcttggattccctactggtttctctccagggcgaccaacttgctaaggctttcatggctctctcttcaggttccatggctgcatgaaatgtagaagaaaaaaaaagaggtcgtgtaaaggtcattgcttggacgtgattcccctccagctttgtcaatacaattcccagcctctttcccacaatattccctgtcacgagcctgcccgcgcatcaagatgaaacccgccaccacaccaaagagcttgctgcgatttgcaaaggcatggagaagaaagggatcgagagaaacaaaagcataagatacccagacacttaaacaagtaacaaccgaacacaatctttcgccaaatatatatatatacacgatataatataagaacggaacaaag

SEQ ID NO: 32405 - DNA, 2619 bp, Zea Mays
gccaaatcagccgctagggctgcattcatccacctcgtgcttatcgcctaccccaactccgactcctgctcgtctcgtcgctcgccgctcgccgcctcgtccagctctctccgcccctccggactagcctagcccctcccgctcaccgcgtcgtctccagaatctggcctacgaccgttgacggctggtgccccctccggcgatcggtggtcatggtccgtccttgctcaccccgttcggatccgctatgcgcgagcctccccttccctaatcacgcgcccccctgccccagcgatccgcagctgccgccccctgtcccaccgatccgcggctgccgcctcctccttcccctaatcacgccccccggtcccgttgatccatagttgtcgcctcccccaacccctaatcacgcgcgtctcgctcccgccgatccgcggatcggctctgctccaaccctcctccgtccctgagatgcaagcgagcaccacgggggatttctcccttgaggtgttgcctgagaggtgctgctgaccgagtagcatcattgaagagttactgtcgagcacttggattatgtgatcgatgtgcagagaagtggttccaagggcacaagtgtgccaacacggtgcaacttcacaccattgaggaagtctaggatttgctcaccttggatgaagctacagtggaagtcattgaaccaacagaggaactgatgatggttgtcgtatccctgtctaatgcggcatggtccggatctgacacaatatcaaccatgagattacaggtcgtcgaccactattgtttggagtccaagaattgacaacactaattacagtttaggttgctaatggccaagttattacctgctcacaccaccttccagcagctcaatggaccatcggtatagcccgatgagagtggattggacaaacatgtggatggttatttcttaccaggaaaatactatctaccttcagggtatcagagtgcaagctgtactcgacagttatcctagcattttcatcgatccagtgggactcctaccaacccgcccgtgtgatcattcaatttcattgatccccggtgcccagctgttccacataaggccataccgttaccctccaaccctcaaagatgaaattgaaactcaagttaaggaaatgctatcccagggggtgatacgaaagagcagcagcccctttgcatctccaattctcttgtcaaaaagaaagaccactcatggcgattctgtgtagattaccgttatttgaatgccacgacggtgaagagtaaataccctatgctgatattcgatcagttctttgtgctcaggcactaggcatgtagagtcgatgcagcttacaaggctgttgacaaaataatccaggtttgttggcacacttttaatctttcttgtacgggtacactacttctaacaatggaatatgaatgttgttttttgcgcaaaagttgcctggcttttagcatcgtttgatgggtgaggacacacatcgcctccaaatactagaacgctagggatatttgttctctcaaataaagctttacctgttatattatataatacttccgtaagaagagctgttagtggctggagtgaatagaatttggttggtcagtgcctccaagttgttttataggactttcatatttggtcggtgccagattgggtgaataagctctctatgaggtttctgaaagttgacaggaaaacagttgatcttgtcggtaatgagaaactgaaggccagtgcatctgttaagcaccttgctcttccttgtaacaaggcagcaacggcacaagttattccagacattatccgatgttatagccatggaggtcgaaccatcatcttcactgagacgaaggattctgcatcagagctttctggtttgattcctggatcccgtgccttgcatggagatgtagcgcaagcgcagcgtgaagtatgtgaattcttcttcgatttaataacattggcaatcatttgattttcaggtaatactggtgttgctgtcatgctttatgagcccagatataagcacagtgtcagcagactagaaagggagtctggggttaaatttgagcatatctctgcgccacaacccactgatgtagcacaatctgctggcagtgaagctgcagatgccattgcgagtgtgtcagacagtgttattcctatcttcaggcagcaagcagagcagttgctaagctcttccagtctgtctgcagctgacttgcttgccaaagcacttgcgaaggcagttggttacacggacataaagaaaagatcattgttatcttccttggaggattacagtacactacatcttcaaactggcagaccgatgtggtcacctgggtttgctataacattccggtgatcgtgtttcttcttcgtcggggtcatatttgttcccattggtgttatcttcagtttgacgtcggcaacgtggtcatggtgaccggcgggaggaacaccgggcgtgtaggagtgatcaagaactgggagaagcacaagggcatcttcgaggtcatcgacgtgctgcttggagttttttgcatgctatgtctagttttctcctatttgttgtacaggaa

SEQ ID NO: 32406 - DNA, 298 bp, Zea Mays
ttcagcagctgactcgaagccacaagatcggtagcgattttccgatccaagcaatttgtcgagcgcttgggaaatatcgcgctgctagcttcgtcttcatctgattcttgggattcttatgacgcgcgggacaacgacgagatcgtgtttggagcaagttggtgaggtggggttcgagcagaggatgacgggttcgacgactcgactgtgaatgacgtaacgactagctggggcaggatccgagctaataggcacagtatgagacagcgaccagcacgacgaacgaactaagtcgcgg

SEQ ID NO: 32407 - DNA, 2476 bp, Zea Mays
atggctggccgaccgcccgcagcgccgctagttggcaccgccttggcctccgaaagccagtccttgtggccgtttgccggcgttgaggaggttaagcctgacaccgaggtgtgcacggtgctcagcagtgatacccttccacagaccccgcatagtgcgggaagcctacggcactgggtacgccctacaggtgctcagcagtgtggtaaatgtgctttggtatatacaccagaacttgcagtgaataagattatgattggaaatctcatacactgccatgataaggtggctttggagaagtttataggggaacccttgatgatgacaatgagcctgtagctgtgaagaaatatatcaatgaagatttgagagaagtgtttatggaagaagtacgcatccatagtaaaattagccacaagaatgtggtgaagctaataggctattgcattgggaaaagtactctcatgatcgtaatggagtatatgtccacaggaaatctcaatgacatactccactgcactgaaatttcgatccctttggatgtaagattgggtattgctatagggtgtgcagaggcattgagctacatgcattcaatgcatttatcatctggcaaccttatctgtcatggtgatgttaagcctgccaacatacttctaaatgacaatttgacagcaaaaataaccgattttggggtttcaaggcttctggttggtggcatcactcagtacacgacaagtgtaaaaggaagtatagattacatggatcctatatatattcaagaaggccgtcttactccaaggagtgatgtttatagctttggattagttctctgtgaactaatatctagaaaaaggataagaaaaggtgacattaacctcattttatatgtcaataaaggctccgcaagtggtaaagggtttagagaaatgtctgatgctgcaattgcaaatgaggacaatatgaagattctcaaagaaatgaagaaattggcaactgaatgtgtatcactgagcatttataggcgtcctcagatgactgatgtggtcagacgccttcggatgctgagaaaagaattaaaggagagacatgaatattattcagagtcaattttggcatcacaccattcatggcgcaaaaacaacaagcaagagataatcatgcccacctataattctaagatgcagatcaagaagagtctgggctttttcaagaggagccttagtaactctaagatccaatcggaacccagcgatgtgaggattttcacacaggaggagctaaaagaagtcacgaataactactcttatctaatcagtggaggtacttcaggtaaagtttacagaggaacactcgaggacaatacggtggtagcggtgagaatattttctgaagtactcgagggctttgaagaagcgttcgtcaatggtgggatgatcctgtctcagatatcccataggaacatcatcaaactggtgggatattgcttggacgctgactgcccagctttcttgtatgagtacgctgctaagggcagcctatctgatgttctggacgggcatgaagacttcccactggatctacgtgcgaagatcgtggtgaagatcgcagaagcattagaatacctccattcaccagcaactggtattatcagacacggctatgttgtgccatccaagatactcgtagacaataatttcatgccaaagctcaccggcttttcatgggcaaggaggcttatccaggagagtaacactactgccagcgacgacgtaatttctagtcatcagcatccatcgagcgggttcaacaacgacccgatccacgaccactatgtgtcgctaaaactgaagaccgatgtgtaccagttcggtgtcctcctcctgacactgattagcaggaagagctttgtgttttacgccgatcacgacggcctcgtctcgcagttcctcacagcttgccaggaagatggcagtggaagggcgttctttgatgatgatgttgcagtccatggtggagatgttgttctgcttgaggagatggggaggctgtcgctgaagtgtgtttgtgaggaaatcgagcagagaccaacgatgcgagaagtggcagagcaccttcggatgatcacgagatcttggaaggacttcagcgggagctacgcaggagctgaaggcaatactcctgagaggccacctagttcagacattggagattgaccatgagcaatcctgtacatacgacagtgaatgatagatgtgttgtttgtattgtttcgtggtcagtgttagactgctgtttacgtgtagctgctgctattgttgtatgtgtagctgctaggggtgtaaatggtacggatattatctgtctgtattataattcgatctgtctaaaagggctgagatctgatccatatctgagtctgggtattgattatccgaccagatccgatttttatgtgtctttattctcaaagttg

SEQ ID NO: 32408 - DNA, 1617 bp, Zea Mays
cggaagtttccaatcccttctccgcttgtcgggtcagagggtttttgtgtctgtgaacgggtctcacccaggtggcgagctggggggcctacttgctgtcacgcgacattcttgccatgtccttcgccccgcgagactcccacgaggcgcaggttcagtttgcactagagcgtggtgtgccggcgatgattggtgtcctcgcctccaatcggctcacctatccggcacgttcctttgacatggcgcactgctctcgttgcctcatcccgtggcaactttacgatggcctgtacttgatagaggttgatcgtatcctgcggcctggaggctattggattttgtctgggccaccaatcaactggaagaaacactggaaggggtgggacaggactaaagaagacctggatgcagagcagaaagccattgaggcagttgccaggagcctctgctggaagaagatcaaggaggcgggcgacattgctatctggcagaagcctactaaccacattcattgcaaggccatccacaaagttagcaagtccatacccttctgctctaaccaaaacccagatgctgcctggtatgacaagatggaggcttgtataactcgactcccagaggtcagtgacttaaaggaggttgccggcggtgcgttgaagaaatggcccgagaggctcactgcagtgccacccagaattgccagtggcagcatcgagggggtcacggaagagatgtttgtggaagatactgagttatggaagaagagagttgggcactacaagtccgtgattgcgcaacttggtcagaaaggccggtaccgcaacctactcgatatgaatgcaaagtttggcggcttcgctgcggcattggtgaatgatcccttgtgggtcatgaacatggtccctactgtggggaactcaacaacccttggggcaatatacgagcggggcctcattggaagctaccaggactggtgtgagggcatgtccacttatccccggacctacgacctcattcatgcggattcactgtttacactgtacaatggcagatgtgaggcggacaacattctgctcgaaatggacagaattctgaggccagagggcacggtcatcatcagagatgacgtggacatgttagtgaagataaagagcatcacggacgggatgagatggaatagccagatcgtggatcacgaagatggtccgctcgtccgggagaagctcctccttgctgtgaagacatactggactctggacgacagcaaacaatagcaataacgtggaatagagagttagaatgattattgacgtgatcggcaaatcttgcgactgccttaccgtttgccctgtgaatctggtggactttgggttccattttctttttgggtattcattggggggagatagttcacataatggagatataatctccttgttaagatataagactgaacccagcacagattttgacataaaaaacatacattgtgcaaagtgggtaaatagaaagtacaatattgggactacctttttctccggatgcacattgtctggttatggctatgatgtcatatgatccctttcacacaaatctaaactaggactaatcgtcatc

SEQ ID NO: 32409 - DNA, 241 bp, Zea Mays
aggaactgcgacatagctgaccatggggcacggcggccaggcggcaattcccaataccggcgagcaattcacgtgcgtaccgcgatcctttcaagctgatttccttgccaacacctcccctagctcccggagacgagaccagtcacgcacacaggcgagagcagcgatggaattgcaaattccacagcggcggtggcggcgtagattctagcctatgcccctggtccggcgaccactgatt

SEQ ID NO: 32410 - DNA, 3189 bp, Zea Mays
ctcacctcacgaaaccagcaaccccagcagcaagcgcagcagacagcagtgcatctgcgccgcgaaccgccgctccagtccaatcaatggacggacacttcccatgatctcgtcgcccacctcctcttccgccgccgccgccgcggcaatgccgactccctcccgcctcctcttccccgtcctggtcctcctcgccgcgtcggccggggcggccacggccgccaccgtgagcgacgacgtgctcgcgctggtcgtcctcaagtcgggcctcttcgacccggcgggccgcctcgcgccctggtccgaggacgccgaccgcgcctgcgcctggccgggggtctcctgcgactcgcgcacggaccgcgtcgccgcgctcgacctccccgccgcgtcgctcgcgggccgcctcccgcgggccgcgctgctccgcctcgacgcgctcgtctcgctcgcgctcccggggaaccgcctctccggcacgctccctgacgcgctgccccctcgcctccgttctctcgacctctcgggcaacgcgatctcgggcggcatccccgcctcgctcgcgtcctgcgagtcgctcgtgtcgctcaacctctctcgcaatcggctcaccggcccggtccccgatggcatctggtcactgccgtcgctcaggtcggtggacctctccgggaacctgctctccgggagcgtacccggcgggttcccgcggagcagctcgctgcgtgaggtggacctgagccgcaacctgctccaaggggagataccggcggacatcggtgaagccgggctgcttaagtcccttgacctcgggcacaactcgttcaccggcgggctgcccgagtcgctgcgtgggctgtccgggctgagttttctcggcgctggtggcaatgacctatcagaggagctccagccgtggattggggaaatggcggcgctggagagactggatttgtctgccaaccgctttaccggcaccatcccggacgccatttcaggctgcaagaacctggtcgaggtcgacctcagccggaacgcgctcactggggagctcccatggtgggtgtttggggtacctctgcagcgcgtctccgtctctggaaatgcactgtcagggtgggtcaaggttccccgtgatgctgctgccaccctggaagccctggacctttcagccaatgctttcactggtgtgatcccgcctgagatttccacccttgcaagattgcagtacctgaatttgtcctcaaattccatgtcggggcagcttcctgcaagcattgggctgatgctgatgcttgaggtgttggacgtgagtgctaacaagttggatggggttgtgccactggagatcggaggtgccgttgcgctccgacagctgctgatgggtaggaattcacttactggatggattccggtgcagattggcacatgcaaatccttgattgctttggatctatcacacaacaaacttgcaggatcaattcctatatccatgggtaatcttactagtcttcaaacagttgatctctcagataacttgctgaacggcagcttaccgatggagctctcaaaacttgacagcctgcgtttcttcaatgtctctcacaattcgctgtcagggagccttcccaatagtcgcttctttgacagcatcccttattctttcctctccgataatgctggcctttgcagttcacagaagaacagttcctgcaatggtgtcatgccaaagccaattgttttcaaccctaattcttcgtcagacccctggatggatgttgccccaagttccccaagcaaccggcaccagaggaagatgatattgagcatctcaacactcatcgcaattgtgggtggagcagttattgttatcggtgtggtcaccataacagtgctcaacctccgtgcccatgcaacagcttcccgctctgcacttcccacttcattgtcagatgattatcatagccaatcagctgaatctccagaaaatgaggccaagtctgggaagctagtcatgtttggcagaggcagctcggattttagtgctgatgggcatgcgttgttgaataaggattgtgaacttgggcgtggaggctttggtactgtttacaaggcagtgctcagagatggccagccagtggccatcaagaagctgacagtttcaagtatggtcaagtcagagcatgacttcaagcagcacgtcaagcttctaggcaaggtgcggcaccataacattgtcaccctcaaaggcttctactggacttcctcactgcagctccttatatatgaattcattcctgctgggagtttgcatcagcacctccatgagtgctcatacgagagctcgctttcatgggtggagaggtttgacataatcgttggcgtggcccgcgcacttgtgcacttgcatcgctacggtataatccactacaatctgaagtccagcaatgtcttgctagacacgaatggtgagcccagggttggtgattatggtcttgtgaacctgctgccgatgctggatcgctatgtgctcagcagtaagatccagagcgtgctgggatacatggcacctgagttcacttgcacaacggtcaaggtcacggagaagtgcgacatatacagcttcggagtgctagtccttgagattttgtcaggcagaaggcccgtagaatatctggaagatagtgtggttgtgctttctgatcttgtcagtgatgcactcgatgatgacaggctggaggactgcatggatccacggctatcaggtgagttctcgatggtggaggccacactgatcatcaagctgggcctggtctgtgcatctcaggtgccttctcaacgaccggacatggctgaggtggtcagtatgcttgagatggtgaggagtcctcagggtaccccagaggatgatctggtttgagatccatttagggtgcgttcttttgttcaggattgatgccaggattggttccaggtatgtgtattcgttttcggagccattttcgccaatgccctggcacttcacatctcttcatatcttgctgagattcagtacatatgcggcctgtgccctgcccactgccagagtgctcgacccatcgaccgggtccagttggctgtctggtaagacactaggcagtaggcacgtcggggagtttggcccagcgtggagtgctgtcgtggagtgcg

SEQ ID NO: 32411 - DNA, 1864 bp, Zea Mays
gtttattagaagatgatgaagaaagggagtgagaataaataaaggagagaaagggtaatctgcatatgtgttgtatatgtctaagtaagtttacaaattctataggccatgtgcttttgaaatggatagagtactgctttactccattttctcatccaaaatcctttgtcagttgcaatgaatgattatttgctccccacctttctgacaatgaagttttcttgttgcattgcttaagctgagactgaccacacacatttttttctgatagttttgacatttcactgaagataacttcttttacttttttcagtcttgcgggaaatcgattcctttgcaattcctcagttatacatggttgttcagatgtgacagcaatgactaatgggacaatgtcgagacaggtccaaaaggccaagaaccaccatcaattagctttggcaatttctctaagtgtcacctgttccacaatattagttttgttgttcgtgtattggctaagttattgcagatggcgcttgccttttgcttcagctgatcaagatctagaattcgaattgggccatgtgaagcattttgcttttcacgatctgcaaagtgcaacggacaattttaattccaagaatatattaggtcaaggaggttttggtattgtgtataaaggctgtttgagaaatggaactttagtggcagtgaagagattaaaagatcctgatgttaccggtgaagtccagtttcagacagaagttgagttgattggccttgctgtgcacaggaatctcttgcgtttgtatggattttgcatgacctctaaagaacggttgcttgtatatccatatatgccaaatggcagtgttgctgaccgtttgagagattatcgcaatggaaaaccatctcttgattggagtaaacgcatgcggattgctcttggtgctgccagggggttactctaccttcatgaacaatgcaatcctaagatcatccacagggacgtcaaagctgcaaacatattgctcgatggaaatttcgaagcaatcgtcggggattttggattggcgaaacttcttgaccgtcaggaatcgcatgttactactgcagttcggggcactattgggcatattgctcccgagtatctctcaactggacagtcctcggaaaagactgatgtttatgggtttggcattctcctgttggaactgattactggtcctaaaaccttgagcaatggacatggccagtctcagaaaggcatgattctagactgggttagagagctaaaggaggacaagagaccggataagctggtcgacagggatctcagagattcatttgatattcttgagctggagtgttcagttgacgtgatcatccaatgcacgcagacgaaccctatgctgcggcctaagatgtccgaaattctgcacgctcttgaagccaatgtcacgctggcggaaaccagcgtcgagttgaacagggaacctcttccttatggtgtgcctcgcagtttctctgtgaggcatgaggacccccacgattcgtcgtccttcataatagagccaattgagctatctggtcccagatgacagctgttgtcagtgtggttgaggcgaaaagaaaagaaagcatggaaacaatacaattgtacaaaacatgtatatcgtggatgtagttcaacttagcaagagtttgctgggcgtgttgccataccttacataatattttgaacgtggagctggagcgaaccttgttggctatttttgttgcttacgttttcatctgccatccatgaggcactgaggcggtcatgcatttttgccgaaaattttccgccagaaaattgtttggaaaatgttacactccgtac

SEQ ID NO: 32412 - DNA, 1119 bp, Zea Mays
catttcttgccttctttgtacctggtccatttgggagatggcatcaagttcattgaagacagtgttgctgcaaatcagtcagtaaatggcagtaccagaaatgcattcaaaatacttatcctcgatgttgattcatctgatctaagctctgggctgtcttgcccaccagaaaactttgtcgaagatcctttccttctaatagcaaaggagttccttttggagggcggcctttttgtcatcaatttagtctcgcggtcaacctcagtgagggaaacggttgtttcaagactgaaagcggtcttcgaacacctgtactcactgcaacttgaagaagacataaatgaggttctgtttgcatcaccgagcggaagatacctagaaatcaatgacattagtgcaggagcctccaaactgcaggacttgctcaaaattccggtggatgtagaatcagatatacagaagttgcagaaactccagtaacaatctcacctgacgcggagcaccatccatttgcatccacttgatttaggtgctgttcagttctcaccccagcagggcacaccaaaatgtcctttgttttgctcgtggaagccaaattaggaccagctgttttgtacaccagaattttgtctaactgcgctatagaaaaattttggcctgccagaatgtcttttacaaccaaagaggtgaaaaatctggcttgacctgattgggcctagaacaggctagagcgcatttcaaacttttaaacgtccacaaattggccgtgttttcccatatgtttgcctcgccaactctgcatgggtaaaacagtgcagctgtacagatttagaggatgtgtggaggaaacagaatgtgcatcatgcttggtctctgatggtttacaaatttcagcgaatatattgatcagaattcaggctgtgttatgatagctgtagcgtgtttggcaatgtgagtgtcgggtaggctctcgggaccctcgtaagcattcacacctcccgtcctagcagagtagcagcttcatgtactatgactatgggtgtactcggatacgaatgataagatttgtatgaatatgacatcttaaatactcaactttaagaatatgaatacggataa

SEQ ID NO: 32413 - DNA, 3346 bp, Zea Mays
ctcgcgcggtcacgccctcgcctccagtcctccgcacaccggcggcaaccctgcgaaaatgctttgtgttggaagaatttgttcaagatattatgcaggacatgctgtatcttcattacttgtgggtatacgatgtttgtttgctcctcaaagcccacaccatgtcggctccaagtatcatgggactcaccaaagtagggacagtagtaccaaaaccttgaaaccagagctaaatattggtagatgtggcgcttgcttttccactgtcacaggaaccattctagtccaagctcatgatccatctcagctagcaatggagatagagaatgcaattgatcagcagagatttgatgatgcatggagggcttatgagaagcatgttcacatggatggacttccaagaaagtctgttttgagcaagctcatcactggcttagcagagagctgtgatcatcactggcttaagcagtcctacaatgtggtcagtcatgcatttgaagagaagcaagaattgttggataaggaacccctaatttacctatccctcattcttgcacactgtgctctgcctaatcttgctttaaatgttgtgaggaagttggtaaagatggaagcatacccacctgttgcagcatggtcggcaattttagctcatatgtgtcaaactaacactggtgcatttctcggtgcagaccttgtaatggagcttggttatcttttccaaaataatagagttgatccacggaagaagagtaaccgtcctttgctatcaatgaaacccaattcatttacattcaacatagttttgaccgcttccctcgtgtttggcactacaagaaaagctgagcagcttctcgaactaatgccgaggataggcgtgaagcctgaagtcaacttgttgattgttatggcccacatatatgaaaggaatggtcgcagagatgagattcggaaattaaagaggcatgttgatgaagcttatggtcttagtgaatcagaggttaggcagttttatgattgcttgctctcctgtcatttgaaatttggggattttgattatgcagttgatatggtactggatatgattaggaaaggtaagaatgcaaagcggtcattggaagcagctaaagcagttcttgaagctgttgaaaatagaaaattttattttccttatgagaaagctgatgctgaaaacccacgctcttgtagtagccaaatgctaagtcacgcttcattcttcaaagacaacagctttgggagacttgaattggacgcaagagaatcagtcaggctattgacagataagctgcaggaacaggttggactggttaaatctgagcatggcattctccatccaactgaaacaatgtatgccaagcttgttaaagcttttctggaagcagataagatcagtgcattggcatcgtttcttgtgaaagcaagcaaagaagattctcctgtatctgttgaaagctcctttgttgttcaagtgataaatgcatgcatttctcttggcttattagagcaagcacatgatcttctggatgaaatgagattttctggaattagggttggttcatccatttattcatcactcctaaaagcctattgcaaagagggacaacatgaagatgacataactgcacttttgaaggatgctcaacaagctggcattcagcttgattcaagctgctatgaggatttgatacaatctagggtgaatcacagtaacaccacaggtgctctccatctttttaaagaattgaagaatttgaatgttctgaaagctggtcacatggaatttcagagaatagtgcaaggctctgatgacaatgaagctgctttgatgaccaagctagtggaggaagtcaggagtgatcatacagttgatcatgctgttcatgaatggaataatgttatccatttcttctgcaagaagagattgatgcatgatgctcacagagcactgaacaagatgcgagcttccggccatgtgccaaatgcacaaacttttcattctttaataactgcttatgctgccattggtggcaaatatgtggaagtgacagatttgtggggtgaaatgaaacttctggctagtctaagttctatgaaatttgatcaggagctcttagactctctgttgtattgttttgtgagaggtggtttcttccttcgagccatggaagttatagagatgatggagaaaagagagatgtttatagacaaatataaatacaagtccttgtggctcaagtaccacagaacattgtacaaaggtaaggctcccaaggtgcaaacagaagcacaactaaaaagaagagaagcagcaatacgtttcaagaaatggattgggttgacatgagagcaagaagttcaactcaagctatatgaactgatcaggaattctttgattatctgctgtatggatggatctttacaaattctgtaaaatcgtagttgcgaagtttgttagaaggtaatatgctttttttttattttgcatagttcctgcttgaaaattagtaatccaaaaccaaactagattatgtatagttgctctgtttattacaacaaatgcagaaatgcttcagccaacacttacaatataatggtgttgcatggcattaagaaagggggcatggcattaagaaaggggtcttggagcatttgagcgcgtttgggagtcttggacatcttcaaagtgcagtttcttcctttggcttgtcatgcacaacagatgctggaccgcagactgtcttactaaaagaggactaccccaccccagtgcgtgtcccctttgcgaccaagaaggggaaacaatacaacatcttctcatcttttgcgtctttgcaagacagttctggtacttcttgttgcgcaggtctgggttgcctaatctttcaccagacaatgcttcttgcagccttgatgactggtggagcagcgctgtggagaaggttccccgtgatctccaatcaggcttcaattctctagttattcttggcgcttggagcctctggcgtcatcgcaacgactatgtgttcaatgggaggtcgtcgagcctagcgagtactctcaccctcgctggcgatgagctcaggatgtggtgtagtgccggggcgaaagggttgaacctgctttcaactcttgtgtttatgcttgacccaggggatagtcttgtgtcttgttcagagtggttgtgtgtggtggctgtgttgcgtcttgtgtgtcttgttgtgtcatgtgtgttgtgttgtaccttcttatatctattaatggaatgatacgcagatctcctgcgtgttcgagaaaaaaaagaaaaggggcttggtgcattttcaag

SEQ ID NO: 32414 - DNA, 577 bp, Zea Mays
gtgccgagcatatcattataaaaaaagatatttcatggcagggatcagccctgtacgtataaatgactggcaccatagcctgccagccgctgggccattgccgctaaattcggccaacaggtgaaggccgataggcctaatctctgtcggccatgcctataaagcaaagtcgttctgctacgctagcggggaaaagaatctgcaagagcacaccgccagcagagaggaggatctgcatgagcgttgtcaaccgggagatcgccatcaccgtcgccaacccagcgttgtggtcacccaaatctacgcgatgaggacatgcgtcatctgaagagcaagttggtacctggaatctcaagtcccaggcaagttgtgccctgatcacttcttttacccactcatgttctaattaatcataatgatctgcataggttaattttgatgggacctaataggttaccctagtttgtctatctttatgccttgtttaccactgaactttttgggtagtacttgctagtgctatatgtggttttgggcattgagatacacattactcatgattatacttttgttatca

SEQ ID NO: 32415 - DNA, 1666 bp, Zea Mays
gaccgaaccgttgaattgcaatttccgctagaaagccgacgagacaatttcttccgttcgtttcagatcgggcggtggtcctgaccaaggcgctgccggccactggcctctcgcaaccggcgaccgcatctcgaagtagagggtgctggccgccgctctcggaagcgctctggaaggacacggccatggcgatgcgggccgctgcgcgtcaagccatactctctccaccgcttgggccccgcagtcctcgccccttcctctgtggttgttccttgtctatcgctcctcggttggagccgtgccgagcggcgagctccaccaccgcgccggccgccggaaagcatctccctccattgttcagcgtcgcgccgatgatggactggacggacaaccactatcggacgctcgcgcggcttatctcgcggcatgcctggctttatactgagatggtcgtcgccgagaccatcgtgcatcagaaggataacctggataggtttctagcatttccggaggaacaacatcctattgtgctgcagattggtggaagtaaccttgaaaatttagcaaaagcaacagaactggcaaatgattattcatatgatgagatcaacctaaactgtggctgtccaagcggcaaagttgctggtcatggttgctttggtgctcgcttaatgtttgatccagagtttgtaggagatgccatgtcaactatcgcagctaattgtgatgtcccagttagtgttaaatgcagaattggtgttgacgatcgtgattcttatgaagaactatgtgaatttgtagataaagttatctcaaaatctccaaccaggcatttcattattcatgctcggaaggcattgcttagtggtctcagtcccgcagagaatcggaagattcctccattgaaatatgagtactattttgctttgttgcgggacttcccagaaataaaatttactctaaatggtggcataaccaatgttagtcaagttagtgcatccatgagacaaggtgcacacggagttatggttggccgggctgcttataacaatccatggaacatgctaggacatgtggatggggaaatctatggcaagcaaacaagatacatttctcgtcgccaggtttagcggttgacatatttatttgagctatctgctattactccctttatctgaactatgaactctctgtcttagatacttgagaactaccaagcttatggtgattcaataattgaccagtatggccccagcaggccaaatgtgagacaacttgtcaaggtaggagctacattttggtgacaaaaacacttcgccactgttaaacttattccactcagaacctggcaacagcctatggaaacgcaaagctgactctgcattgcgtcattgcaaggagtgctacacatcctttctgtaagaaaaaaaactcggccggggagggaaagaccaccatctcggtattatattaagaaaagaccgaaacaatggtcccggccgagaaaatccccgaaccctgacccatcactaacgggccggcatcaactgtccactctacaacagcccaaccggcaggacatcgtaacccgagagtagatgggacacagcgagaagattttttgaaccaagcctggaaatacgctctcgagggaaatcaaacctag

SEQ ID NO: 32416 - DNA, 2774 bp, Zea Mays
gaactaccaccgggtgcgggtagctagcgggtagggtaccaaaacggcggcgctagaaaggaaaacctgccgtactgtcccctcttcccttttactgccgcctgccggccgcgagggagggagggacggaggtgctcatctgtgcggcggcttcggtgtcggtcccaggggaggcggggagccatggcgcggaagcacggctggcagctcccagcccacaccctgcagatcgttgcaattacagttttcttccttctggtggttgcgttttatgccttctttgtgccgtttttgggaaagcaagtagttgagtatattgcaattggcgtttatactcctgtggcacttgcagttttcatcctttacattcgatgcaccagtataaaccctgcggatcctgggatcatgtcaaagtttgaggatggccttatcaatataccaaccaatggctctggaatagaaggcatgaatttgccccagaaagtaaacaatgctacaggaacaaactctccaatgtctacttgcagaagttctctagatgggcattctaatcaaagaggttcatccataggggaggcaaacatgaatctaggatcacaactgccaaagaaaagatcaagctgttggttgctaggtgggcttctatgtgctacatttgtcaaggaagactgccgaaaaactgatgactcggagcagcaagcaaatggggaggaggctctgttttgcacattatgtaatgctgaggttcgcaaattcagcaaacactgcaggagttgtgacaagtgtgtggatggatttgatcatcattgtcggtggctaaataactgtgttgggcggaagaattatttcacattccttgctctgatggcaatcagtcttatctggcttgcaattgaatttggagtgggaattgctgttattgtactatgttttgtcgataagaatgcatcaagaaatattcaagacaagttggggaatggcttgactcgtgctccatttgctgttatcgtggggattacaacttatgattatgttgttgcaatgagagctatgagtgaggcagctccagaggacgaggaaggagaaaatatcatttactcgccatcaaattcagcaacaactgggttcagtgtaggaagttcacttggtattcaccacaaaggtgcttggtgtactcctccaaggatatttatcgatcaggatgaagtgatcccacatctggagcctggaatggtgccttcaaccgtggaccctgatggtgctggatatccggaaagagcaaatagagccaagaaggcagtcaaaatcagtgctcgcagcctcgcaaagctcgataagaatgaggtaatgaaagctgctgcaaaagctcgggcatcatcctcggttctgcgaccaatagatgcccgccatggtcatgaagctgatgtcatctccagcggcagtgccagtgtcaggagcagcatgagtgttgactacagtggcacaaaggaatcaaacagcgagatgaaactttctccgcttcataactcatacccccaaagccttgcaagccaggatgaatacgataccggcacaccaaccgcaagcagtttaagcagtctggtcaacatccacaagcttgcatcccactctcagttcagtgctgcgcctcgccctgcacctccggaaagacctgtgccggcgatggtgcggccacctgttcccaccacacaaataaccaacccagggataccgcggccagctgttcccacaacacaaacaaccaacccgatgttccaatcagccacatcttatgttcgagagaaccgaagggcctctgtcgtctgggatcaagaggctggtcggtacgtgtcagttcctgcacagacaagaacgggaactggagccgacctgccagcaagaaacccacggttcttggcgaacccaagtggcgagccaagcagccatgtgaggggtgttgcacccggcaacacatcgtcctcagcaatgccgtcagggcagccttcggagaggctgacctactctgggcagtcgatattcttcggtggccccatgctgaacacccctagcctgggcgcccagaggaacgaggcaggcgcaagagcgcgtccggagggaagcagagatcctaatgcccagcagcgtgacatccggggtgagaaagcgaggacaggctccttgccagtatttgctcctgggacggtccagaggaacccgccctttgacaaatgacctgctcctgctcatgaagtttatctgaagtgcgatgatgccgttacgctggaacacccccagcctgaagagttggcagatagttagggctgctctactggggttgccagacgggcggacaaggcagccgttggattgaaggctgctgccctgctggcactaggcaggtgctaacgagaaccacaaatattgctcgcagtcagtgctgacatttttcagtgttgcgggggcgatggagtgactgacgcacactgtgtttgtgttaggagttcatcagatacttgatgcgcgacagataggaagagctaatttctggcgatgtcaaacgctgatttgcagctgactttgtagcgtcgattgtggtcactgtgtggtgtgtgtgtgccatgggatactagtagacatgtgtaaaatggttagtcgaggtgcactttcggacactgctcgtgcgtacttgcttgcttgctagtaacaggtcttgagtttattcttgtagcatctccctttgtatggtgcgaaccatctctgcattttgttgtgct

SEQ ID NO: 32417 - DNA, 313 bp, Zea Mays
gtcaaaatcacggctctgagtcgattcggaaacggaacgttaattaatcgcgcgatgcggaagacaagccaagtcgacctcaagtgcaagctaatccgcaggataaagcggatggaccaacttgaagatgatcgccaagtggtcgccacttaacaacactaacctagtgttactcaggcaagccccggtgcatttgccacctccttgctgttttaaaatcttttatcaccttgtttgatgcattaggtgataggagttgtgtgctaaaccgttggtgcatttccttccttgattaaacaaccctaatacccat

SEQ ID NO: 32418 - DNA, 3099 bp, Zea Mays
aaagtctgatcccgccatggcgccatctccacccccgcttacctctctcggccgccatcatggaaggtccgaccccgccatcgctgtccccacgcggttgctccaaggaaggaaactctgatcccgctatccccgcccccgctctctctcgccatctccgtgcggctgctccaaggaaggaaggtccgaccccgccatcgccatccccgcgtggctgccttcccctctcgccatccccgcgcggctgctccaaggaaggaaggtccgaccccgccatcgccatccccgcgcgcccggtcgagcgccaccagccgcataagtctgggctagcgccgccggccaccattggctcggtcgagcacctcatgcccacgacggtcagtcgccgccttcatggctcagagtcgtcggtccctgcccaccaaggtcaccatgggctcgacgacgatggcaacaaggtcaaggtcgtcatcacaacccaaggttcgaggcgttcaaggcgaactctaggcacatcggcgagttcaacaagatgaaagacgttccctacaagctcggcctcaacaagaaaaaatcatcttctacgattcagagaaattatgtgaagcttcaatttgactccatgcaacaggtttagctattgacaacctcgattacattttcacagtgggagctccttcgattattaaccacagttgtgtaccaaatgcagttttgatatttgatggtaggacagcatatgttcgtgcattgcaaccgataaataaagatgaagaggtatctataagctacattgagactgcggcagtcaccaagaagagaaacaatgatctgaaacagtacttcttcacctgcacatgtccacgctgtgtaaagggttttgatgaggatgcactacttgaggggttcaggtgcaagagccaagcatgtgatggctttctgctgcccaactcaggtaaaaaggcttatacatgccaaaaatgtggtgcttctagagatgtggaagagataaaaaatatgagaagcaaaatactacagttatcggataaagcatcttcatttctttcatcaggaaataaggctgaagcaggttctatctacaagataatcaaacagttagagagaaatctgtaccatgctttctcaactactttgctgcacacgtgcgaaacactattgaagatatatctggaattacaagattggtggactgcgttgacatactgtagattgacaattcctgtttatgaaagagtttatccaccttttcatccgatgattggattacaattctatacttgtggaaagcttgaatgggactggttcggagggagacggcccctcactctctgccctcctgctgcctgcctactgctatactgttctcttgtgttcatgttcatataaaattcagtttcatgttcatattttcataactgtatatgttcatcttatcatacagtttgggtccttgaactttggaacactgaatccctactactctccccccataaagataggaaggaacacaaaagggtcaaatcaatacccttatgtctccccttctggaccaggctccgccgccggtgccgtggcctgcatcgcatgcccgacgctctacgcctacctgaagaagacagaccccggagtgcccgcgcagctgctggagtacgacgagcggttcgggcagtacggctgcgacttcaccttctacgactacaaccgaccggaggagctgccggcggcgatgaagcacgcctaccgagtcatcgttgccgaccctccctatctgagtaaggagtgcttggaaaaggttgccaaaacagtatctttcctcgcacgacctgaaggttcattcctgctgctgctcacaggggaagttcggatggaccgggcattggagctgctgaatgttcgtccctgcggtttcaggcctcgccactcgaacaaactaggcaacgagttccggctgttcacgaattaagatcctgctgacagacttggtggttgggagcaaagtgatggtgcccccatttaactataaactaatacaatttttgttctagagctgttccatctttatgaacatgttgcatctttgatccacagctcactgatccctccaatttaaattgtagtgacaattatttgaggaatctgtgtgctatgatgtatgattaatcaaacatttacactgttagtgtacctcattttaatttcattttaaaatacactgttagtgtatgtttcattttaatttcatcagtattctttagaatgtctcgttggcttattcagatttatagccaaaatgacattatcttggggatagttcatcagtattttttaatttcattatctcgttcggcggcggcatcccggacgggcacagcctgcacactggcgggcaggtcgtgaaggcacccaccatcgagcagaacctgtcgtgcaaccttgagtagctgtacaagggcatcaccaagaagttgaatatttctagggaaattgttgacgcaagtggctaaccagatggaccagtccctgtcagatttatgcttggttaatttctgctcgcccggtgcaggcgacgcttctccttcagacgctcaaccagtcaagaaggagtccgagagccaggcatggctcggattaggaccgaatgccgtcaagtccaacctgaacctgagctagcacacaacgacacagccaaataagacagcacagcaacctcaccaaagcctttgcaggacgatctgaaaatatgctttgccactagagtaccgaaaccataaatatcctctcgttatcgtgttttagtgttctgtttaggccgtggtcctacgccctcttgtcacatagtctggatgtaaagataagtagccagccatgactgagagaagttttttgggggggggggtgttaacacacggccactctgaattggccatgctaaggaaaatgatagtagtgcaaagagaagtatatgtcttttttctttttctttttctgaaagccagatcgtttggctctagccttgatgtatgcagaacaagtgattgtaatggattctgagtatcctcatcgtcttgctgttgcttc

SEQ ID NO: 32419 - DNA, 976 bp, Zea Mays
ctcatcttcaagctgccactctcagctgatccctatcctctaccgctctctctctcccttccgatattttgcaccgtcgtgctcaggtttctggtgttttctccattgcgttcatctccctctgtgctcctccctgtcgcgccctccctggtggacacgtgcagctccctctgccttccatgagttttttgaaccaagatatcactgagactggactttaaaaaatagtatcctgaacaccgtaattgaagttttagtattataaaccgtttagctttggttttttctatcggactgtgatttagccaatgttcagctactagtacaagctgttacggcaatccatctcactgccccgttcttagaacgaatatgtgctggagctcctctcgtgacgctcttctctcccggcgctggagctcccctatcaagtcttgtccgacggcgctccggggcgctcctctccctggtcccggcggtgctcctcttcctgatgttgatgattactcggcccagccagcagtgcttccccgccagcagtgcttccccgccagtgcttcctcgctcctggctgtgcttccccgcgaccggttatcgttccctgagacgctcggtctcgctcccgacctcaacaatggagaccccgccaggagcgatgacgtcggcaccggctgttgtcatccccgatgacaaccatggtccgtcactattgaagatgttgaccactcattgattaaggcaccaacaacgcttgaggagatcggtgctctgcctcctatggatgttgtaaagcttcgttaatggtcaatggccaatgagagtgttatgtacccaatgagagtgttatgtaccttaaacttgtatttctaagtactataagtgaactttcagtgaacttgttgttttcagtgagctttcagtgaactgttaaccggtattagaatcaatgaactttcattgaactgtgaactaggct

SEQ ID NO: 32420 - DNA, 2103 bp, Zea Mays
cagtgactcacgaactcacgactccagatctcccaccgctcgccatggacctcctcgacgcgaggcaccgccacacgccggattcgagctcctccccacatgccgcctccgacatgggtctcccgctcgccggggctgcctaccagccctacgtctctgagctcctctccttctccatcgagcgcctccacaaggagccggagcttctgagggtcgacgcggagcgagtgcgacggcagatgcaggaggtggcggtggagaactacggcgccttcatcgccgcctccgaggcgctctccttcgtccgcgcgcagctcgagagcttcgatggccacctcgaggccatgatagaggagataccaaacttaacatctggctgcactgagtttgttgagtctgcacaacaaattctggaggagaggaagcttaaccaaacattactagccaaccacactacattgcttgacttgcttgaaatcccaccattgatggacacgtgtatacggaatgggaactatgatgaagcacttgatctagaagcttttgtgagcaaaatatcgaagttgcacccagatttacctgttgtccaaggattagctgctgaagtaaagaagacagtacaatcattaatttcccagcttctccagaaactccgatcaaatattcagttacctgagtgcctccgtattgtagcacatctgcgtcgaattggagttttcagtgagtcagaattgcgcttacagggaagcttggctttctggaattcttgaagatctggaccaaaggaatgtttatgattacctcaaaggcatggtgacttgccacagggtacatctattcgatgttgttaatcaatatcgagcaatattcaacaatgataaatctggaaatgatgagaactccgaaggtgggctgcttttcagctgggcaatgcaacaagttagtaatcacctcgctactcttcaagttatgttaccaagcataacagaaggtgggtctctgtccaacattcttgaacaatgcatgtattgtgcaatgggccttggcttagttggattggatttccgtggcctccttccgccaatctttgaggacgcggttctaaatttattctcaaagaatatgagtatggcggttgaaaattttcaggttgttttggattcgcaccgctgggttccgatgccatctgttggctttgtagcaaatggtgttgtcgatgacacttctgatgatgtgactccaccttctgttttaatggagcatccacctcttgcagtgtttgttaacggtgtttcagcagcaatgaatgagctaagaccgtgcacaccattgagcttgaaagtcatccttgctcaggaggtggtcaagggactacatgcagtctctgactccctagtaagatacaaagctatgcggatgcttcgtggaaatgagtccgctcttttcctgtcactctgccaggcatttatcgaggttgtacatccttattgtgccgcatgttttggtcgatgctacccgaatggggcaacattgatctcagagtgtcaaggcacactggacgctgtccgtcagctattgaccatacctgcaagatctaacagttccagtatcgaaagaaagcagtcaggagccattgaaagaaagcaatctgttgagagccctgggacagcagtcacgaataacgagctgtcagccgatggacctgggctagagatcaacgatgctgctacaaccaccaccccaccggtagaggacgacgtgagtacccatccaccagcaagtaagtagcttggacctccgtttgaatttgttaaagctctttatcaaggcctggtttagtcaaccagagaagaaattgctgcaaacattatattcatcgataataattcatagttttgctccagttctacagtgtacacaatacctcactggatatttgtatcttattttttttatcactcattaaatttttagctgttcattgttatagtcaatacctagatgttgtagagtgtgtccaacctgaacattcagtaatatgatgagtacaaacggtgttcatcgtgttgactgcacacttctgaaataaaagatctgattcat

SEQ ID NO: 32421 - DNA, 326 bp, Zea Mays
taggtacgctagtgaaccacgtgatgcggagcaccaaagatgagtcgaccacaagatgctgttaagcgtgggctactccacaaggtgatgttggtgatgaacctgaaggtggatgatctgatcaagtgccaagatggaagatgctcaccaagcggacatcatctaaccacactaacctagtgttatcccaggcaagccccggtgcatttgccacccccttgttgttataaacttttatcacttatatgttgcattaggtgataggagttgtttgaataaacagttgatgcattaccattccttggaatttgattactattccttga

SEQ ID NO: 32422 - DNA, 1643 bp, Zea Mays
agctcgtcgtccccgtcggaggagaacctgtttatattcttgtgaggaagaaacgttcccatccccgtcattgaggaattcggaatcggggatcgagtacatctccacttcttcccaggcggccaggccctggcccgcggccgcaccgcaccgtagtttgttccttccgcaaggaagcgagagaaaatcgagtgaaaaggaaggggaaataaggctgaatcacagtttctggatcggaggagcatccccgcctaggtctctgcagccatggttcgcggatcgctcggcaagcttgcatcgcgcgccctctccgtcgcccgggagatggcagcaccagcagctccgccgcctcaacatccacgagtaccagggcgcggagttgatgggtaaatacgggatcaacgtgcccaggggcgcggcggctgggtccgtacacgaggtcaaggacgccttgaagaacatgttccccagcgagaaagagatagttgttaaaagtcaaatccttgctggtggccgagggctgggaactttcaaaagcggactgcaaggtggtgtccatattgttaaggctgaggaagctgaattgattgcaagtaaaatgttaggccagattctgataacgaaacaaactggtccagagggaaagattgtgagcaaggtctacttgtgtgagaaactatctcttactaatgagatgtacttcgccatcacccttgataggaaaactgctggtccgctcattattgcttgcagcaagggaggaaccagtattgaagatcttgcggagaagtatcctgatatgattattaaggttcctattgatgtatttaaaggaatcacagatgaggatgcagctaaagttgttgatggtcttgatggagagattggttgcatggtgaatggagcaggattggccatggcgaccatggatattataaagttgcatggtggtacgcccgccaattttcttgatgtcggtggaagtgcatcagaggggcaggttgtggaagcttttaagatactgacttcagatgatagagtgaaggcaattctagtgaacatttttggtggcattatgaaatgtgatgtgatagcaagtggaattgttaatgctgccaaacaggttgacctgaaagttcctgttgttgttcggttggaaggcaccaatgtagaccaaggaaagaggattcttaaggaaagtggaatgactttgatcactgcagaagatcttgatgatgcggcagagaaagctgtaaaagcatccgtcaaataactagtgtatcaatctgaagtttctttttttttcactggtacaagatgagcagtgctcttttacggatttcgatttggagcagaagtcgtgaactgcaacgtttttgaaatggtttgactctgatgtcactcaagcgcgatggacaggtggagcatgctgaatagttcgcattttttgcaaggatgatgctatctagctaaaatttatcatacgcacgcacaaaggaaataacatgtgtgcctgcagcacatcgggacatgcaatcccctgttaatatttttaattagatggagccaacattgcgtccaaccaatctcatacaggagggatggaacacgcgtctaagcacatatatctactactctataag

SEQ ID NO: 32423 - DNA, 2971 bp, Zea Mays
gaaaatcccctcacgcgcgcgcgcacacacaccaaaccccatccgagaattattaccttcacagcttcactttccgacacagtttccgagacaattccagcaagatagattttctagcgaggcagtgcggcgcaactgtaccgaccgtgcgcgtatctgtccggatgccatcttcgctaatgcgacacggcgagatgaggcctccccaccccggaggcccgggcgcgagaccaccttgcatgtgcacgccgccacgcccacgccaccggctggatgcgcgttgcgcgcgcatgcggcgcaacaaaaccagccaacgtaaacagcttctcgaccgccccccggcgcggcttcgtcgtcgtcactcgtgagccgcgtcattccgtccgtcgcgcgcgcacgcccgtgctctccttaaattcccccggccccgacgccatgccctccggaattataccacgggccgcttgctactagttattgcgggcaggtagctcagcggtgaccacaggccaccaccgccaccgagcgacgaccatggctttgccgtcgcgggcgcggctcctcctcctcctctgcttcgtcgccgccgcggcgctgctcgtcgcgccgggggaggtgtccgccaccgccgccgccgccgacgccggggggcacgggaagcggcgcgggcacagcacgcacacgaggcgcctgcggcccgggaagggcgcggcggccgcgaagccgtaccccgcgaacgcggcgcgggtggaggcgatcgagcggcagttcgcgcggtgggtgcggtccatgggcggccacggccacaacagcagtagcaccgcctacagccgggcgctcagccgcgcgtccctgcccgcgcgcacgctcgtcgtcgacaagaacccgggcgccgggaacttcacgtccatccaggccgccgtggactcgctcccgctcatcaacctcgcccgcgtcgtcatcagggtcaacgccggcacgtacacggagaaggtgagcatctcgccgatgcgcgcgttcgtcaccgtggagggcgccggcgccgacaagacggtggtgcagtggggcgacacggcggacacggccggggcctggggcaggcccatgggcacgttcggctccgccacgttcgccgtcaactccatgttcttcgtcgccaagaacattaccttcaagaacacggcccccgtgccgaggcccggcgccctgggcaagcagggggtggcgctgcggatatcggcggacagcgcggcgttcgtggggtgcaacttcctgggcgcgcaggacacgctgtacgaccacctcggccgccactactaccgggactgctacatcgagggctccgtcgacttcatctttggcaacgcgctctccctctacgaggtcagtagtacgcacgcaactcagatgcacgaaacgaaactgtcattgcggcacttgtaggacgcagacacgggacacagacagacactgttgaacctaatcaaccccctttcggtttttaatgggtaaactacagacacagacacagtagagtagagcgtagtagagtgagcgtgagccagtgaggtgaacgaaccttttccttgtcgttggcggcgggcacggttgcgggatgcggtttcctgaggcctgcaggttccctggccccagtccccagaccagaggcgtggtgtggtgccgcccgtgacgcctgcctgccagtgccagccatagctggaccgacgcctcgtcgccgtctcctcctgcctgcctgcctggccgctctgccctttacgcagagcaccacttgcttttcttgtgctctcgatcggaaacgactaacaaatggatgacggtgagaaaataaaaaccccgcaggggtgccatgtgcacgcgatcgcgcggaactacggcgcgctgacggcgcagagccggcagagcctgctggaggacacggggttctcgttcgtgagctgccgggtgacggggtccggcgcgctctacctgggccgcgcctggggcaccttctcccgcgtcgtcttcgcctacacctacatggacaacatcatcatcccgcgcggctggtacaactggggcgacccgacgcgggagatgacggtgttctacgggcagtataagtgcacggggccgggcgcgaactacgccggcagggtgcagtggtcgcgggagctcaccgacgacgaggccaagcccttcatctcactcgacttcatcgacggcttcgagtggctccggctgtagaattcattgttgacacactacatgaccttaattaatttctgtgaagaagaagaagaaaacaaaaatagaacgaaaatactgatgcaattgtttgagctgcgtaagatgagattggtgactgatgactcgatgaggactgcagacattgcagtgcatcgaaatcgaatcatcgctgcaactggcaactggcaagtgttaccatggactattgtgggctgaaagggccccataactggaacagactctcgtttacaaagggtttaatttatgaatctggcctggcttggcccaggcctagcgccaggtttggtgcacgttcctgacgtgcgtgcgcagccagtcaagcgggggcccatcactccactcgttccgagcattcatatttacagtcactgggaatagcgattttatagctaacataagcactgcaaaatgcacctatgctaattattgagtgatttcttaagtactttggtgtctagcgctaatgatccgtgaataaatttttttagtttcttcttggtttaaaagaaggatcaacgtgtagtttatgttttagagtatggatatagagttttatgagtgcagatagcataaacagattgcaccagcatgagtttgcaggccgctgcatccaatttatgtccctgtatttcacccacactggcagtcgtgaagaggttgcgtacacgctttacagcgcggcaaagcttccccttacccccgg

SEQ ID NO: 32424 - DNA, 1164 bp, Zea Mays
aaaaaaggaggggctcgcacgagagacgtggtccacctgcccaccgggcgcctactgggggcggttgttgttggtatatttgcggtggccggggacgggtcagcaccgccttcttctcaccagcccctctcgcctcacgaaaaggcgcaggccaaggccaaggccaagccgccccctccctcctctcctctcctctcctctcctttcctctccactctctggcagccaaaggcgaggccgagatcctgcgcgcggaggatgccttccaggtccatgagccggctgtccgtcgagtccgcctcgggcagcggcggcggcggctgccgggaggccgagccggtgctctgcgcgcctcggccgcgcagggcccagcagcagctggtccacgtccacccccgcggcgccgacctcatcctcggcccgccgcccttccttctcaacgagcgaggagggtcggtgcagctgggcggcgttcggcggcgggtcgccgccggcgcgcgcgggcaacccgctggtgcacgaccccagcttcctgctgagccagcgccaccccgcggcggacccgccgctggagctcggcttcttcgaccacctgatccgcaccagcagctacgttcaccggccgacgccgacgacgtcgtataccagcaccagcagcagcggcagtagcagcaagagtagttttggcccgtcgtcgttcgcgcccgccgtgaggatccaggggttcgacgtcgccgcgtgccggagctcccacagcggcggcggcggcgcgggcggccgcgttctgtccgccgcccgcgcgtgagctagcggtcgagctccatggtgtggaggggcaggaaatcaaagagggaggaggaagaaccttgtgtacagattatctgtctgatgagtcgtgttcgtgtccgctgtactaattgtgaacaccaccacgtagcatagcatagcatatagcatagcatatcaaagacaactaggtcggtcggacggtcagcgctcgtgttcttgtagcagtcgagctagcgactaggctaccgcgcgccatgtaacgtacggtcctgcaaacaatactgcacgtataaagatggaaaccgtgtacatacctatacatgttcgtacgttcgatcgatccatcgatcgagacgctggatgctcggtggcaag

SEQ ID NO: 32425 - DNA, 930 bp, Zea Mays
ctttggcaacctttatggcggcgatcgagaagttcctgcagttccaggacgccgtcccctgcaagatccgcgccaagcgcgggtgcgccacccacccgcgcagcatcgccgagcgggttcgttcgtgcctgcatccagccagccagctgcattccttggctgatactcttgaattctcgcttgggttttccagctagcccaatccgagaaaagaaagagagaagggggccgggtggggaataaaactcgaaactgattcatgtcgttgtcgctgtcaggtgaggaggacgaagatcagcgagcggatacggaagctgcaggagctcgtgcccaacatggaaaagcaaaccaacactgccgacatgctggatctggctgtggactacatcaaggatcttcagaagcaggtcaaggtgctgaacgacggccgcgccaactgcacctgctccggcggcggcaagctgcaggacccgttcaccagttagaaggagcagcagccggcgcgcgcgtagcagtgcgcggccatgcatggcccgccgcaaggccggcctgactgacgcctccgtgccggccggcggctaagctcgcttcgagcgctcctcctcgattggagtaagagtcgtcgaagtatagtagtatcagtgtacgtgttcggctttacatagttaactgaatgagtagtacgtagtctgttatacatgcaagttcattagcaggcaggccccacgtacgtataccagtgacacagctgcgtcagttatctgtggctcttgcagcatgtgtgtctctgtcatcgtttgcacttactgctcggatcctacgcgacacgtacatgcatatgtacgcatgcatgcacacgcacctgatccaatccgactggatgcattgcgtctgttgtgtctgcctgccggctggctggctgcgtgcgtg

SEQ ID NO: 32426 - DNA, 638 bp, Zea Mays
cggcatccccccccctgcagccggtgagctgctgtgagcctatccagtggcgattccattcctctccgtgtggacgcaaggactcagtgaaccacttccagatactcgctgcttctcccgtgcccatgggaaactgccagtgcagagaaggtcaaagaagcacacaagagagtgatggtggccaatcatccagatgcgggtggaagtcattaccttgcttcaaagattaacgaggcaaaggatgtaatgacagggaaaacaaaagggggtgggtctgccttttgatcggtacacggacaacgtgttcttccactgaaagagcaattttgtgtctccagactcgcattagaagatatgccgaaatctttgtgtgttttatgaaaatttgtggacaaaaaaaaaagtagtggacctttatggagcaggcaattcgttgcttagtaaagctcggctcagttgtgcttgtgcccgaatcaattggacattgttgctaattgagtcccctgtcctttgtttttccttttttttcattgatatcctgaaattcaccaacacaaagtatcatgaactgccttttattgataaattctgtatctgttttgaccaacgacctgtgtaatttcataccatcatcattg

SEQ ID NO: 32427 - DNA, 5082 bp, Zea Mays
acggaacagcagcagagggatatcctctcctctctcgtgtctcccaccgatgcggatgcggatgccgatgccgatgccgaagcgcacctgtctcttctccttgccgaccctccacccccagccgaagtgaggccaccaatcacacagccgctccccccgctcgtcctcctcccctgcccctgcctccgcccccgcccccgcccccgccccgccacgccagcatttggattggattgccggcggccgagtggaggcggagatccatccggactccgatccaggcacgcatgacatcacatcagttcagctagatgcctgaaggagaagttcagtagcacaccactacctcacaaaacagctcttctgctcgtgcaaaagtatccagggtccagatgggttcagacaagcagattggtagcccacgccaactcttggaaacactaaagatgggcagagttaggactatcctgacacatacatacccgtaccctcacgagcactccaggcatattatgactgcagtgattattgcctgtctcttctttatatcgtctgacaacatgcacacgctcatacataaactggataacaatatcaagtggtggtccatgtatgtttgcctcattggcttcttctatttcttctcatctccttttcttggaaggaccattcagcccagctactcaaattttaaccgctgtgcttttcatcattgcctttcatatcatatttattggtctctggtacattgggttggttgcacgcttggcaggaacgaggccaggcgtatggacaattctccagaactgtacagtaatcagcattgcatgttgtgtgttctacagtcattgtgggaatcttgctgtgcacaagagcaaatcttttggtagtagttctgatcccaatttgcttgcttttcttaaaaatgaaaacgggagtacctggatatcaaattttctccgtatgaatcagttgaaagatgagatatgttcgtcttggtttgctcctgttggatctgcaagtgactatcctattctggcaaaatgggttatctacggggaggtactgcctgcttctcctttattcatctattatttctagtcgcactttcttaaggtgacatccatgttgcacttctttgatcatgtttttctccagttagtttgcagcggatcctgtgctggcccatcggatgaaatctctcctttgtactcattatgggctacatttgttggcctctatatcgctaactttgttgtggagagatcaactgggtatgcctttagtttttcacactatacgtactaaggtcctgtttggaagcaacctagtttttaagaatctagtttggaaccacgtctgttttcataaaccagtttcttaaaaattgggtgcttccaaacatgacctaatattgctgaattagttgttgccacgtggaggctactaatatttctttctgataccttaagctctctctgtggatgactagtgattgtgtgggaaagtgaactgcttgattgatattgcatagaggtggtggttacatatatagacacataacccctaaccctaatgggccgacaacccaacagtggtgtcggcccacccacacgcacagacaatctaacatccccccctcgtagtcgcaacgggggcactgcacacgatgggactggagtagaagccgaaggtaggagccgacgggttgatatccccccacagtcgcaacgtcgtgagggtgtgaatgttgcggctggagtagacaccggtgtggactctgagaaggtgatatcccctagatgtcgaggtagccgaagtcgaggtggtcgtggtcgtggtcgggagacatgcaacaatagcttgtggttcgggaggggtcgacgttcgagcatcaacgatcggcaacgcgatacaacaaaagagcaccaacaaaccaaccttcttgcttcttcgatcgtccggacgtcgaggagccccgctagggaggccggcggcagcgcacgcgtctgcgccagtcatggtggccgcgcccgcgacagaatagaaggggtaaaggcggatctggtcggaaaggccacgtcggcgacagatccagccaggaagatggcaatccggccaaaggaacgacagatctagccgggaaggtcgaagcaacggtgaatccggccggcggcggggcggacaactgcgcctgctctcgtgctcgccagaggccggcggcggaggagcggagccggcgagtagaggagaggggacgccgacggccggagaggagaagaggccgtgtggtggcctgcatctgggatgtggccgcccctaggagggaaggatgagcctcctgggggggctgagatggcggctgtccctgtgggatgctggcggctgctgcggggttgggcgagaaaacactaaccctaacctagtctggtaccatgtaggaaagtgaattgcttgattgatatcacatagaggtggtggttacatatatagacacaaaaccctaaccctaatgggccggcagcccaacagtggtgccggcccccccacacacatagtttaacagattgtgcaattctaattcttggttatgttccgtaaatacttcaggtgggctcttacccacccgtcaacagatttggaggatgagaaactgaagaggcatatgaaaccagattttctggacatggtaccttggtattcagggacatcagctgatttattcaagacagcatttgatcttatggtctctgtgactctttttgttgggcgatttgacatgcgcatgatgcaggctgcaatgaaaggaccaacaggcaacactccaaatgatgacctattgtatgaccacttcaatgaaagggaagacctttggtttgactttgttgcagacaccggtgatggagggaattcatcatatacagttgcccgactgttagcccaaccatctattaggactgttatcggtggctctatgcatactcttccacgtgggaacttacttattatcggcggagatcttgcgtacccaaacccttcatcatttacatacgagaggcgcttctttaggccttttgagtatgctctgcaacctccaccttggtacagagatgaacatatagctttggataagcctgagcttcctcctggtgtatcaaagatgactgaatatgatggaccacagtgtttcataattcctggaaatcatgactggtttgatgggcttcatacttttatgagatatatatgtcataaaagctggttaggtggatggtttctgcctcagaagaagagttattttgcattgcatcttcccaagggttggtggatatttggtcttgatttatctctccatggcgatgttgatgtataccaattcaagttctttgctgatgtttgtcagaataaggttggagagaatgattctgtgattgtagtaacacatgagccaaactggcttcttgattggtactggaatgagactacaggcaagaatgtatcacacttaattcaggaatacctgaaaggaagatgtaaacttcgcatggcaggggatttacaccattttatgaggcactctgccactcgatcagaaaagaataattttgtgcaacacttgcttgttaatggatgtggtggtgcctttttgcacccaacacatgttttcagaaactttgagaggttctctggaaccacctatgaatgcaaggcagcttatccatcctatgatgagtctactgggattgcattgggtaacatattgaagttccgcaaaaagaattggcagtttgacatcattggcggttttatatacttcattttggtgttttcaatgttcccacagtgtaatcttgttcgtatcttaaatgaagaaacttggtctgggcgtctgaaaagcttctcaggcacaatatggagtgctttgctttatatttttgagcactcttatgtctcttcagtaggaagtcttactttattgacggcgtcatattcattcgtaccatccaaactatcaaggaggagaagagctattataggcggcctccatgttttggcccatttaactgcagcactacttttaatgttgctgctggagttgggcattgaaatttgtattcgtaaccatttattggcaacttcaggttatcacactctgtatgaatggtatcgatccatggaaagtgagcattttccagatcctactggtcttcgtgctcgtttggagcaatggactctgggactgtatccagcatgtataaaatatcttatggcagcctttgacgtccctgaggtcatggctgtgacaagaataaatatatgcaagaacggaatgatgtctctttcgcggagtgttctgatcatgtactacacttctgtgtttatctatttctggattttctcgactccagttgtttctctcatatttggtagttacctatacatctgcatcaattggttccacatacactttgatgaagccttctcgtcgctgcgcatcgcaaactacaaatccttcacaaggttccatgttaagaaggatggtgatctagaaatatttactcttgcagttgacaaggtcccaaaggactggaagttggatccgaggtgggaatcagagggacgagggcctcatcagctcagccatgaccggaagcatccaagcaagtggaggtcagcctcatcaactgaccctgtgagatctgtacgggttgttgatcatttcaccatcgaaagaacaagaaccccagatatggagccctcttcctgattgtgcagcccttactattataaggagttgctactgctgctagaaaaattaacaataactagcttcaacacacagtattgtttttgtttccacatccagccaataggtggaccgaggtgatctgcccttgtcggcgtccccgctttactgacctcacctgcagcattgtaatctgtatagaaagaaaattcacctgctgcctattgcttgtattcaatcaaaggaactctaaaaaaaagagtgttacagaagaatgttttgagaaagcaaagggatgaatcgattcatcatcatttactaaagattgattctat

SEQ ID NO: 32428 - DNA, 1133 bp, Zea Mays
gtccaacgcagccaggatgcgacaatgcgaggcaggctgcttcatgcgtgaaaccaatcgtttcttcggcccggcacatgcaagcagccatgggcgagaaagaataggaccgccgccgccgctttgtccctccgttcacaaccttgtcgcacgagtctcttattcgggaaaagttaaacagattgttggctctactcttcgggatttagcaaatgatagcatggaacttgtgacaaactttgaatcagacaaatctcctgcagaatttgctaaattttataaagcagatgaacttctaggaggacatgttataatgcttggcgcaaatccttcaagccaggctgctgcactggaggcactacgtgcatatcctggtggtttgcaagttggaggtgggataaatttggagaatgcaatgtcttaccttaatgaaggggccagtcatgtgatagtgacctcttatgtgtttagtgatggcaagatgaacactgaaaggttaagaaaacttgtcgagctggttgggaaacagaggctcgtgctggacctcagttgtcgaaaaaaggatggccgatataccattgtaactgacaggtggcaaaagttcagtgatgtgtttgtggatgaaccaacattagaatatctcgctgcctttgcagatgagtttttggttcatggtgttgatgtggagggcaaaaggttaggaattgatgaggaacttgtggaactattggggcactattcaccaatcccagtcacttatgctgggggtgtgtcaacaatggacgacctagagaggataaagaaagcaggcaaaagtcgggtagatgtaacaattgggagtgctctagatatatttggaggagatttgccttacaaagatgttgtcctttggcacaggaagcaaagtatggttggtcaagtgtgaagaaacacaagggttggcgctaactcaaaaggtggtcaatttgtgagtaatgtactgttcttgacagtttctgacctcgatttgtctattgtaactgaataggctgaattgatgctgatagatacattttgcctgctacaacactgacattctgatttttaagttcctcgtttgagaaaataataatattgatgcaaattttggctct

SEQ ID NO: 32429 - DNA, 1437 bp, Zea Mays
atggggcaccaggcgcagcacgccacggacgacaccgaggagctgctggcagcgcaccgcgagctgtggtgccatgccctgggctacgtcaagtccatggcgctcaaatgcgccttggacctgcgcatccccgacatcatccaacgctgcggcggaagcgccacactaggccagctgctcgccgccagcgaggtcccggcgtccaacctcggctaccttcgacgggtcatgcgcacgctgacagccatgcgcatcttcgcggtcgtcggccacggtcacggtcccgacaaggccgacgaccctgcagacgacgacgcgaccgccgtctcctaccggctcaccccggcgtcccgcctgctcgccaccagcgacgacgacgacgacgcctcgaagaataatctgagcatacatcccaacatctccagccacgtccgtcccaaaaacgtctccctcctgttcagcatggccgagtggatgaaggacgagcaggcgctctccgtgtcgctctacgagacggtgaaccgcaagtgcatgtgggcgtgcgtagaagacgacgccgcgaccagagcctgcttctacgaaagcatggacgccgacacccgcctcgtcatgcaggccgtgatccgcaagtgccctgccgtcttcgacgacggcctcacgtcgctcgtcgacgtcggcggcgcccggggcacggccgctgcggccgtcgtcgccgccttcccgcacatccagaagtgcaccgtcatggacctcccccacatcgtcgccgaggctcccgccggcaccggactgtgcttccacggcggcgacatgtttgagcacatcccgtcggctgatgcagttatgctcaagtggattggattctgcacgactgggatgacgacaagtgcgtcaagataatggagcgctgcaaggaagcgatcagtggcaaggaagggagaggagggaaggtgattataatagaaacagtgcttggatctcggccagacgacgacgcgacatgcaaggagacgtatgtcttggatctccaaatactgagcttcgtgaacggagccgagcgagaggagcacgagtggaggaggatcttcctagctgctggattccgtgactacaagatcacgcacactcgtggtatcccgtcgatcatcgaggtcttcccatgatggatgagagtcgatcgatggatcgagagagagggcagggaataagttagtttgaataaggtgcgtgcgtgcgtgcatgctgatatagcttgcattgtgtttgtaataatcaatcatatgcatggtgaacatgtttaccatttattttcattattagttagcatttgtgatttgtgggcgtacgtagtagaataatcacgggctttcatcaagctctcatgtcaactgtgtaatgcaatggaaaactgttggcacattttttggtcaaacacca

SEQ ID NO: 32430 - DNA, 2184 bp, Zea Mays
acgctagctctgtatgcaaacatgcctgactcgcccgttcgcctatctcgcccccccccccccccccccccagcatcggagaacggagggaaccagggagctccggccgcctagaaccggagctcccaaatagatcgatccatcggtcgttgagcggacacggcaatggaagcccacgcctcgcggggccgccgcaccctggaggagatccggcagaagagagccgccgagaggatgcagcacgccctcccgatcgcggcgtctcacgtcgactctcacgggaaccaaagagccggagctgagcttcttgctcgagttcaagaacttgaaaatgggaacacggaattggtgagggaaaacaaaatgctcttgtccaagattgatgagaagggagttgagaaggatgcccttgtaaaccgtttgaatgatctcgagcggaatgtagttccctctttgcaaaaaaacttgaatgacatttctttggagaaagatgctgctgtagttgctaaggaggatgctctagctcaactcaggagcatgaagaaacggctcaaggaagcagaagaagaacagtataaggcagaagaagactcagcctccttgagagcacagctaaacaccctgcagcagcaagtaatgggacactcttacagtggatatacaatgggaatatcgactgaggaatctgttgccatggaaaaggagatacaagatttacaggcacagctaaagcaagagtcactgctaagacaacaggagcaacaaaaattagctgaagagtcgcagctgaggcaacaagagcaagaaaaactagccaaagaacaaatccatattgcttctctggaggctgaaaagcaacagctggaagaccaaattactatgttgacaaagaaagctacagaggacgcttctgagtttgctgcacacaaggcattttcaatgcaagatagggaaaaacttgaaaaccagttgcatgacatggctttgatgattgagaggctagaggggagtcgtcaaaaactgctaatggagattgattctcaatcgtcagaaatagagaaactgtttgaggagaattcggccttatctacttcttatcaagaagccatagctattacagtacaatgggaaaaccaggttagagattgtctgaagcaaaatgaagagctccgttctcacttggagaaactaagacttgaacaagctagcctgttggaagtaagcaatatcactaccaaatcagatggacaaattgaaaacagtatctcaaacctaccagaaatggtcaccgagaatatttctctgaagcttataaaagaacagagcagatctgagagtttgttggcagagataatgaaactttcagctgagcttaggaaagcagtccaagcacagaataaccttgtacgcttgtacaggcctgtattaagagacattgagagcaatctgatgaaaatgaaacaagaaacttatgcgacgatccaatgatacatggtgtcaaactcaatccacgatactgtggaatggccgcatagtcacaagctccaccgtaggcctggttcggttgcatctgaattggaggtgattgaatccccttctattcaattttaactagggagagatttaatcccatccaatcttctctgatccagacgcaaccaacaagcccttgctcaagatgctggtgaatgtattggtctcatgccattttcaagatgctggtggaaagcagttctttcggtggctaccattcataagtagagttctgtcgagatcgttcaacctgtatcatactcttgtatacccgattcccaccggttcatcttataaactgggggcaaatggagaaaaagattggttagggcttgtttggtgaaaaagattggttagggcttgtttggttacaacttacaagggaggtggaggggactggagggaaataaactaatttttcccttaatccccacatttcccttctaaccaaaacaaattattatccctgctctcagtccacaaattgggcgcaacaactttttaaatcatgtcatttgcgtccgcatgttcgtttggccgttggatgggtccgcatgtagggtgtatttggtttggtgaatgaggtggtctatttctctcttctcacttttttatttggtttgtgaaatataatagttaatctatcattat

SEQ ID NO: 32431 - DNA, 1204 bp, Zea Mays
cgccgttcgcctcctctccacactccgccagatcccatccctctcgcccacgcgcgggtatcggagtcggagcatggcgtctgcagtggtggtggacgccggcgacgcgccggagcccacggttcgtaacctcctggaccaggagtccctcaagtgggtcttcgtcggcgggaagggcggcgtcggcaagactacctgcagctccatcctctccgtcctcctcgccggggtccgctcgtccgtgctcgtcatctccaccgaccccgcgcacaacctcagcgacgccttccagcagcgcttcaccaagttccccactctcgtccgcggattcaccaacctctacgccatggaaattgacccaaaggtagaaaatgatgatttatccaatgaaggaatggaaggattcctgtcagaactgacaaatgcgattccaggagtagatgaagctatgagttttgctgaaatgctaaaattagtccaaacaatggattactctgttgtagtttttgatactgctcctacagggcatacattacggttgcttcagttcccagcaaccctagagaagggtcttgagaaaatgatggagttgaaaaatagatttggcggtctgttgaatcaggccagtcgattgtttggtcttggtgatgagctgaacgaggatgcaatgcttgggaaacttgagggtatgaaggatgtgatcgaacaagtgaacaggcaatttaaagatccactgtcgagtcaaaactgctaaaagcacggatgaaaatgcaacaaaaatacattgatcagttccatatgttatacgatgacttcaacatcaccaagcttcccttgctttcagaagaggtttgtggtgttcaagctctccaaaacttttcccagcacttccttacaccatacaagtctactcttaaaaggggcaccgtcgaggagctcgaacagagaataactatattaaaatctgcactgcaagaagctgagacagagttagatagggttaggaaagggaagcagtcagtgtgattttttttccacaggtcaagtgtgtaaaaccagagagacgatcaattttttcgtgtcattacactcttgttgatttcactatcatgtttcctcatcgaggagtttagacttgtaatagctatcggcagagaagtgtttgattcacacaagatatatagatccattctttttgccggtt

SEQ ID NO: 32432 - DNA, 262 bp, Zea Mays
ctcacacttggccgcccctccctcctttccccttgggctggccgtcctctcctcccatggcagcccctctccacggcttcctccctctagatctccccccgcgcagcaaggatcgagaagaggaggagcacgttgaattgaaagggaagagaggatcaaggagatgttcttccccatctcttcttgcagaatttcttggggaaaccctaggtatggatgagatccttgtttctccctgtaattatgtgcttttggaggttgt

SEQ ID NO: 32433 - DNA, 2356 bp, Zea Mays
ctcgcatgtagttgtgtggccgccgtgcggtgatcgcggcggcggcgctaagctgttctgcaggccacacgccggcggccgcgctgactggctatcgatcagccggcgggcgggcggcgggcggtgacagaagagagtgagcacacggccgggcggaacggcaccggcggatgtgccgtcgcggccgcgtgctcactgctctatctgtcacccactccccctccccgttcctctcctccggctgccttgccggtcgatcgaagccggccgcgctgtgcctgtgcgcagccgtcgtgatcaccgcgcctgtgcccgcggcgctggcacgctagccgctagctacgtccacccgccgctcttcttgtccgtgtcattgtatgccgcggaacgggtcgccgctatacgctacgtggcctctcgttggtgcccggcggccgtccgcgggaatttctatttctgggcggttcgtacgtacggcctggatgccggatctgagcttttgggcgcgcgcgtgtacctcctcctcgcacggattcgggattccctcccattcgcttggtacggacaagccgctgctagccctgttcattgtttccgaggaaagggaagggatccaaccgttgcctgcgcctgcaagcttctcgggaagcagaagacgctggtgacagaagaattccaatggaagcacaccgccggtcgattctctgtcttagatctgcttagcatcgtcacattgttctcttttctccttgccagggtcagtggtacccccgatccatatattcagagatttaacaggagatggacgatagatggcgctgcagtctgcagatcctgttcatactgtccgtcctgtgtgacacagctagtctctgcagcgcagccactttggcgatgacggcacatttgtgctccagcctccagggaatggtggattggtggtgggggtcgctgtccagccactgttccattcgtgacgtctcgtacttatctcttcaatgacagtgagctgcttctttcttggtgaacattcttgaaaacctttgattttgaggggtagtttcatcacgatatttgtgttaccacatcaataggtataagataaaatgaagaatagaatatatccttttaataaatagttttacggcacaattttatagactaacatgcgaatctaaataaccaatagaaatagatgaaacaaattgctttaatggtggtttcacgcgccttctaataccttggaaatgtgttaacatagtctcatgttaatgaaactattttcatttatttcataataaatatagtgctatgtcatgaaaattctatgcagtctactaattaatatcatgcaacctcaattgagaatgatctaagagcatgtttaataatatagcatataacgcgctttatgatattgctatgtcatataaccaactaaaaggttgctcatataataaccacctcatgatacaagctgtatatttaatatttggtccacatctctttctcatagagagtcttggagtcagtgagtagctagcccactctcagctggtagtgagcagctcgctttttctctaccctcaattgtttttcttccacatcaccataaatctgatatggcatattttatcgttcctctacatcagcttattatacttcctctaacaactatgcccgctagagcatataaatttcatcaccatttattatctatactattattaagattgtagtgtagaccatggcacaaccatgcctccgcctctccctccccctctgcagcctgactgggctccaatccgctaatgacgtcgacagcaccgctcgcccgcccttcttccccgcgtcgctaccccctctgcgctcctgacccgttaaccgcacacggactcccctattacaccgatttggcaatgccgatcctgaacccgaaccctggggttcgaggctcatcaatttctaccaacaatgtcgacaacgccgctcccctgccccttccctgcaccccctccgcactcccgacctcattaaccgcacactcactccccgattcacgtcgcacacacgtcgatttggctatgtcgatccctaaccccgaacctcgggttcaaggctcatcaatttccgccaacgacgtcgacaacgccgctcccccgcccccttccccgtgccgcctccccctcctcgctcccaacctcgttaaccgtgctcgcattcctcgattttcgtcgcactcacgccgatttggtaatgctgaacccctgggttcgaggctcgtcaatttgtattccgtggcatcacacggacacacacacctagtagtggataaaatgcttaatttgttaggaat

SEQ ID NO: 32434 - DNA, 2001 bp, Zea Mays
cgggccccaccaccacaccggcacacctcactcctcagtgccgtctcctccctcggattcccacttgcggacatctggggcccacaggagcgctcaacgcaggccgcgcacggcgcaccacccagtctctctctgccacctagggtcgttgcctcgtcgaggagcatctctgcagtgcagcggcagctgtgtccaactaccaagtcaaggtgaccgttgggctgggcggcacgagacgcggagacgagacgcaacaaaacccttgtcagtcgcccgagccccaaggctcgcacccacgccagcggcaccgcacccccacccacctcggcggcgagtccgagccccaggaacgaagggcgatggcggcgatgatgatggccacgtccgagtcaaagtcccccgcccgcgcgctgaggcggctggctggcgccgcggtcgccgccgtgctgctccgccgcaccttcagcgcctccaagtgcaagacggaggcgcggatggcgacggcgcggatgaagctgctgcggaaccggagggaggcgcaggtgcgccagatgcgccgcgacattgccgcgctcctccgcgacaaacaggaggataccgcacgcatcagggttgaacatgtaattagggaacagaactttatggcagccaacgagatcattgagctcttctgcgagctgattgttacacgccttcctatcatcgcaaaacagaaggaatgtccagcagacttgaaagaaggtatctgcagtttgatatttgcagctccaaggtgctctgagctccctgaacttggtcgcatacgtgacatttttgaaaagaagtatggcaaagattttgtttctgctgcagttgacttgcgcccagatgctgctgttaacaaccttctgattgagaagctgtcgattaagaagccttccgggcaaattaagctgaaagttctaaaggatatagcaaaagagcatcagattgattgggataccgctgagagtgagcaggagcttctgaaacctcctgaagagttgattaaagggccaagtacatttcttgaagcttccaacatgcctgttaagaatattctgacaccatataccgtgcagccagatccagttaacttcaggtgttcggatgacgaatatgatgacaggggcactatgcaattcaaagatgcagcttcagctgctcgagcagctgcagagtctgctgagagagcaacatctgctgcaaaggctgcagctgattttgtcaataataacaataacaaccatccatttgatgaagatgaagattgcaaagcttcaactcatgaattcactcatacactcaagagacagtcaatgagcaactcgagtagatcctccttgaaagaagatgcaaatgcctttgatgaacaaaaacctcatgaagggaaaacatacagtgcaagaaggttcagtggaaagaaccatgtagaatatgacaaagacggctaccctgcagatttggacttgaagacacggagaaggaactgccgtgctgctcggaaggtgcactcagagataaagtttgatgattctgagggactgtgttcagaatccgaaggtgaaaatgatgtggagattcagtctgtggaaaggccattgcctcctaagagtgagctgttttcagaaaaccgtcactcagaagacgaagagcatgatcaagatttccctgaattgccgaagacaaaccttcattctcgtgttcatccaaatatgcctcttgactatgaaactctcactgcacgctttgaggctctcaaatctggcaagcttccgtagtgcaacaaaaagaacagcatcactggatgttacaattccttcttgctgtttttgtataatatgacatgttatagtagggtatagtgtctaatgattttgattttggctgagcctacggatttgtcgtttcaaactattgctgcatttgaactgttcgggtatataaaggttggttgaaatgataatttgaactgtttctgcg

SEQ ID NO: 32435 - DNA, 1481 bp, Zea Mays
ggtctatcagtcatcctggtccttttattttctttcttctctcacccggttcttcctcctcccgagtcccgaactctcgatccactcatccgctgagggcgtcggccttctggcccttctccccccggccgacctcgcccctccggcgctccgtccgcttcctgaactcgtctccctcacggacgttctcctccctccgctcgccgcgccgcaacccggagaggagaccgccgctcggtcgagcaccacctggggcccagcgtcctcgcgaccagctctagcgcggcgtccgccctctgcagccctggtgtccccgcgactggcttcggccggcacacaactccacagttaggtctccgtctgcacagcgcggcgatcttctctctccttcccgccctctgcagtccctctcagtccctctccgtctgcttgattctgctccaacctcagactaccctcgctctgaaaatgtcattacgcacccaatgcgcttgtagctgtatgctgcaaccctactctgcctcgtcttcttccatcaccctaagcatgcgcgcaacccccactcaccaacgacgggcccggccgccgccgccgtcctgcctcgccacccgccaccttcgccggcgacgagcaccagcaggaattaatagagttccaaacctcggttctgcagtttctactaaaaaagcagggatgagtaaggatacatttattaatttggacgtctctcatcacagagcggttgcagtggtgaggttgctaagaatcgagaaggggaaagcatttgtagaccttttgaacgagaaagcaaatgattctggagataaagagataggatatgtgcagaggacactaggtttcagcacacgctatttggaggacagggatataagactgtgaggagaaggttttcagggagatggagccactgcttctacagatattgagaattggctttttcgaaattctcaagcttgatgtacctgcttatgctgccgttgatgagaatgtaaggcttgctaaagtagctttaaggcctggtgctgggaatatggtgaatgcaattctgcgtaaacttgtattgctaaaggagacagactctcttcctcttccaaagatagaaggtgatgatcgtgcccaagctcgtgctctttctataatttattctcatcctgtttggatggtgagacgatggatacggtttcatggaaaagatgaagctctaagattgatgaattggaacaacagtgatcctcatttcagtctaagggtgaacacatcaaaaggctatactagggctgaccttgtaaaacgattggaaagtttacaggttcattatgaagaatcaattatggatgaatttgttcgcattcgggaagggatgcagcaagtcttaaaagctggattactgaaagatggcatttgtgctgtgcaagatgagagtgcagggaagactgcgaactatagacccaaatgggtct

SEQ ID NO: 32436 - DNA, 3779 bp, Zea Mays
agtaattatactgatttttagattgaaactggtctcaatgtcatttctacatatgaaccatatagagtttactcacatatacacatttcaatccaatcctaacgacacatggcactactgttatgcattcgaagaaagaaaacaagaagcgctcacgccgtcacgcgtccggaagccaagctggtcgcccgtccgccatcctttccaaatctgcaccaaatcggcctcctgcctgaaacacacgcgaggggccttctcccgcggcctccccgctcgcgtagccccggcgcccgctctctgctgctctagggtttgccttcaatggggaaccagaaaaggcggggattgatgagttagagacattcatgggcaaaagggtcatttcgcgtctagttggcaccaagagccgtagcgggctagtggcgactgactggggtcggggtcgggcgaggcattcctccctctgcgctttgctggcaacgacgacgaatagggttctgtagggaccgagattctggatacctcactcccttgattcagaatgactccactgagtcattgctccgttggcaatgtcagcctgtttcacatcggaagctacaggaccacccgagaaatccagataagaaggttccagggctcggcgaggtattcgagagtagcatcgccgtcgcctcggagactgctgcagccgcaaacagcgttccacctgatcagtatctacaagagaagaagctggtcctctccccagaggccaagaaccttgtccgcggcgaccgtggggactgatgtcactgtggaggatctgaatccgtctccctcggaggaagcctccgatgggaactctgaggctgcacctgacgccgttgatgcgagcgagcaggccgaggctagcacgggacaagcctcttctgctcgcaaattgggacgcaacatacggaagagcgagatgcctcctctgaatgaggaggatctagtgcctggcgcatcttttactgggaaggtgatgtctatcaagccattcggagttttcgttgacattggggcattcacagaaggccttgtccatatctccagagtaagtgatgggttcgtgaaagatatatcttctctcttcactgttggacaagaggtgtcagtgagattgcttgaagcaaataaggaaacaaagcgtatctctctgacgatgagggaaggcgatgactatgtcaagcctcaaaaagaaatgccgaaggctgcaaatggtgggcggagtgccaccgcaactcctaaaagctcgccaaggcaaacaagggaaaggcaggaactcaaggagacacttgagtcaaaatatgtaccagggcaatctctgaatggcactgtgaaaagcacaacgagagcagggacatttgtgacgttgcctgatgggagtgaaggattccttcccagagaagaggaagcattggcgttatttacccttatcggacaatctgcaatggaaattggtaaacagataagggttaaagtactgaatgttgcacagggtcaggccactttgacgatgaaaggggtggaagatgatgaagacgatctgaagacgctaaatatggagcttaagcgggactggtccagagggactaatgcgttcgagttggctttccgtaggaacaaagagatatctgcattcttggatcagagggaaaggaccaaagtgccggctgatacttcagtttctgctccggaagctgaaagctatcaggaggaagctgctccagaagatgaggaaagtagtgaagaattgagctctgtgtcagaagtagcaactgatgtttctcctcctgtatctgatgcctcctctcaggtgggaattcagtattctacttctgtggcaaatgctgctgaggaccaaactgtaggatctgaaagttcacctacaattagtgttgaactgtcctccaacgggaccccagatagctctattgtgtcttcagtttcagaaactgcagataaacctactgaacctgaagaatcttcagcggtagaagaggttcttgtaactgcaagcagcgaggcagggaaagaaccagctgctgacactgaggctgtaccagccttgaatgagaaaactggtgccgaggttgctgctgctgctggagttgcacaagcaagcaccacgacagccactatttctcctacccttgtcaagcaattgcgtgaggcaactggagcaggcatgatggactgcaaaaaggctcttgctgaaacagggggtgacatagataaagctcaagaattcctacggaagaaagggttggcggctgctgacaagagggctggcagagcaacagctgagggaagagttggctcttacatacatgacagcagaatcggggtccttattgaagtgaattgtgagactgactttgtgtctcgaggtgacattttcaaagagttagttgacgatcttgccatgcaaattgctgcttgccctcaagtgcagtacatctctattgacgacgtccctgaggagcttgtgaagaaggagaccgagctggagatgcagagggaggaccttttgtcgaagcctgagcagatccgggctaagattgtcgaagggcgtgtaaagaagaggcttggagaattcgcgttgttcgaacagccattcatcaagaatgacaaggtcacaataagtgagtggctgaagcaaactatagctacaactggagagaatatgaaggtcaggagatttgcccggtacaacctaggtgaagggctggagaagaaaagccaggattttgctgctgaagttgcagcccagacagcagcgaagccgccaccatctgctcctcccaaggaggacaagcctgctgaaacaacagaatccgccgagaagaagccggctgttgcagtttcagcctcgttggtgaagcaactccgagacgaaaccggcgctggcatgatggactgcaagaaagctctggccgagtctgacggcgaccttcagaaggctcaggagttcctgaggaagaagggcctctcatccgcagacaagaaatcctctcggctagccgccgaaggactggtcggctcctacatccacgacagccgcatcgggtgcatgatcgaggtcaactccgagaccgacttcgtggcccgcaacgacaagttcagggagctggtgaacgacctcgcgatgcaggtggtagcgtgtccgcaggtcgactacgtctcggtggacgacatcccggagagcgtcgtcggcaaggagaaggagatcgagatgcagagggaggacctgcagtcgaagcccgagagcatcagggagaagatcgtggaagggcggatcgcgaagaggctcggcgtgatggccctcctggagcagccctacatcaaggacgacagcaagacggtgaaggatctcgtgaaggagacggtcgcctcactcggggagaacattaaggtgcggaggtttgtccggtacaccctgggcgaggactgatcggtgtgaggtcgggcagcgatccctccgtcgcagcgcagcgcagccctggcatgagaagtcgggcacgtttttggcatgagaaggtctgtgactcggttccatctgtaattccgtatcacctgttactgctgttcgtggttcagaagagtaagaggggttggttagtatatccatcaaagcatatatatatatacaacattaaggcaaattgaattttgtatcttttatctgtgcttcgtttcaaaacatgatcgaattgtagcatggacgtatggtcttggccaatgtaattgtcttg

SEQ ID NO: 32437 - DNA, 2039 bp, Zea Mays
tcagttccaaaagacaaggacgaacttgccgaactccaggcccggctgaggaagcgttttcctgtcgatgcatataacaaggcacgtatggagctggaccccaacaaggtgctctcaaacgccaagttggagaagatgttcccagtgttggagcctcctcaccagacaaagtaatacgtgttgaagagcgcagagcaagggcacgtacgtagaacttggttgcaggaggcttaacccatacacatttgtagcactgttagttcctgtcatgattctgggaccctaccctggctgtcaaatgtgatggcgattaagattggtcactgaaataaagttttttttgaagttcgaaatggaacccttttgaacgcgagatgtgctgccagaaggagatgagccttttgaactctctcccaaagaaaaatgagcattcaaaatactgcgactatctgaagcacaacgtagccttcggttatggcccacgggcggtagcagctagcagactagtagtaggcttcggcttgtcggcgcacccaaaaggccaaaaccacccaaaaaccccagcgcacccaacccaagagcgaaaatggatccgcaccagttcgccccctcccagcagtcggcgctgaccatggaatcggcggagagcacggccgccgccgccgcgcgggcgtccaacggcgctgcccgagctgtcgtcgaggacgacgacgaggacgacgacgtccccgaggtggccgcctgcatatcgacgatgctcgaccgcgggggtagcgtggagagccaccgcctcttcctggcgcgccgcaccgcgctggagatgctccgcgaccgcgggtacgccgttccggaggaagagctcgcccgcaccctcccggagttccgcgcctggtgggaatacaggccggagctcgaacgcctcgccttctccactaccctcacctccgacccgtccagcaagggcaaaataatgtctacaaccagagaatccatcaaggagatctttcgatttaaagttgacacattccagatcacggaattactggtgaacatcactaagcatgtcctcaagcccaagcatgaagtgttgactgcagaggggaaagctaagctcctgaaggagtacaatgtggtggattcacagttgcctcgcatgctggagaatgatgctgttgctcgctattatgggctaggcaagggaactgttgttaaggttatatacgacagcgagcttaccgggaaccacgtgacgtaccgatgcattacctgaggggcccatgtgtttcggtggatgaagtctcgtaagcacccaattgtgcaggatgaagcttgctgtaagctattggtaaaatcatcttgcgccattgccgtaccttaagtgcttggtgttaatcttggaaacagtgagacaactaatcctgtagtgagttatctcgatcactttcagatgtctctgatggccttcgaggctgttaccttagctgtcctcttgcaggctacagctgaagtgtgttgcaaaatcacttgattcgaaccaagctgtatccagttatggattctgttaggttttgcaaatcagtgacaaacatctgtcacaaacaatagtccagaggctaagtaaggtgtcctataatatgcagctaactgtgccttggtctgtttttctggggcagaatttcttcgttgccctctgccttccactttcgtctgctgctgctcttgctcgtggggttactgcaatacttgctgttgctgtcactctgctggtgatgtactgctgttcctggtggagtggtgggagtgctccctgcatctgcttttcagtatgtgaggcttgagcttgctcatgtctgatagccggcactggttttatgaagaactcgtcagctactttctccagacatctgatctaggagatgatccagtctgaaacaaaagtatcttttgattttatttgacttcgtcaataaaccgggacaaagcctgtttcatttcatggatacggcaatatgaatggaatttaatatctacgatatcaa

SEQ ID NO: 32438 - DNA, 1121 bp, Zea Mays
taggcccagccgcccagccagctcgtcggatacagaagactcctctcccttctctgcatccgttccccgccctctcgcgcatccaccgccaccgcgccgctccatgaaggacccgttcgaggcggccgtcgaggagcaggactcgccgccggactcgccggcgccgcccgaggaggaacccggcgccgcgggcctcgcggacgacgccgaggactacgacggcggcccgcccccgcgccagccgtcggcgccggcgtcgcacgcagcatcggccgcggccaaggccaagggccgggtccagagggagcagcaggaggatgacgacgacgacgaggaccagatggaggttgacctcgacaagcttcccagcagcactggcgaccctgacaagctcgccaagatgaatgctatactgtcccagtttacacaacagcagatgaaccgttacgagtcattccgaagatccggatttcagaaatctaacatgaaaaggctattggcaagcatcactggaagtcaaaagatttctatccctacatcaattgtggtatcaggaatagcaaaaatatttgttgcaagagtagtcatgagtgagaggaaggattcaggacccatcaggccttgtcacatcagggaggcatacagaagattgaagcttgaagggaagatcccacggcgctctgttcctaggctcttccgctagaactgacacacatcaggcaggagtcgggacagatgtgggacaatcgttttccacgtaactgcggacctcgtcatacgtaccatgggaattgaaaacctgtgtactgtaaagttagccccccgttttgacttcatactagccgctgatgcgctgaataacaggtggtggctcctgtcacgagctagatgtcttgaaatgggtttggggaatgatttagcaagaacaaggttaggattacagggtcgggcatgcggctgggacctgcgagacgaggatctattcgaaatgcagtttgttagaatttacttacttgcttaaggctgttttcggtgaatctgtttgacactgtttgaaggatgagtttgaaatagggataaggtacacagcgcagtgccgcccaaggtttgagaaaccggtc

SEQ ID NO: 32439 - DNA, 3057 bp, Zea Mays
atatcagctgttgataagttgagatatcttcattgccttttggtttatgttcttccagtactgaagggaatttattctgaccaatgctttgaaataggtgttgaaacaagatcttctggaccaaagacagatgtcctcagagcaaagataacttctgatgagcagatgtgctgtgacttttgcaaagtgccagtgtttgattatcaccgatactgcccaagatgttcatatgatttatgccttgattgctgtcatgacatacgtcattctcgggccaatgttgcacgaggagaatatactgaaggttatgttgaagataaaggtagagattcttttaatagaagagcaaggttggaaccatctgctgagagtgtcaatgacaagtcattatcttggccaatagatataaataatattgacattaaatctttattccctacatggagagtcaacaatgatggcagcatcacttgtggacctcacgaggctggtggttgtggctcctcaaagttggtattaaggcggatattcaaaataaattggattgctaaacttgtaaaaagttctgaagaaatggtcaatggttgcaaagtacatgatttggaggatggatgcttgtcttgcagtgatggcagaagatcggagtttactggtcagcaaaacctcggtctctcaaaatgctcaaacagtgatgagattggtaggaattgtttgtactcacctgtattggaggacttaaaatatgaaggcatcattcattttcgtaagcattggaaaaacgcggagcctattattatcagggaagcatttgagccttctctatcatcaagctgggatcccttgagtatttggagaggtatccaggagatcatggatgaagaaatggatgaagatgtcatagtcaaggctgtggactgctcgaaccaatcagagatatcgagctcaaacagtttatcaaaggctactcagatggcagcaaaggaggagatggcccacttgttgatgctgaaattgaaagagtggccccgacccaatggggtctcctaaaccttgctgccaagttacccccagatgccttacaacctgaattagggatgaaactgctaattgcacatggaagtcaccgagaacttggtaaaggtgattcaatgacaaatctaatgattaacatgagcgatgtggttcacatgttaatgcatgcaactgaagtgcattaccaatgtcccaagagggtaagggtacagtctgatgtatctgaaatgattgctaatggaactagtgtccatgtaaatgctcatactcctgttcaaaatttgaatctggatattgaagagcaatcacacaaacactcgaaatcacacatcgaggagccaaacactaataattcagaaggatccctggctggtgctgtctgggatgtattccgcaggcaggatcttccaaagcttaatgaatatctagctgctcatcgggaagaatgtgcagctagatgtcaagcagtgtcttctgttaagtatcctatttatgatcaaactgtgtaccttaacgattatcataagaagatgttgaaggatcaatatggaattgaacccttcacattccaccaacatattggtgaggctgttttcattccagctgggtgtcctttccaattgaaaaacctccagactaaggtgcgtttggttggagagttaactagaacggagcggctctattttagtttttgagaatgagccgttttattctgcgtgtttggcaaacagaacagtgtcgctccattttttgtttcgttgaagagtagaatagagtggagtcgcttcgttctttgtttggttggagacccatatgagtatagatagaaggagagggaggatagcgctcgcgtccgagagagcgctcacatccaatcgtttttgtggagcaagatcattccaaccatttatggtaaatttccatatgggtcttataggagccgctccgctcatttttgttggaaaccaaacatctaaaaaataagaatggagctactctattcttcactcctcaaccaaacatacactaagtttcatgcgtgctcatctctcactacgtgttgaatttgacttgcttgttcttatttgttatgcttattacttggagaagaattttgttcctctatctttgatatcatcttctttacatgtgattatttgaactagttatgtactatctactgaatgcggctgttatgctttgatttgttgaaaatgataatatcttctatgcttctgttattgtttgaatactttatttggggatgtagtttacatttgttttctgttatattgacatgatcagtccacggttcaattggctctcaattttttgtcacctgagagtttgccagagtcagtccggctgtcccaagagatccgttgcctgccaaatggccatcttgcaaaactgaagatgcttgaggtaaaaaagatctccttatacgcagcaagttctgctgttagagaaattcagagaataacccttgatcccaagttcaatcttgatcctagttttgaggatcaaaatttgactagggcggtttcagagaacttggcaagagtaaacaaacggaaggtatcttgcagttgagattgtgggggcctggtgaaattatgacatgccattcagaggattgaagtagatatagtgcttgtacatgtattatattgtgtcatatgaaaggaacacattctaattcttattgggttacacattgactttacctgtatattgtgggttaggaagagtaacagttaagcttctgaggaacaagataaaaaggcgctggaaagctcatgtagaattgttagcacaataatctctgttggtagcatctgaagaataattaattagaccgaaattgttacattgtgaacacagggttcaagatttaaatactatattttcaccacggttttgcatttgtgtcaacctgcacgtagtaacgtctaaattactatagtgtttcaaaccaagtgccttttttatatatagcatgatttatctagaaaaatcaaaata

SEQ ID NO: 32440 - DNA, 2753 bp, Zea Mays
gatttgaattccggctccgcgtcatgcttcccgcagattcgcgtttctcgcgtgcccgtaccgccctgccgcgccgctcgcccgcccgcccttttctttttcttgacctttctctatttccacattatgctatggtgatgcttcccgcacgtctctgtttttttccacgccgaagtccggatccggcacgagctatcgagcggggcagaaggttcggttcggggtccttcttcaacaaggaaagggagcagcactaccaaatgtggcgcttgtttaatgacctgtgggatgtgctaggatccggattcctctcgtccagatttctctgatccagctgtatcgggaatacgggaccatctcgttggtggcagcgaagcagacatccaccaagaccaaggcaccaatccgcctcctgcgcgcgctccatcgctcttatcgttgacgacacgagcggctgccaattcctgggctcgccattggttggtggcctcgggatctgagagaggaagatggacgacgaggattactcgtgggtgcggcggacgcgcttctcccactccgtcgtccgctccaattccgggagggagcagttcggcgcattcgtcgagcagttcaaccgtggggccgcgctcaggcagaagggctccgcctcggggttcaagctccatggcctcaacatggagccagggacgaggttgtccacatcgtcccttccgacgacgagctcgttctgcgcccagcccaagcccaagcctaaggacatgtcatcttcagacgccaagccggggcagcacgccaaggcagtcagcgatcgcccgtcgtcgcaagaggcatcggcgaggaaggaggacgatgccaaggcttcaaacggaaagaaaggaattggcaaactcagcgtggccgtacctcgggtacccgcggttcagagcgcggaggttgagagcccgggagcactcgagttctccttccaccctgacgagcagagcctgaagctgcagagagcgtgctcaagccctgccccgttcccgcggaagaaaacgcccggcgatgatgccctcacgcgcagctcgtcgctaagtgtgctcggcgaggcgcccaagacgaagcagagggcgaggtctcccctcccgtctcgccacgttgctgaagtgtttcaagaggccaaatcagccaccaagaggttctccactccgccgccgccccggagatccgcgtcttctctagagctgaatggttgtcctccagcgccggtgacggtgagggcaccgggcaagctgaagaataggaaggagggccatgccaacgggaggatgaaggttgctgcaactgcactggaggtactcgagaaatggtccgtcgatcgctcccagctgctcattgggcacagattcgcgtccggggctcacagccggttgttccacggaatctacaaagagcagcctgttgctgtcaagttcatcagacagcctgatgatgaggaagatgcagagctggctgctcagcttgagaagcagttccacaccgaggtcgccactctgtcacgcctcaatcatcctaatgtcatcaagctggttggagcatgcagcagtccaccagtattctgtgtcatcactgaattcctttctggtggttctctgcgagcgtttttgcacaagttggatcacaaagctcttcctctaggcaagatcatctcaattagcttggacatcgcacgcggcatgtcatacattcactcgcagggagttgttcatcgtgatgtgaagccagagaacatcatattcgatgatgtattctgtgcaaagattgttgattttggaatagcttgtgaagaagagtactgtgaccctctggcaaacgacactgggacatttagatggatggctccagagatgatgaagcacaaagcgtacggtcgaaaagtcgacgtctacagctttggccttattttgtgggaaatgttttctggaacgataccatatgaagagctgaacccatttcaagcagctttcgctgtttttgacaagaatgtgaggccggccattcctactagctgcccaacaccagtacgtcttctaattgagcaatgttgggcctcgcatccggagaagaggcctgacttctctcaaatagttcagatactggagaagtttaagagtgttcttgacagagatggcacactcgacaatatgccaagctcgatctgtcaggagactcatgatcacaagaactggcttgctcattgggtccaaaggctcaagcatagccagcctgatctctctgggcctcctccgccaaaactgttgtaactattcaccattcagtaccttctcccttccaaaccctgctaatccgataggcaacagaatgcaatttcaggttattttctgtttatagacaaaaaaaaattagtagtagtagtagcacagttagtgtttgcttcgcttcaccacggtgttctctctttcaatcaatacacaagatgtgaatacaaaggttgctaagaatgcatcttcaagggcttgaaatggttgagatcgtcacataagaactcatctgacttttcatgtttatttaatatagcagccttgccatgtgttggctagtaacagagctttctacatgcttggtggcttggtgttgtttcatactgttcacttcttgtgctgcttaaaaatttcggaattctgtgcacttgtggacatgtaaatgtgcgacggaacaaatttgaatcaaatggagtcacttttctcatc

SEQ ID NO: 32441 - DNA, 6824 bp, Zea Mays
cctgtttctaccgttctcattcccattcccggttctttctccaccccgatgcccctccccctcccccgtgtgatcccctctccagatcgatgtctgccccggccgtaacccccgcggctcaccgcacgaaaccgccgcgagatcttggagctcagcctctgacgatggctacgactacctcgccaacctccgcgagctctgtccccctccctctcctccaccggcggcgggggatccttggccatgttcctcccgaggcgccggtccacgcgcttcggcctccgcgtggtcatcaagcctttctgatggctcggaacagaggtcagctatgcgatgtggcgtggcgaggttaccgcgggcgccgcggaggtggagggggaaggggaggacgagggcacgggcaagagagcgcatcgctgtggacggtctcgtgagagggaccttgggtgatccgggtgcttggtttcttggttctacggctttcgctgctgttggatttgccgagccggagccgacggagatgaccgtcgacgagctgaagctgcaggcaagggccagcggcggccacgacctaaggaccagttccccgtcggcatgcgcgtgctcgccgtcgacgacgacccgacctgcctcaaggtcctcgagaacctcttgttccgctgccagtaccatgtgacaacaatgggccaggcagccactgccctgagctgctgagggagaagaaggaccagtttgaccctgtgatcagcaacgtccacatgccggacatggacggcttcaagctcctcgagcttgtgggcctcgagatggaccttccggggattaacagctgaaaacctcgcccgatttgtaaagaagttttcttgttcaatgcggcattgaatttgggaggaatgacaagtctcatgaaaacttctgtatgccctacacgtgaccactaaaagaaagagttagacaggacaaaaggctgcagcggcagaagaagagcttttacatacccttacaatgctgattttgatggagatgaaatgaatttgcatgtccctcggacggaggaagctcgcactgaagcgcttaattctcataggggttcaaaataatttatgtactcctaagaatgtgatgggggatacttcaatgcaataatgagcttcccacaaaattacccaaacagcccaccatcagtcagatttacctctgaaatgtggcatccaaatggtcaactttttattagtgaaaatagtatttatttactccatctacagttatgttttctgacatcatgcataatatttgaggaaacgccagtctaacctgatgggcgggtttgtatctctattcttcatccacccagtgaagatccaaacggttatgagctcgcaagtgagcgatggacacctgtgcacacaggtactttcaccacttctggtatggttctgtctgtaatgtgccagggattattatattgtttttggtttggatttggaatggtttggggtccacaacgatgatgcgtcagagctgttccaaggattggatgatttccattcccctgctgccaattcgactaggctcgccgtctccgctctgcccaactggcaccaagcagccaatggaacttgagcagccaatggatgatttccattcccctgctgccaattctccgaactgctttgacccttcaactcaatccgcatgtacccagtaaatgttcaatctgaatttggatcattgctagcaggattctttgcttgctcttctacttctgaaaattcgcaaaatggatagataattccagttaattttaatccattacaggtatggtgatgcttgcaaacgctctattttcatttgaactactatacaccacttctggatgggagttgtttcactgcgtcaactattctttagtagcctgttcgtgcgtcaattattctttagtagcctattgtggcagcaaacagcgactgggtgcggaagccggaagggagaggcgcttggttgacccagaacggacgacaagacaccgccgggggttcgctgcaaccgcacgcgtggtggccggtgtgggaaggagcccactgctcaagcagcgacgacttccgtaacttctcaggccaagttgtagggagggagggcagcaaagaaagcaagcaagaaagaagccgattccactggtggttaaggttttggattaaaggagagaggtgcagagaaaaaaaggcaatcttactcttaatctctgtgtccacatcacttccgatcatgccgtgatcgacagaagtacgggtgccatgtataagtgccccctccaactcaccaaagtaataaggagcagctgctgcaggttgcaactccctgggccaagcagtagcccagcaagttcagcaccaatggcagccatatgaaatataaggcaaagcagataaaaagcttaatttttttcaataaggtaaaggcaatgacagaaaagtgaggagggtcagaggtgtacagataaggatgagggctgaaaagaggagcaggaagggcatgatgaaatcagtgtttgctatttagcctccttcacaactaagatcatcctacataatagatttagacaacaaaaacttatggagtttgctgaaatgccctttcaggcatgctccatctgtgctacaagggtcagaatggacttgataggacatttgactatacaacatggaagttatttcaagatatccttttttaactatgctgtcgttgctgatcatttgcatttttacatttttcacattatactatagttgaagatacattcctgaggacgaatgggtgcagttatgggcttcctgcttgctgccagcagtcttttggtgcttttatattgctattaatttgtttgaaatttattatggtgatgactgggaaggtctttttgaggctattactggttatggccttggtggctctttggccgtgttggtggtggtatttataccaaggctgctgatgttggtgccgaccttgtggggaaggtagaaagaaacattcctgaggacgatccaagaaacccagctgtcattgctgacaatgttggtgataatgttggagatattgttggaatgggatcatatctctttggctcatatgctgaatcgtcatgtgctgctcttgttgtggcctcgatctcgtcttttggaatcaaccatcaatttactccaatggtgtatccccttcttgtcagctctgttggtattatagcatgtctcataacaacgctgtttgcaactgatttcttcgagataaaggctgtgagtgaaatagagcctgctctcaagaaacaacttataatatccactgttgtgatgaccattggcattgcgctcatgttggcttggtcttccatacaccttcaccatttataactttggagcccagaagacagtgcaaagctggcaattgttcttgtgtgtggcggttggtctctgggctggcttagtcattggttttattactgagtactacacaagcaatgcctacagccctgtataagatgttgctgattcctgcagaactggagctgccactaatgtcatttttgggcttgctctgggttacaaatcagtcattatcccaatttttgctattgcgtttagtatcttccttagcttcagccttgctgccatgtatggtgttgttgtggctgctcttggaatgctgagtaccattgccacagaccttgctattgatgcctatggccctatcagtgataatgctggaagcttaagtctgtatgggtgcatcttatcatttatatgtatatctgaaagcttaagtatttttttaaatagaagatgtctggaaactttagtaacgacatgagtttcaggctttcagctatagcagtcttattcgcttttaagacagagaagatttttatttagagtttagaaagagtaggtgctatgggtgcatgttatcatttatgtggggaacatctctggtggaaattaatcagtaacgacatgagttaagacagagaagcttaagtattttttcagctatagcagtcttattcgcttttaagacagagaagcttaagtattttttgaatagaagatgtctggaaactttagtaacgacatgagttaatcagaagagatggaagggtagtttatcaacatgtatttggcacttcgccgaaaatgtcacttggactatcttgcaaactgaattttcagattggcttcttctgtctgaacattcagttcagtcttgcaggatttatttggtgtgcacactccagaggtcagcattgattcgatccaaatcaacttacaacttgttctacattgtttttcatcaacaactgtgttcagcaaagagtaaatacgtactacaacttattgatcattgaaaacctcgtgccttttttgggttaaccaagtttacctagatttcccacactgggttgagtgggttgggcactgattgactcaaaattgaccagctttatggccaccgttcagcaacctcgcaatggaagacaaaaaatccttccgacaccgcggccgcaatagttgaatacgtttcatcatcatcaaccattttttatacatcatcatcatcatcaaccatttttttgataggtcatcatcatcaaccatttttaatcgcactctctcgggcggccttaccaaactccctgcatcttcttgcctagaagtgcagtacttgaatgaccaatcgtgcagctgctgcgatactactctccttgcccacactgcgtcgcaatggtgcaccgatctcctgctccagaagctaccaccgctctgtgcttggcactgctacttcttctctttccctgaaccagctccaccgccaccaccataggcggcgctccaaacacggtggcgccatgcgcgccggcgtggtgcggggacttggccatctcctacccgttctggctcgcaggcacgcatctgcccaagtgtggctacgaccaagggttcaaggttacctgtgacaaagccaaggtgtacctcaagaactcgacctgcacgtaccaaatccaggccatcttctacgccatgaagctactcagagtcgccatcgtcggcctgtcgtaggacgatggcacttgcaacatcgacaagttcgtcaatgcctccttcgtccccagcccgccgttcgaaatcgagccccaacaaaaccaggagctgttcttcgtctacgactgcaacctgcgagcgccgcagctgcctcggtcttggacacccttgcgctgtggcaataatggctcgttcacctggctttctggggagtacaggcccgaagacagctccatggcgatgccggggaactgcaacgttgcgatgataccggtggtggcgtacgagggggcgaccgcggcagattatcagtggttcgtggagggaggtttttttcttagttactacctcacggacactgaggacgacgactactacgaccagtgccaagcttgctcgtaccgcgctggccacggccaatgccggacaattgtcagtgacaatgggttccagtgctactgctctgacggcgtctactcgacgacggcctgcggaaccaagagggctaactggaagacaacaattgtagaaagatatggcaacaaatgtggcaaacacgatctatctaattctaagaccatttttgtagttgaatcgaagcgggaactgaatcaagaatgttctatttatatcggtctcaggatgaacgagcaccaggagagagtccgggaggaggcatatactgttgggacgtgtccaagccagtggagatgcagtggagatggaggagatcgacattggcatggagaagctgcgaaacccaccgcagcagaaccccacctagaggaagaagtagaaaacttgtgccggtatgagcttcctaatgagagctgggaagtaaatttgcctcctgaaaaggtgtctcctgagctcccagtaccaacattaggcataaactttgcaagagatggaatccagaaaaaagagtggttgtccatggttgctgcacacagtgatgcatggttactttctgttgcattttatcttggtgctcaatttggtttcaataaaaattacaggagccggaagagttctcgttgaggagaagcttgttgcgacccaaagagagaggacacatacatgtggacgcgagacgactagagccagaggaggactgggcacgcagaagagcgaggaggacaacgagtcctcacacctcaccgccaggacgtcgtagataattttggttttcttgtgattctctttatgaagtgggtggtacctcaaaagacatagatgatctgttgacttatggcagtcgggcattacatttttttgcatgaaatcgacatctgaggagtgataattttgttttgatcgcttctctattgcaagatttagatggctactatcctttgcgattgatcaagaatggtgagctattctaaggaagcttctgaacaatatacccgctgtcctagagtgtcatagatcagggttgagatgattccatcatacttatacgaagattttcctagcaaggaatggtttgaacaatgttgtgattaggcaagggataatgggtacttgctctgtgatgactcaaaaagaatgagattgatcgattgtgtagctgttgtagctccaattgagaaatattatcagtattaagctgctttgatggttgcccggtctattgcttgcatgtagcatgcatctccgcggagatccaagttgttatgctttgagctattgcatcaagagtttaagatagtctttatatattttact

SEQ ID NO: 32442 - DNA, 878 bp, Zea Mays
atgtggcgaggctacgctagtgacgccgagatccagggatgccaagatctagagctacgccagggacgcggagatctattatgtgttcttggccgtcagccaacgccgccgatctccagcttccccaaggctgctccagtcagtctacattatttcaagaaactcacatctgacccagataagggtgttgagttggatggtgtccttcgcgcaaagcttctggaaattggaatcgtaaatggcatggatgtttatgaatgggatccttcaacatataagtacatcagcgtgaaatatgatgcaacaacggtaactgaagcaagggctctcaataaagagaggttgcaagccgaagatggattgcgtgtggactcgagcatccctgttatagtttttgtggggtgtctcgaagaacagaaagggtcctacatactcattgcaacaattccagagtttgtgggcgagaatgtccagataatcgttcttggcacgagaaagaagaagatggaggcatagcgaaattcaatgttccattggcacacatgatgtttgccgaggctgacttcattatcgtcccgagcaggtttgagccatgtggtctcattcagctgcaagggatgagatatggagtgatccccatctgttcatccactggaggacttgtcgacacagttgaggagggtgtcaccggattccacatgggttctttcaatgtcgagagtgaaactgtagacccagccgacgtgacagcagtagcgtcaaccgtcacgcgagccctgaagcagtacgacaccccgggcgttccatgagatggttcagaactgcatggcgcaagatctgtcctggagatctattgatatgttttacgccaatttacg

SEQ ID NO: 32443 - DNA, 2324 bp, Zea Mays
cgctatggtgtcaaaaggactactacaaagttctggaggttgactatgacgcatctgatgacaccatcaaattgagttatagaagattagctttgatgtggcatccggacaagcataagggcaatagcaatgccacaactaaatttcaggagattaatgaagcatacaaagttttgagtgacccagctaagcgactagaatacgatgtttccggttgctacgagatcgaccaatatactttgcgtgagtaccttacaaaatttaagggtatgatacttacctgtaatggccttggcatagaccattcttctaagtgggcccgacatttgagggaactgaaaccccattgatcaacgggtatggatttactactctatgtaagacacaatgtgctgtatcacaattcacaaacaatggccccctactccccttagccactttctgccaaaaagatgcatgtatgtttactaattccagatggaggatggtctgggctccattctcaatgtttagtgagttgtgctggaaattaggtcgggtcgggctagctcggcccaacccaagcgcatcatggttcgagccaagaaagactacaaacttttgggtcgtgtcataccagcccaaagggtagaaacagtggctcagctcgatcctaaaccacgttatgttttcgttgggccgtgacgatcagtccgacccattacccatatatttgaacaatataaaatctaaatattacaactaaataaagtccatagcttactaaattaaagatattaaacaatactaacatcatttaaccacataaagtgcaaatattacaacaatgtaaagtatatagcttactaaattaaaaaattaaacaattactagttagatgcccgtgcgttgcaacggcaatacaaaatatttttacacaataattacataaaaatgaacaccacatatataatcgaacccaatatctcaaaaaaaaattggcaacaatcaatacagaaataaactgatacaaattaaattatacaatacaaatatcacaaaacaaagttttagaagcatgttatttaagaatctcacaaattacatgtccgttgtcgtctcgccaccgaagtacagcacacctcaatgagaacttattctataagataagtgataatctagttaatttagctaagctggacataatcgtttaagtcgttactccctcccgaccgtggcgcccactcgatgctcgtcgataagtcgctccgccaactcattctacgccttgaacaacctcaaagtgggcctgcgttcacttgctctcaacgtcgggtaggatagaaatgaaatccaataagggactaaaataaacaaacaaaacatgacacaaaaattgactgtttcttggattgcagataaactacgcctctgctcatgacaatgaaacactatttgatattattagtgtaaagactctgatgaacctctcaattgacgagcgatgcaggaaaaataatttgtccacaagcatgattgcattatcccaggtttgaacttagaagatggccctgcacactctgcctcgacgtcatcttcaccagagcagactactgatgttgatggaagtaccaccggtgatgtcaccttctaagtataacttgggtaaccttattacctcttctcttactccaaatgctggttcggtgttatccatgttctcatcattaacctcttaaagttctgaaaagacaaggatgaatgcacactgcacttcctactgcacttcttttgaacctatcatgcaatgtccttctgcttgggtgtgagcttcaaaaacacactgaaatctactaagctagtagttcatctaaaagaaaaggtgtgtgctctgttctttctatccagcataattggcttctaattagagataaactccaatactaagaaccttctgaggaagaaaaacaaggcattgaatggttacagttatgttctgtgtaataatggttgtgtgggaaccagcatccaccttccctctgaatgcagttttggctaatcatgctggaacacaattcccatccaatgtgatctgagtctgccacctctagacatgatgattgaagccaggacaaacttcggtgatttaatttaaagagaaataaatattaaaggtggtttgattatttggactactctcaattaatagcattatctttaacaatgctacctgtaacttcaatatttggaaaagacgaaacaggagcttagcttggtgcgtcgaagcgaatcagagtagaagagatcccctcaccctttggagagacactactcttgtatcttcc

SEQ ID NO: 32444 - DNA, 2024 bp, Zea Mays
cttctgggcgcaccaggaaaaaaattgatacattcctcggcagctgcgcgagtcctctgttgatacccccggcgacccaaagcccccgtccgagcagcagcagcagcagcctaacaggattggggatttttttttgcttcgtgttctccttctcctgctgtaggcgttgattcgggtgatgagagatgggcttcttggcgtgcttgtgccgatgccctcaggacggggacgacgacgagaaggagggggagcagttcagaatcaaccaccagtggactacccaaaatcttctgaaagcagcccattgaaggctgagagagtggttcatatggacggagcccagctaattggtagacatgatgaagcaacaatcttcacgttgcgtcagcttgctgaggctaccaataattttaggcaggactctcttttggggcgagggggattcggttgcgtctacaaggcaactcttagtaatggacaggttgttgcagtcaaacaacttgatctaaatgggcttcaagggaacagagaattcctcgtggaggttctcatgctcaacctcctgcatcaccctaatcttgtcaatctgcatgggtactgtgttgatggcgatcaacgcttgctcgtttatgagtatatgccattgggatcactagaagatcatctacatgatcttgcacctaatcaacaacctctagattggaaaacacggatgaagatagctgctggtgcagcggctggtttggaatacctccatgataaggcaaatcctccagttatttaccgagacattaaaccatcaaacattctccttggcgaaggctatcatgcaaaattgtccgactttggacttgctaagcttggtcctgtaggcgacaagactcatgtgacaacacgcgtcatggggacacatggttattgtgctcctgaatatgccttaactggacagctgacagtgaagtctgacatctatagttttggcgtcgttttccttgagctaattacaggtcgaagaccacaagacagtgatcggcctcctgaggaacaagacctagttgcatgggctcgtccattgttcaaagaccaaaagaagtttcgcaagatggctgatccttcgttgtgtggccgcttcccaaagaggggtttattccaggcactggctattgcagcaatgtgtttgcaggagaaggcaaaaagccgacctcccatgagggaagttgccgcagctctctcttatttagcatcacaagcatacgacaggaacaacaacgctgctgctcatcgtaatcgtgccgggccttcaacaccgagagttctggacgaccagattggccaggacacctgcacattagctaatcaacagggagctcagatgtccatgcatgtcgggacagaccacgccatgcctgaagtgaaggaagcttcctgtagtggttcacatcgtggaggacggggcagggttaccccgaatggcgctgatagggagcgtgcacttgcggacgccaacgtgtgggccgaggcttggaggcgccaggagaaggcaagcaagatgcgatagcgaccagagcctgactgcatgagttttgacatgtcactgcaaagatgcttactttgcatacattttgaaagagaactgtgggctacacgaagggttgttagaatagaaagaggaataatgcgcagtggaaatgcagagcttcaccagagtgagcgcttcgaagatttcaccggtgaatctacagtactcagacttgtttcagtgcgtacatggatttagcttactttatacacagacacttcacactccatagatgcatgtaatagctcaataataggcacagtagactacacaatctgtctgtagttcagcggttttggaaaattaataacataggatccgccgttaggttgcatgaaatgctatgatccgttggcgggtcttgcattctctattgggtcaacgtctacatatttgtacatcgttcaaccatttacatgatgaaatatacaattaagacttctaa

SEQ ID NO: 32445 - DNA, 3831 bp, Zea Mays
atttgcttctcgcaccatttcacactgctgcgacaacacgcctttggatctgctctgttttagtgctgccagtttgggaaatatcagtctttttcactaattattattatgtgctaccttaattacctcccattttcagtaggttcttgcaactggctactatcaactccactcatagttaagactaattagaaccactgcagcaaccataaacttgaaccactttccattactctgctatcagatcctgaaccagtgcagcaacatgcctagttatgccctcccgtttttctgatttgagcagttaacctcgcaatccaactgggtggctgtcttaactctgttactaccgccaccaataccttcggttactcaagttaacactgctgctgtgtgacaggagaagctgcgtgtcgctgtgctcgtctcaaaggctgcactgcagtttctacatggcctcacccttcgaagcgagtacgtcgtccctgaggaagtcaaggctgcagggtttcagatctgtgccgacgagctggggtctattgttgagggtcatgatagtaagaagctcatcacccaaggtggagttgatggaattgcggaaaaacttgcaacttcgaagacggatgggctaagcacagccgatgatagtattaagcgcaggcaagacatatatggagtaaacaggttcacagaaagtgaggtccgtagtttctgggtgtttgtatgggaagcgcttcaagatacaactcttataattcttgctgtctgtgcgttcgtatcgctggttgttggcattgtggtggaagggtggccaaaaggtgctcatgatggtcttggaattgttgcaagtatcctcttggttgtgtttgtcactgcaacaagtgactaccggcagtcactgcagttcaaggacctggacaaggagaaaaagaaaatccatgtacaggttacaaggaatggttttaggcaaaggctatcgatatatgatcttcttcctggtgatgttgtccatttagcaattggggatcaggtccctgcagatgggctcttcatttatggattctctctgttgatcaatgagtccagcctaactggtgaaagtgaacctgttgctgtaaatgaagataaccctttccttttgtctgggaccaaagtacaagatggctcctgcaagatgctggtaacaactgttggcatgcgcacccaatggggaaaactgatggccactctcagtgaaggcggcgatgatgaaaccccactgcaagtcaaacttaatggagttgcaactattattggccagattggattattttttgctgttataactttcattgtcctgtcgcaagggctattcagcaagaaataccatgagcagatgcttttaagctggtcaggagatgatgcattggagctgctggagcattttgctattgcagttactattgttgttgttgctgttcccgagggattgccgttagcagtcacgctgagtcttgcatttgccatgaagaaaatgatgaatgacaaggcacttgttcgccacttagctgcatgtgagactatgggttcggctactaccatctgcagtgacaagacaggaacactgacaactaatcatatggccgttgttaaggcctgcatctgtggaaacatcaaggaagttaatggttctcagaatgcatccaagttacgctctgagcttccagagattgttattaaaactcttttggagtctatatttaacaatacaggtggtgaggttgtaattaaccaggatggtaaatatcagatcctgggtacccccacggagacagctttactagagtttgcattgtcactaggcggagattttaaggcaaaacgtgatgaaactaagattgtgaaagtggagcctttcaattcaacaaaaaagaggatgagtgtcattcttgagcttccaggaggaggatgccgtgcacactgtaaaggtgcttcagagatagtcttggctgcctgtgataaattcgtagatgagacaggtggtgttcatcctctggataaaataactgctgacaagctcaatggtattattgatagttttgctggtgaagctcttagaacattatgccttgcttataaggatatggaagaaggtttttccaacgcagaccatataccgctacaagggtacacatgcattggaattataggtataaaagatcctgtccgcccaggggtgaaggagtctgttgctacttgccgggctgctggaattatggtgagaatggtcacaggagataacataaatacagcgaaggcaattgctcgtgaatgtggtatacttactgaagatggcatagctattgaaggaccagagttcagagagaaaagcctagctgaactccttgaactggttccaaaaatacaggtaatggcccgatcatcaccacttgacaagcatacacttgtaaagcatttgcgcacaacattcaatgatgttgttgctgttactggtgatggaacaaatgatgctcctgcattgcatgaagcagatattggacttgcaatgggcattgctgggactgaggtggcaaaagagagcgctgatgttataattctggacgacaacttctccacgattgtaactgttgccaagtggggacgatctgtttacatcaatattcaaaagtttgtgcagtttcagctgactgtcaatgtagtggcactgctagtgaacttctcttcagcctgctttacaggaaatgcaccactaacagctgttcagcttctttgggttaacatgatcatggacacccttggcgcgcttgccttagccacggagccacctaatgatgacttgatgaagagagagccagtaggaaggacagggaaattcattacaaatgtgatgtggaggaacattcttggtcagtctttctaccagttctttgtgatgtggtatctccaaacgcaagggaaaaatttctttgggcttgaaggctctggtactgatattgttctgaatacgataattttcaactcattcgtcttctgtcaggtgttcaatgaaataagctctcgggagatggagaagatcaacgtgctcaagggcatgacaaggaactacgtgttcatggctgtcctcagcagcacggtgatcttccagttcatcatggtgcagtttctaggagagttcgccaacacgacgcccctgaccatacaccagtggctagccagcgtgctcctcggtctggccgggatgcccatcgctgccgccgtcaagctgatcccagtcggctcgtcatgataccattgaagattgctgctgcctgggatgggaagcacggcatgaaaagcgtcaggctgtccaagctgcatggtattcggtggagctgagctctctctctgtctctctgtgtgcgtaaacttttggaatgcacggagggcaggctagggaaatggagcagccgctgcagtttgagaagttttgtagcctggaaatgtggctagattgcctcggacctgtaagaaacatcgtgtttgttggcgccgggaaaaaagcagctagctgtggtggtggtgcagcagagttgttagattgacttcgaaatggaatttagactgcaggatatttatggtggatgaatggacggaaaacatggttcgttggttatttttactcttgcttattagagctctggtttggtctttttaccttagtagttgaaaaagagtaaaatttagcatcgggtcgtcgaagccaaagttgtcttgaaggcgtcatttatgtctacaaaaaaaacgtaaaatgtatttttgggctccttaagatcgcctcttgttccactcgag

SEQ ID NO: 32446 - DNA, 1498 bp, Zea Mays
cgtcgtctctctcgccgcgcaccttgtctctgtcctctcccatccatctccctccgcacactccgccgcctcaccttctccccctctctctccccgccgccgtggtccccgccgccacgctgtggcccttcttcgacgccgtctgctccgacaccgccgtcaccttcggctcgctcgtcgcgctccacgagtacctttgagaattcgtcgtcctatatccccgaaggagacgccttgaagttgatagccggacagttcatcaggtagacaagtcaaatcagtgctgcataatatacttgcctcttctgaagtaagcaaaatattttagtataagacaggataattatcgatcataaatacatatgcatgcttataatataattttagctgatagtagcgattgtttgcaatagattttatcgaaaaacagaccattcagtagttatagattctctaatatgtcagccaaatgaactaagaattctgtccagatgaaaataaaagattaaagatgttctcaaagacaaataaaatatgttcgttgggtaattcactgaaaagttttctgctcccgaagccagctatggtgtgacaaaaaatatagcaagtaaatagactccactatgcagcgctataaaatcagaagacaagatgatacgacccaacatgtaatcttgtttgttgcaggtctttactatgactgcaactttgaagtttggtattcatataatcaataggctcaacagtatgtcccttgtaaatgttcttgtttcttacaagtggtgatggtggtagtggtctggtctctgtgtgagcattggtctagaggatcgtgaagctatgcggctcttctttcatgttcaagatgaagttcatgaagcttggatcgaatctggatacctttaatgatgatggcaatgaagtcagaggttataatcactcctgagcacaacgaagaagggatttacacgatcagattctacattcagatgcaggctatctcctgctaatgttgctgccgaagaaatgaacttcttacttttatgtagaggcaacacttactaatatgatgctcgaatttgcaatgaatgatgtgtgtgtgtgctatttttggaccactggtatttaaaactgacaaccatgaagttttggtacacatgaatcccaagcaatttgtgtaaaatatggctaaacaaaacattgatgcctgatttatgatccagctgattttgatgtcaatttattatacatgtatatatctttacaataacttcttatgtatatggttatattgcaaatactattgtctctttactgtctcccgatggggcgtccgaatggatgcctcctcttctagtaaattaaactcgcccggcctctttcgagattcccatgcatgacatgattactgactagtgcgtcgatcgcacgtccactccagaattaggcaccgtactactacgtggccgagaagcagtcaattaatttgttccttcaa

SEQ ID NO: 32447 - DNA, 1639 bp, Zea Mays
tcggcccccgacccccgtccgcacgagaaaacaaatcgcctcttttccaggagccaaaccaccacaccttatatctgtcatactttctcgccccccgtgagccgtgaccccgtctcgcctcgccgccgccgccgccgccgatgggctccggggaggagccgtcgcagatgcggagggcgctggtggactctctcgcgggcgccatctccggcggcatctcccgcaccgtcacctcccccctcgacgtcatcaaaatccgcttccaggttcagttagaacccacaacctcgtggggtattcttcgaagggatgtgtatggaccttccaaatacactgggcttctgcaagcaaccaaagatattctcagagaggaaggtttaccgggattttggagaggaaatgtaccggctctgtttatgtatatgccatatacagctatacaattcactgttctacacaaactaaaaacatttgcttctggttcatctagaacagaggatcatttggatttgagcccttacttatcttatgtaagtggagctatagcagggtgcacagcaactatagggtcatatccatttgaccttctgaggactattcttgcatctcagggtgaaccaaaggtttaccccaatatgaggtctgcgtttattgatataattaaaactcgtggtgttcaagggctttattctggtctatctccaactcttgttgaaatcataccatatgccggtttgcagtttggttcatacgacactttcaaacgttcgatgatgctgggacattttcaaaggctgcatgccacccacttgatgttgtaaagaaaaggttccagattgaaggactaaaacgacatccaaggtatggtgctccaattgagagcagtacatacaagggcatgtaccatgccttaaaggagattgtcgtaaaggagggatttggaggcctttataagggccttttcccctctttagtgaaatcggcccctgctggtgcagtgacatttgtggtttatgaatacatctcagactggatagggtgcaaggctggagttgagtaagttcttgttggatcatggagctgtcaggataacatgacgaaaactttttgcacaccctggataatggaggggaatggagaccataaggtcactcgtgaagtgcatacaatccctagagatctgattgcatacatgtaaagccttacatagaaaatagctgttttatcgtttcttattcttttgcccaattgcctaatctggtggtcggggtattcgttggcgtctcaaacaaggctgagtaaaactaacatagtgatcgtaacacagcatacatgacggaagtcaaaagcagccggcagttttgttgggatcgtgttacgaatattttttttccggctgaattcatgttatatatctactactacagctagtacgagtaacaatgtatgccactcagatggcgtatgtttaatggcagtcataatttttccatcatttgttgccggacctggatggcagttagattgtatgctgtagtctttctgaaatgctgtgctagcaaaaacctagctgatagtttgctgaatctgggggacagcatgttcttatccagtaggtacttgagctatgggttatcac

SEQ ID NO: 32448 - DNA, 2172 bp, Zea Mays
tctggagtgctctggaccgccctccccaaccaacggacgacgcctccatccagaattattccagatcacgcctctctctctctctctctctctctctctctctctctctctctctccgcgtcgtcctcggtctcctcgctcgccgaccctgccccctactgaactgccgcgcgcgcgtcgtggagtagagatccctccgtccggccatgaagtgatcccgtggccttcttcatcgtctcttcattgatttcatcagcactgcgtgcatacaaggaggagaggagtccggccgctggcagcgaagatgtcgtcctctaactctccatgcgccgcgtgtaagctgctgcggcgcaagtgcacccagggatgcgtcttcgcgccctacttcccgccagacaacccagcgaagtttgctagtgtgcaccgtatctttggtgccagcaacgtctccaagctgctcaacgatcttccggcggtgcagcgggaggacgccgtcaactctctcgcatacgaggcggaggcgcgcatccgcgaccctgtctacggctgcgtctcccacatctccgtcctacaggtcaggatcaggcaggtgcgcgacgagctcgtcgccgcgcgcaaggaactggccgcctacattgggcccgccgcctttacgcctttcgtcgcgacgccgcagcagtaccaccaccagtatgccgcaggcgctggcggcggcgtgcctctcgcgacgggcatgggtctcgcagtcggcgtcgggccgcagccgcaccagcagcacggtcacccgcaccagcagcagatgatggcgcacgggcagcacctccaccaccagcaccatctgatggctgctgctgaggcgcagcagcagctcgctctggccgcgcaggtcgcgcgcgagcaggatgtcatgatgaggcaggcggtggtctacgcgcacgccgtgcccgggagcggcgccacggtggccgttgggccgcccgacgcggtgccgtacgagggcggcttcctcttccagcagcagcaccaccagcaaccgccgtcgcaggcgcagacgaccgtggcgctcacgtaccagatggagcagtccccgccgccgtcgtccccgggccagtctcactctcaccccgaggtgtcgcagcagaagaacacggatggcagcgacgagggcagcggtggcggcggtctcgttccgccgccggcctgatctgatgagtccgatggccgcgcctgcctctgattcgtgcttccttcggccttttcctttcttgtttggtgttcgttcgcccttgttcgttatgaattcttttcccctcgtcgatctccatcatgttcatatggcgtcgcgtcgcggcatcgtcgatctctcggatccatgcacgcctcccgaaggcaggctatagctggattattatatcaaggttcctcatgatcagttgccttccttgctcaagagttagggccaaaataaatgcaagacagaaggagtggtatgaaatggggccgggacagaggtgctcatcatatatatggatcagcgtaacacagagaaatcaatggtgggaaggtgagagaggcagacagacacagcagagagaagcatgcatggtgtgctgcagctgcagcgcaggacgacgacgacgacggcagcagctagcagcgagtggtgatgtgagatagagaaacaaaatgcatgcagcaaatagctttcttcgcttttttttttttgcaggcggatcggagggggagcggcaggcatgaattgatgaaggaattaacacaccaatgcaacttggaggagcgctcagctaaacatgtatcttcgttcacttgtgcatttatttggtgtcgttgaacatgtggatcttctttctttcttcacccctctcgttagtattcttcgcctttaatttcactcctttttccgtttccctttcacaatttctttctgccgtgagtacgtcttcagagagagagaaacggttctgcccgtattgcttgcattgtgtctataaataaatagaagtatttatttggacatgaatggatggagggcaaggagctacctattcatcattttagtttatattgtgttactatcgattttgtttgaattatcattcatgcctatgatagagagggccatcaggctcacttcacaattctatatgttac

SEQ ID NO: 32449 - DNA, 721 bp, Zea Mays
gaggtgtgtttcatatatatttgagagtgcatggaacgttctcgattcagtacatgcatgatagacccatgtctttttctttcaggaacgtgtatatatagagagagagagagttatagacccatatggatatgagctaggcagcaagttatagataaattctttcggtgtaattaaaacgcagcactgtactgatgtttcccttgcagcagcctctgctcttgtgctttgccatctctttcgcgcggtagctatcgtattaatttgatacccatgtgtctcatgtgggtggccgtgacgacacggaggacaaccaaccgagctggacaacaagttttatcacggtttcagaaacgatgatcatggagttttatcatggagatttgcttgggttgtggcatatccgcagaccgcaggttagggcggtcttccgttggagtcttgatcatgtccacctctcgtcattcaacaacgcgcttccgcagagacctggctatgctagcagataacacacatgtaaatgcaagtgtcgatataccaaaccaatgtgagggaaagggacaaactgaattttttttctctctctaaggtttggttgcttgttggcaacctacacctctattgaggtggatcctaagattcaccactccacatagaagatggtagacctctctaaacatgaactgattcaacttgagctacttttttttttgaatctccc

SEQ ID NO: 32450 - DNA, 1879 bp, Zea Mays
ctactccccacagcagctgaaaaccaaagaaaccgttggcggacgcccaccaaccaaaaaaaaaaaaaacccacgcctttcctccccgccggggctctccactctcgctccaacgccgacggagaagccgcagctctgctccctcgctctctcttccgggagcgcgtggctctattccattcgcgcccgctcggctgacaacggagctgtaggttaacctggtaaaccaattaccttgaagctgaactgtgccgttgaagccaaaatttattacgataaaattttgatcctttcatttgttggacattggatcaactggtgctgttatacatagaaaggagttcattgtaatttctcatctatatttagtggtgccataatcatttttccactggtgttcggcaataatgtcggagagcgagttagcagtaataaaaccagaggtacaatcccctgcagcccccctctccggcgttaaagacttatatctggcttcagtgctttgatggttccattcagcaagtggaggaggaggttgcaatgttctgccccatgatatgtcgtgaaattgtgaaaaatggcacagggtcgtccaaaaatcatgctattgcgctccctgaaagagttaatccagccagtttgagtttgattcttgactactgccggtttcatcaggttactgggcgctcaaacaaggagcggaagtcctttgatgaaaaatttgttaggatagaaacagaaagactctgcgaattgacttctgcagctgacagtctacagctaaagccacttgttgatcttactagtcgagctcttgctcgaattattgaaggaaagacacctgaggaaatccgtgacattttccacttaccagatgacttaacagaggaagagaagttggagcccctaaaaaatgtaaatgatgatcctaggattcgcctattgaaccggttgtacgcgaagaagcggaaagagctccaggagcgccagaagctgaaggatgtacaagtacaaaaggaggaaaaagatgagagatctttggatgagttactttgttttattaatggggatggaggttcaggaggtggggaaagtagtaccaagagtaagaaaaagaataaaagaaggaaggatcatgctaagaaccccgcaaaagctgactctgagtctgtaaatgtggagggagctgcttgtgtggttccgtgcaaagtggatagcagtaatgtttctagacttccatgccaaagtccagatatgcaagatgatgtcgagtacccctttgaagatgctgacctcgatgatggacttgatcctgcaatgaaagaagagcttgatagagaagttgaggactttgcgaggaggttgaattcagtttggagcgagtcacatattggtggtaatggttctgtgcagagatttcctgggtttaatcacaggtgagtgttaagctggcaagatctgaaggcagaagctgaggagatttgtgggcatacagcttggaagggattaaaggccaaacaggccaccttggctcctgtgtgttgtaaaaccttgataactcaggaaccaagcatgcagaaatgcgcaagttcccttggccattttcctgggaaggaggccacctagttgggatgacccttttttttctttgggaagggagggttagaggtctgtcttgactcaattttttgttccttaactgctgtgttgccagttttcctgaataggggaagagaggagtgttgcctgttagctctgttacagatgtccatggaattctgttgtaacactgtattgtggtgcacatagaaatgtgattccctgtattgccgatgtttggctggtttgttgaccgtaccttattattactgagcaaaga

SEQ ID NO: 32451 - DNA, 1551 bp, Zea Mays
gccttactgcactccgcccctgctggccttcccccctcattcacttctgcctttcctcatctgcccgtcgtcgtatcccccggtccgccggtcacctcgacaaacggcgaagggcggcaaaatgctgcagtgcatctttctcctctccgattccggggaggtgatggtggagaagcagatggcggcgcactgcgtggaccgcgctatctgcgcctggttctgggactacgtcgtcgcccacgccgccggcgatccttccaaagtcttacaggttgtggtgtcaccaacgcattacttgtttcaaatctatcgcaatggtgtaacgttcttggcatgcacccaagtggagatggccccactgatggcagttgagtttctctctcgcgtggctgatgtcttgacagattatcttggagatctgaatgaagatataatcaaggacaactttgtaattgtgtatcagattttggatgagatgatggataatggttttccactcacaactgagccaaacatcttgaaagagatgatcaccccacctaatattgtgaacaaaatgttgaatgttgttactggcaagagttctacccttggcagcaaacttccagatgcagctgcttcttttgtaccttggcgaagaacaacagtcaaggatgcaagcaatgaagtctatgttaacatagtcgaggaacttgatgcatgtgtgaacagagagggggttctcgtgaaatgcgaagcatacggtgaagtccaagtaaactgcagcctcccaggtgtgccagagctgaccatgtcctttgctaaccctgcaattatcaatgatgttaccttccacccctgcgtccgattcaggccttgggaatcaaatcagatcctatcatttgttcctcccgacgggcagttcaagctcatgagttacagaaactgaagaagacaccgatctatgtgaaaccacaattaacatcagattccgggaactgccgcgttagtgtgatggtcgggattcgaaatgatcctgggaaacctattgattcgataacagtgcagttccagttgccccctcttattgtttctgctgatctgactgcaaactatggcacggttgacatccttgccgacaagacctgtttgtggacaatcgggcagataccaaaagacaaagcaccggcactctctggaaatttacgactggaggaagggctcgcacaactgcatgcattgccgacatttcaggctgcccaccaagtggacctactgcaacaagtgctcctccacccgctcctgcacaacctgcggaggctccggcagaatcgtcaccgcaccacctgtcacctagctagcactcaaggctatctatggaatttgcagctatatgtgtagcactgcatgtacctctcagagagtctgataaaaagggtcactcagattttttttcccttgtaaagaggattaccaagaatttgtataccatgtcatttggcagttgccgctgtgtctccggcttctaaagcaaattggttgtgtttactgaaactcttgtcaggaaatgtg

SEQ ID NO: 32452 - DNA, 4047 bp, Zea Mays
tcctctctcctctttctcccctttcgcctctctcttcttctaccaccactcttctgctcgctaaaaaaagcttctcgagcttataaatacgttccccttccccccggcgccaagttcctccccccgatccgcttcccccttccacccgccgatcgccctccgctcgctccaccgcggcgggcgatcgctcatctccccctaacctcccccgctcgcgattcccgaggcgaggtgccacccaccgcagatttcttccgacggacggttggctcgctcaccccctacttcgctgatcggatcgcgtgctgcccgaggtagaggtgatgataaggcatagttgtttgacttagcctgccttagctatttcttgaagctaagggaaataataattggtgttatggcatttagaaatatggtttgcactccccaagtcattaatcttacatcagactcagagagagggcaagctcaaggaggcaatggtagtgagatatctgagcaaggtgcacaacatgctgtcagagttgtaggaaatgcaatgaacattggtctctctggtgtgcgaagttactatgatatgagcataaatcatcaccatcagtctgttcataacccacccccgaatttaggtgttgattctggttttgtcttcgcatcaaatatgtacaatccctgcatgtcatcaacatcaatgaacagacatgtttctcatgctcagagctttggatcagggaatcaagtgttgcctcaaaaccaagtcccaggaactatggatgagagtagcagaaatgacagtattggtgaaagtgctagagagcatattaaaaggaaaaatgctgcagttgctggaagctatcattttgttaatggatttgcaagctcaagctcatcttctcatgcacctcaaaatcctatgcttgggccttgggacccttcttttgaatcaactgtttcttctaatgttgcaccattcaacccatcagaatatcatggacacaacaacagttggccgtccttagaaggatcttccataacaggaagtaatggattcaactcaatggttgttcatccagactcagtacagcgtgggaactatacatttccacccactcatattagccattcatggatgtcccatgctacaaatggtattgctgatggagttccccagtgggaatatgccaatgcaactgctaatattcaaggcagatttgcccattcaggagccacagaaatcgcaaatgttggttttcatgaatatcagaatggcccttcaactatttgtcggggaccagtaccttatttccaccagcatgcgatgcatggcatgcaagctcttgatcctactcaaatgcaagttccttatcaacaatgccacagtaatggtttcttgcatggtggtattaattaccctggaaaccgtctccaattaggtccacgaaatccagttctcttcaccagttctgaacgtgcttttgggcctccacagcatccgttcctggcaaatccagttaaccaccgcaacataaggattctaccacccgagcatgctacaataatggatttttcgagattgtatgaagtgtcaaatactgtagatgagcatagagatatgcgtctagatatagacagcatgacgtatgaggagcttttagcattagaagagcagattggagatgtcaatactggtctgacaaaaagtcacattgtagataaattgaggactagcctatatgttccaggaatatcgagcatgtctgatcagccatctaaatcttctctagagaatgatgcttgcataatatgccaggtcctactccttcactgtatactctatttattgacaattaaatctcagctgtcccaaacaaagaatcatcatccacctacctgccccaggtttgacataaacattgcagctgctgggctcgtatcgccttgcaatcagccttgatggctgattgcatcacttctcttccactggtagcttgaataatgtttagtgtgcatctgttgacgctgcagataaaaatatgaagtatctaatataacaccaccataggggcactaataaataaaatccagatcgcacaagttggaagtctttcaaataatttcaaagcagtaatatatttttgtacatttgttgagaactaaatataatatacaatgcatctttaagagaaatggttcgtacatgcttcaagctgcttctacagtagtaatatgtagatttagtgtgaatgaagcattacctgaagcaatggaaagatccatgaagtgtgtcatcagggatgaaagcactttgtccctctccagttcatagttctaaggaagttttgctgggtgcatctcgcaggaggagtaccaggctagagactgcgttggcacccttgactgcggtcacaggtaccacgcggagtgcgtgaagcagtggctgatggtgaagaacttgtgccccatctgcaagacgacagcattgtctgccaacagaagacaaggacagtgagcgggaatggagaagcctgttggttatttgctttgacaaacgttcagctcaattttgtatataaagaagtggtagacaatggcgctacctgtatttgttgttcactttgttgtgactgggagtactcagcttcctgaaactgtacagccataacatttgttatttttcttcaaatgtagaatgttttaaatcgctcagttcgcccccaatgtgtatgataactgataaggcgaaccaaggagacggagcttccgaaatggcatctctaggcagccttgtaactattagctttgatgaaactagtcgcacatggatcgtcctgtacattttttaggagttgacggcatcacaattgctcgttatcattatcagcgcggccagtggataaagttttctgcagtccaatgttgggttttcaaaattccaggagcgggtatattgcgcactcttgctccaagctgtcaaaacatgccaatgtttacatccaaatcagtggaaatacaatcgaggacaggattgcaagtcagcgaaacatcatggcgccctctccgaaccacgttgtcaatgtcgagtgccaatcacccgtaaccacttgacgatgtcaagaaagattgtcatcacgttttgtgttccttaaaccagtagagcgtatgcttgaccagggctaagacgaaaaggtagttggaaaaaagaaagagaaacgaaaagctaggccgagcagcacccgcccgcgttcacgggcgagacctctcgtccttggcggcgtcgacgtcgatggtcttgcctctggacggcgcggcggggtcgtccccgatgtcgagcgcgttccggctcacgacgtggtagatctggcggagcacctcggcgaaggcgcgctctacgttggtggcgtccagcgccgacgtctccatggagaaggtgccgtggcgctgggcgaaggccgcggcgtcctcgggtgacacggcgcgcaggtggcgcaggtcggccttgttgcccaccagcatgaccacgatgttggcgtccgtgtggtcccgcagccagcgctccgcgttgtcgaaggtgacgcggcggggcaccaggggcgtgccaggatttagagaatgggtattcgaaatggttagagagaaaaaaaattggatggcctaaagcctatcctaatagccttttttactagaaagtaaactaaatcataactcacgttaaaataataggtcataagatgatgttgttcaacactaaacatattaaagcattaaatatagagaacattaaatagtataagaaagcttacatattacaagacaacctttcgatccttcaagctttgaaattgtgtgataatgtcttcatccttgacttgcaagaagaattgtctttcaataaaagtaaccaaacatccattaaattttttttgtcccatcttgcttcttagcttattttttatgaagttcattcaagaaaagattctttcaacgccagcagttgcaacaggaagaactgctcaaatcagtggtagcactgctcttcattttcaaatc

SEQ ID NO: 32453 - DNA, 2059 bp, Zea Mays
ctaagatgttatcatccctttattaaacaatcaggattacgctttcattcgaagccaggtccaaagagctgagtttctaactataatctttttctctgatatatttactatgctacctacgtaaacaaatacatgtaaaataaccgtgtttcgcagcagtacgaagttcatccgtaaaaaaggttccgacagctcaatatcgaccatcaacaaagataaggatgcctaataaaccactttcagcattgactctacaagatcgaaatgcagaggttcaaatacaggtccacaggaaatgggagtttcgaggtgccgttgacaatggccctatattacacatcgacatgatcctgacagactgcacaggcaatgctatccattgtcagattccttcgttcctagcagctacaagaggcgatgaatttcaagttggcaaaatatacaagatgacccgcttttcagtagcccgtgcaaaatccacctacaagcctgttgatggtgatctcatgttgtatgtcaaaccatacacaacccttgaactttgccacacttcaccatcaggttttcccctttatgtttatcatctaacaagctatgacaagattgatccagatggatcaaatgcaagaaacttccatgacgtccttggtattattacggaaatctctgcgattaagcctgtcggaaatgcacacataccctcatcttacaatcgacatgttctgataaaaaacctcagcgacgacattctgaaaattactctatggggaaaacgtgcacaagaattttcgttgaccaacacttatgacccacagaaacaaactcctatcgtggtcttatttgttggttgtttaccaaaagaatatcaaggggaagtactgttaagtggtggcgcagcctgtcattggtacttcaacccatcaattgaagaagctgaagctttttatagcaggattgaatctgaaaagataaacatagaattgcccagtcttgacaaacaagaaattacacctccaagttttccacaacgagaacatcacaaccttaaatacatactgtctttaaacccacatgatgtaccggatcaaggatatgaatgcacggtaaccattacatgtattcctgaaggcaagacttggtattatattgcttgcaacacttgcccaaacaaaccaagcattgatcccgtcatccgtcaatgctccacatgtagatcaacaaattactgcttcagatacaagctcactttcaaggcatcagatggaactgaagaagctgaaatgtttgcattcgacaatgttgctaggacaattattgggaaaccatgtccaacagttgttgcatcctttcctgatgcatcagctatcccacctgaaattgcagcaatagtttcacggaaatacacattcattatagaattcaacagccagtcattcagatttctagaaaaaacattgctcatcaaaggaattgtagcatcatatggaagaatgacatcactaccaatagtacaagaaaaagatgatgtgcaacttcctctcactccaacaaaaaacaaactgataacaacagctgccgaatctccttctacacccatgtctagactttccacagcagactcaccaagcatgccccaaaagctgacatattctccagcaaagaataagccttagacaaacctccccgatgctaacagaagcagagctcctacaactacaattgagtcgccaacaaaaagaatcaaacaaaatcccaagaatcaacaagagtagacgttgtctacaacacaacacagcgaggaatattttggatcgtcggagccaaaattcagatgaaaaaaacatgttcgtcgctattttgtctctatatataattagagtcacagcttccatgaagcagatcttattttggacatgctacatgatatctatgtactactatgtcatgtacctttctgtatacttatctggtgctataacgaaccgtcatgtttcatatatagaatcgtttgctttggcttgctgaaaacgtataacatcaaaaacaagatgaacgcgcg

SEQ ID NO: 32454 - DNA, 1910 bp, Zea Mays
aaaaacaacgattttaccatctttgccaaaaagaagttaatggtgcatgtttgcttctgagctggcatgcagagacactgctttctcttgaattcatccattgtcagctttatcctaccgtcatggataaaatttgcatgagtgtgtacctgaagggatctcaaagccatggaatccaacaatttagtattaagtcgtcacaaatctgtgaaaccaagcctctgaccatctcttctggtctgttcaaaattttgtcatctggtcgttgcacctgctgtcacttcgtgatattaagatgcagtcaccatttgctcggatgattattcacactcttctcgagtcgtcatgtgatttacacacacttgagatatcagaaaacaatgtgggttgacatgaaaaatatattcttaatttccttttacttattttctatctggtaaattggttgttttttgtagattgctggctggctttcggaattgaacaaatgttctacaaacttattagcgctgaaatcagatatttttatgaactccctgtctgttcttaacctgagggaaaataatttgcaaaaggatgatgttgtagatcttcacaaaattctaataaaaatgcctaacttaagagatttagatataagtggcaatccagtcatggatgaaggtatcagatcattgatccctttcatttcatggtctattcaaaaggaaaatccacttctgagattaacagttgagaactgtgagttgtccagtattggtgtgattatacttctggagtgcctcacaaatgcgaagcaactccttgatgtgctatctattgcagacaatcatctagggagttctgtggcagctgcattggccagattcttgggttcacatgtacgggctttaaatgctacagatatcggcttgggaacagtaggcttccaaatacttgaggaaacattgccaacagaagtagctctttcccacatcaacatcagtaagaatcgtggtgggatcagagcagcatattttgtttccagattaatatgtcgagcaccagaccttgtctcagtcaatgcagcagggaaccttttaccacctgaatcattggaagtcatctgtaactccttgaagcaagggacttgtaatttggagcgagtggacctgactggcaacatgcatttatcaagcaatatttttcctgcattccttgaattcaagaagcatggaaagccaattctggtagtaccaccaaacttgagcacttctgctccatatgatgatgacccatgactactatgtaccgtataagccctagtgctgctcaagtcacttcagttggaactaaataaatagtgatagtatttttttggatcattcccaagaatcctaaccactagatcaaaacacaacacaaattgtacatctgtttagattcgacacggctttcgtcggtgaagctttgcgctagggcagcgacggtcgggaaagcgagcttgatgtcgacggtggactttctgttgctgacagacttccctctagatcggttaaggtttgaggtggagatcgaaaatgattgtgaatcttgtacctttaggtgtcggcctccacctctttatttatagggctacgcaacagatgctcaacaaccttgatgctctcgatcagggcgtgaggtcaggggtctagttttcggttgggtcaagttgggtcaactagtggagatcaattctaacattttcccctttaatctcattttataccttcagctttatacctttaatttttttgatattccattatagataagtgcatagagcatgtttcatcgtcacgattaatcaccgatagacttagcaactacagtacatatctctatcctgaaatagattctttaactttgggccttttattgttcggaaa

SEQ ID NO: 32455 - DNA, 1667 bp, Zea Mays
ggagcattgtctacttagttcctaagcgagggaaatgaaaaattcgttccaaagtctgtaatgcatttccagacttggagaataggtatacttttttttgctgctgggaactgcctcaacttcatgtcatttgcttatgctgcacagtcactacttgcagctcttggatcaatccagtttgtgtccaacattgcttttgcctactttgttttgaacaagactatttcagtgaaagtcatggtagccacaacatttatagtctttggcaacatcttcttagtatcctttggcaaccatcaatcacctgtttacacgccggagcagctgatagcaaaatacagcaatttggtgtttgttctttattgcatgtcattggtctttgttgttgcatttaaccactatctctacaggagtggagaaactattatttcaaatagttcaaaaaatgctggcacatattggcgaacaatgttgccattttcttatgctgttgtatctggtgctattgggtcttgctcagtcttgtttgcaaagtcattgtctaacatgatgaggctgactatgaacagcagatacgagtttcatagctggttcacatactcaattgttcttctgtttctgtgtaccgctggattttggatgggaagattgaatgaagggttgtcattatttgatgcaatactgattgttccaatgtttcaaattgcttggaccttcttctctatctgtacaggatttgtttactttcaagaatatcaagtatttgatacgctcaggataattatggttgtattgggcatgacatttgtctttgttgggatctccttgctagcacccgatgacactaaaggtttgtaaaaggttgattttcatgtgctttcacacagaagattttgactcttggacaattgtcaccagctgatacgaaagatggttcgagcactgccgaggaatctataattgatatggacaggttctattccacgaaattgtagaaaatttcatgttttgctctgatgcattctttgttcagtatcacattcagtgttgtgatatgtaacttggacactgcagaaatggaaagatgcagatggaggagacagacacagatgatagcaactcgtttgtcacttctgtaaaagcaaaagcaaaacgtgtactgttgaaggcaaagtctgcatgctccatgtcccttggccttggggaggacacaataagcgcttcgtccgtgcttgccatgcctatggtctcatcaagaacaaccggcttcagaggaattgaagatgaccgttcaaagtacgttcctttaagaaccacagattggagtaatctttagcggacggtgatatatagatacacagcaaaggtctttacttttgatgttgcatagcgggtggcagtaaagtattttgttgctccagaggctattgtttgttgtaatcatagttagctgtaacacgagtgtatagttcaacgtttctcccttcaaaacactgtccatagccagctgcatagtacatttgtaagttttagaatacagatcaaatgattcaattcgcttcttatttgctcaaccactcctacggttgcatgtgctgtgatcatcttatgcagaattgcaatagcttctgcggactgcggtctggccgcaccagggtgccttttag

SEQ ID NO: 32456 - DNA, 1296 bp, Zea Mays
ttctgtaatcagtcatcgtcttttgtcgacaagcccacaagcgttttcctctccgagtcctccctggcctctcaaccactcatcatcgccttcgcaggcatcgccctctcgccgggccgtccgattccgccatggcttccgatgagagcaaaaattcaaaaccagagaagccatcttcagcagctggacccatcgataagagagatggctgagcaaattgcaagtgaccctgtgttcaaccagatggctgaacagcttcagaaaagtgctcagggtgctggagaacagggtattcctgcattggatcctcaacagtatatggaaacaatgcaacaagtcatgcaaaaccctcagtttgtgtcaatggcagagcgtcttgggaatgcccttatgcaggatcctgctatgtccagtatgcttgagaacttgaccagtccagctcataaggagcagcttgaggagaggatggcccgtatcaaggaagatccatccttgaagccaattcttgatgagatagagaatgggggtccatctgcaatggtgaagtattggaatgaccctgaggttcttcaaaagattggccaggcaatgggtgttaaccttcccggagattctagtgtgtccactgtgctctctggacctgaagagactgaggaggaaggaggggatgacgatgagtccattgttcatcacactgcaagtgttggtgatgaagagggtttgaagaaagctttagaaggtggagcagacaaggatgaagaagatgccgagggaagacgggctttacattttgcatgtggctatggtgagttgaagtgtgcagaaattctccttgaggcgggggccgcagttgatgccctagataagaacaagaacactccgttgcactatgctgctgggtatggtcggaaggaatgtgtggatcttctgttgaagtatggtgctgctgtcacgctccagaatctggacgggaaaacccccatcgaggttgccaaactcaacagtcaagatgaggttctcaagttgctagagaaggacgctttcctatagagaagagaaccgccgaataaagtgtatcaagccgtcaaactattggttttgcattggtttatttatctcggtctggtatggttgtctgtagcttgtgaatttgatgttcttttcatagcgaatgccgtttttgaaccagtacttgtgtaagaagtacctaggcttgttcttgtcctccatatatgaatctttcacacttgtcaagaattgattacagttattttcaaggctatttcctccgttccc

SEQ ID NO: 32457 - DNA, 3968 bp, Zea Mays
cgtcctcgtcgcatccagcactctgcactcatgcgtttcctcccctcctaagccaaaccccgaatcctccgtcgcccagcagccgccggtgacggcgacgctgggcaatggggactgaggtagcagccgtagtggatctccgggcgctgacacagtcggatctcgtggccctagctgccgcatcgccctacgccgtcgactcccgccggggccggcgccggcgccgcgatagcgagttcctctctcccccgaagatcgaccgcgccgttttcaacgagagcgcaggttcccgcaaacaaaccttctcccgtcgccgcgtcgccaccaacatatcccacaaactaacgcccaccaccaccggggcctcctccttatctacgccagctgcccccaccgaggaggaccccgacaaccgcctcattgtgttctacctccaacgcctcttcgcgcgtgacgacccctcgtaccctgctccgcctacgattccaccccgaccgcaaaccctagccgcgcccgcgataacagcacctgcaccgcccgcgccgtctctgccgccgccgtctgctgcggcggcagaccccgatagggtagtgctgaatccaaagggtttggtggttgacctggtgagactcgccgatcttgtggatccgtatggggaagagctacgtcagcgtacggcaggattggggtcagagtccgagctgctgggattcatgaacgcgctggaagggcaatggggaagccggaggcgtcggaggaagtttgtgaatgctggcatgttcggtgaccacctgccctgtgggtggaaactgctgcttgggctcaagcgaaaggagcgtgtcgcatggattaattgccgccgttatgtgagccccaaaggacatcagtttgctacttgcaaagaagtatcttcctacctcttgtcccttcttggatatcaggaggcaaagccaactgcctctcagattaacaatgcaggagtgcatgacctacatgttaattctgtaggtcttcaccagcaaaccatctcaattgaggaaaagcaaattgcagtgccagttaattcagttgcattgtttaattcctctggtgattctcatcaacaaaaacttcagaaggatgaagctccaatagaagtgaatgcaaaggagtgccggaaatgcaatttgacgtttcatgaccagagcgcctatatgcaacatcagttgtcctttcaccaaaggaaagctaaaaggcgcagggttagtaaatctggagaattgggtaccaacatagatggaaactacgagaagactcagcagaagacctctggagaggtatctggcaattttggccacagcgctgcaaatgtaaggtatgaaggtctgagtccagcagaactgttagatggtcgaccatccttgatggcagtgccatgtggatctcaggagatcactatcttgcctcaacagggaaaagaaccttgtgtgttgcctcaacagggaaaagaaccgtctgtgttgcctcaaccgggaaaagaaccgtctgtgttgcctcaacagggaaaagaaccttctatgttgcctcaacaggggaaagaaccttctgtgttgcctcaacagggaaaagaaccttctgtgttgcctcaacagggaaaagaaccttctgagttgcctcagcagggaaaagaatcttcaggagatatctctgtgaatcagaaggaccctcttaaggagatgaatggctttcctgaacaggaaaaaggacttgttgctggagaacttgtctctgcacatcataaggaccctctaatggatattacagatgcatttgaaatgataaaaaaacatcctgccagagagccttcctctgggcatcatctggatactgtcgacaattctgatgatcataaaacccacgatgaagcatgtgacaatgttgtaacttctctttctattgatgctgaaaggaaattgggtgtttgcaactccatgaatgttcatgagaatatcagcttaaaagatccagaactttccaatgcagattattcccaaaagttcaataggtctgatgaaacttgtgatgtacataaagaggtttcttcaactgtgaatgatcctgatgaaagaaaatgcacagatgattcaacgaggtgtactaatatgtcctgtgatctactgcatggcaaaattgtcagttctcctgaagaacatgattttagtaaccagctagaaagtaacccactttcagtatctaggaatgagcctgatcttaattcaattggtacggaagtggatggtggcaatataacttgcaatgcggaaaaccccagaagcttcaaaagtgagaaatctgctgagctcaagattatggattgcgaaatgacttcttttaaagacagtgaaataaaaaatgatgtcagagtaagggatgtaaatctcaattcatgtttggattcaatatcttctcctatttctggtggaaacaatgaaacatctgatactcctgatgatgctattcgatcatccattatcgcccaatgcttcggtactacctctaatgatgacacggcttgtaaggatggaaactttgccaaccagaacgacacctgtaagggtgaaaattttgtcaaccagaaaaatgtcacaatgtaccaatctaatttgaccatggaacctatacctcgagctcaaataaatgtggattgtttcacttcttcctgttcaatgactcctgaaatcaaggactatggcaacagaggtgaagatcgtgcgaaagaagcactagtgaactcacaaaacatgacaagtaatgaaactggttttgatgctgaagcttataacagtgatatcttcaatggtactatcacagaaagtagtcttgcccagcccttcttgtgactcactacctgctactgggacaagtgggactattgatgattttatgtccatgcaaaccaattttggtagctttacttctttggttcgtgctgttgaagatgttccactgagcaggattattcaagatcagcggtgtgatttgcaacttggatttggtggccccaagcagcagatgtatccaagctttgagcaacagctaaggatggcctcggctggagctccgccttatgggaccatcggcaggcatgaccctatacctgtaccagagccaacattgatgctaggttatgcaccgcagctaggtaactgcccccctccgttccagttgggctggggtccgtcttattcgaagatggttggcatgctccaatctgtgtgcgtgtggtgcaatagcccattccagcatttcggcaccgtcgctgagcagcaggcagattcacttggttacatttgcccgtcgtgcaagggaaagttttctggtcatcttggcatcaacggtccatctatttgaaatcagtttcttgtaacctgaactggtgctgctgccccaccatcaatttatagtctagttgatatgaatcgttttgtacttgtagtatgtatcctttaactcgtggctagtggtggaaacaggtttattcgaatcttacatttttggttattaaaactcaaccatcaagcagttgttgcgaacaaggaagctaagttgttggatacatacaagactgtgctctcaagagatactggtgggtactctgctgaagaaaagaccaattggcctgaagactaaattgtccatcttcaattgcaccaagagaaaggatctccattgcactggtggctggtgcatgtttgaggcttggatgatggcagaagtgtcatgtttttttatgttgaaccttgtttctaaatagtaagtctagacaattgttctgtttgaaatctgaatgaattgtggctggttgttggtggactggattacaggcaaaagtgtcatgttttttctatctttaaccttgtgtataatatagtaaaggacggatgattgctctatttgaaatatggagtaatggttgctagttgcctgac

SEQ ID NO: 32458 - DNA, 2517 bp, Zea Mays
atggtggcggcctcctctaccgtcgtcgaggtagcggtggcagcagctgcggcggcggcgtcagctttgccgcaggagcagcaggcgcagccgcggccgcggccgatgcacgcgggtggcgccaatggccgccaccacgcgtacagccgcaaggacaagtcgctcggcctcctctgctccaatttcgtggttctctacaaccgcgaggacgtggagtccgtcggcctggacgaagcggccaaacggctcggcgtggagaggcgccggatctacgacattgtcaatgtgcttgagagtgtcgggaagattctttcgaggaaagccaagaatcgctacacatggataggtttcggcggaatcccaatggcgttgctagaactcaaggaaagggcgttaagggacaagtctggtttggcttctcagcaaaccgagcagcaatctgctgccacaatttctgatgacgaggatgatgatacattgggcaaagaagttgctaatatcgagaatgagaaactgagtcagactgttaacaatccttctgacaaacctggtgcaccccgttgtcgccttagatctgatcataggaaagaaaagtcacttgggttgctcacacagaatttcgtgaagctctttctcaccatggaggttgacacgatctcacttgatgaagctgcaaagctgctccttggggaaggccacgaggagaccaatatgagaactaaagttcggaggttatatgacattgccaatgtcctgtcttcactgaatctaattgagaagatacagcaaggggactcaagaaagcctgcgtttcgttggttgggtagggccacaacgccggacacagaaaatggtgtcacagttgttgtacccccaccagggaagactaaatcgaacaaaagagcatttggaactgaactcactaacatcgacatgcatagaagtaatctagattcaaaagttcagaagaaagcaaaactggcaaagagtggtggcgatgtcttgataaattgcaaattggatagtggtggcgatgtcttgataaattgcaaattggatgtacggaatcggcttggacagggtaaacaaagtggcattgtttatggtcctttccaccctgctggcgcaaggaaacatgaacttgctggtggcaataaccccgggcaaagggagatggccgaggactggaagagcctttctgctccatttcgaccacagtacaagaaccaagcactcagtgatctttttgcccattatgttgatgcgtggaagacatggtattctgaatttgctcaaggcagcaacatcatgcaacaacactttggccattttggtaaccattttttgtaggcaaattatagggtcaagcattgcagttcttagtgcacgcttgtgtattttacctgtacaacctgttaaaaggggagagaacaagacatgattaggcctagggttcattgtatttactcaatgcaggacatctttaggctattttaggtggaaaactagagtggaactattagagagagatgttccccaatctctctaatagaaacatcattatcatctcacctttaagttctctattgttaattgttgtttatgtgcttacctttgtgggttctacaactgtctgtcactagccattcttatgaaacttctcataactaagtatatcttgcacttgtctatcgcaaccaaaaataaaataaaattctgttcaaattatatttcagatacaatcacaatgtcatcaattctttcctttccgctgtgatcataattcttgctacaattcagatgctacaaaatagggaaagcctcgaggcctggcctgtagatgtctgtactcagattatgcaaagccagctgatcccatcgtcttgctttaatttaaccgtaaagacaattatggtcgcgtaacgacaccaggactccaggagtacataggagtggtggtctcagcatggtgagccctactgttttggtcagtttcatttactcaaaaatcacatagttttttttttgcattgaattagtcaccatcatttgctttcaggtctacagtacaagcaagagtttcaggctgcaaaattgtgatcccaatattttggttgtatgggttgttgtcagtgtttggggaataccatatctccaaaggacatcaagacgtattcaaatatccctgtaactgtcatgcgctagatgccttgacccaccgagcgctatgcaaagcttgagaaggatggttcgtcgaaacatgtcccaagtgattgactcctcgccattgcttgggttgttctgaataaatatgtttagttggctacttgccttttggtttgtctagctaacacaatttaaatcaaatatttccccaacgtcatcgacaggaacactgtatctactgaccattcgtgattttttttcttggactatggagagcatctgagctacaaagctgttctcttggctacaacttgatatatcaaattgattttgtttgtcccttagtaaatt

SEQ ID NO: 32459 - DNA, 4684 bp, Zea Mays
atgtccggattcagtgccgcggccaacgcagcggcggctgagcggtgcgcgctcgcgttccgcgcacggcccgcggcctcctcgccagcgaagcggcagcagcagccgcagccagcgtccctccgacgcagcgggggccagcgccgccccacgacgctctccgcctctagccgcggccccgtcgtgccgcgcgccgtcgccacgtccgcggaccgcgcgtcccccgaccttatcggaaagttcacgctggattccaactccgagctccaggtcgcagtgaacccagcgccgcagggtttggtgtcagagattagcctggaggtgaccaacacaagcggttccctgattttgcattggggagcccttcgcccggacaagagagattggatcctcccgtccagaaaacctgatggaacgacagtgtacaagaacagggctctcaggacaccttttgtaaagtcaggtgataactccactctaaggattgagatagatgatcctggggtgcacgccattgagttcctcatctttgacgagacacagaacaaatggtttaaaaacaatggccagaattttcaggttcagttccagtcgagccgccatcagggtactggtgcatctggtgcctcctcttctgctacttctaccttggtgccagaggatcttgtgcagatccaagcttaccttcggtgggaaagaaggggaaagcagtcatacacaccagagcaagaaaaggaggagtatgaagctgcacgagctgagttaatagaggaagtaaacagaggtgtttctttagagaagcttcgagctaaattgacaaaagcacctgaagcacctgagtcggatgaaagtaaatcttctgcatctcgaatgcccatcggtaaacttccagaggatcttgtacaggtgcaggcttatataaggtgggagcaagcgggcaagccaaactatcctcctgagaagcaactgaatttgaggaagcaaggaaggaactgcaggctgaggtggacaagggaatctctattgatcagttgaggcagaaaattttgaaaggaaacattgagagtaaagtttccaagcagctgaagaacaagaagtacttctctgtagaaaggattcagcgcaaaaagagagatatcacacaacttctcagtaaacataagcatacacttgtggaagataaagtagaggttgtaccaaaacaaccaactgttcttgatctcttcaccaagtctttacatgagaaggatggctgtgaagttctaagcagaaagctcttcaagttcggcgataaagagatactggcaatttctaccaaggttcaaaataaaacagaagttcacttggcaacaaaccataccgacccacttattcttcactggtctttggcaaaaaatgctggagaatggaaggcaccttctccaaatatattgccatctggttccacattgctggacaaggcgtgtgaaactgaatttactaaatctgaattggatggtttgcattaccaggttgttgagatagagcttgatgatggaggatacaaaggaatgccatttgttcttcggtctggtgaaacatggataaaaaataatggttctgattttttcctagatttcagcacccatgatgtcagaaatattaagttaaagggcaatggtgatgctggtaaaggtactgctaaggcattgctggagagaatagcagatctggaggaagatgcccagcgatctcttatgcacagattcaatattgcagcagatctagctgaccaagccagagatgctggacttttgggtattgttgggctttttgtttggattagattcatggctaccaggcaactaacatggaataagaactataatgtgaagccacgtgagataagcaaagcacaggataggtttacagatgatcttgagaatatgtacaaagcttatccacagtacagagagatattaagaatgataatggctgctgttggtcgcggaggtgaaggtgatgttggtcaacgcattcgtgatgagatattagtaatacagagaaataatgactgcaaaggtggaatgatggaagaatggcaccagaaattgcacaacaatacaagcccagatgatgtagtgatatgccaggccttaattgattatatcaagagtgactttgatataagcgtttactgggacaccttgaacaaaaatggcataaccaaagagcgtctcttgagctatgatcgtgctattcattcagaaccaaatttcagaagtgaacagaaggcgggtttactccgtgacctgggaaattacatgagaagcctaaaggctgtgcattctggtgctgatcttgaatctgctatagcaagttgtatgggatacaaatcagagggtgaaggtttcatggttggtgttcagatcaatccagtgaagggtttaccatctggatttccggagttgcttgaatttgtgcttgaacatgttgaggataaatcagcggaaccacttcttgaggggctattggaagctcgagttgaactgcgccctttgcttcttgattcgcgtgaacgcatgaaagatcttatatttttggacattgctcttgattctaccttcaggacagcaattgaaaggtcatatgaggagctgaatgatgcagccccagagaaaataatgtacttcatcagtcttgtccttgaaaatcttgcgctttcaattgacgacaatgaagacatcctgtattgtttaaagggatggaaccaagccttggaaatggctaagcaaaaagacgaccaatgggcgctctatgctaaagcatttcttgacagaaacagacttgcccttgcgagcaagggagaacaataccataatatgatgcagccctctgctgagtatcttggctcgttactcagcatagaccaatgggcagtcaatatcttcacagaagaaattatacgcggtggatcagctgctactctgtctgctcttctgaaccgatttgatcctgttttaaggaatgttgctcacctcggaagttggcaggttataagcccggttgaagtatcaggttatgtggttgtggttgatgagttacttgctgtccagaacaaatcttatgataaaccaaccatccttgtggcaaagagtgtcaagggagaggaagaaataccagatggagtagttggtgtaattacacctgatatgccagatgttctgtctcatgtgtcagtccgagcaaggaatagcaaggtactgtttgcgacctgttttgaccacaccactctatctgaacttgaaggatatgatcagaaactgttttccttcaagcctacttctgcagatataacctatagggagatcacagagagtgaacttcagcaatcaagttctccaaatgcagaagttggccatgcagtaccatctatttcattggccaagaagaaatttcttggaaaatatgcaatatcagccgaagaattctctgaggaaatggttggggccaagtctcggaatatagcatacctcaaaggaaaagtaccttcatgggtcggtgtcccaacgtcagttgcgataccatttggcacttttgagaaggttttgtcagatgggcttaataaggaagtagcacagagcatagagaagcttaagatcagacttgcccaagaagattttagtgctctaggtgaaataagaaaagtcgtccttaatcttactgctcctatgcaattggttaatgagctgaaggagaggatgctaggctctggaatgccctggcctggtgatgaaggagacaagcgttgggagcaagcatggatggctattaaaaaggtttgggcatcaaaatggaacgaaagagcatattttagcacacgcaaggtgaaacttgatcatgagtacctttcgatggctgttctcgtgcaagaagttgtgaatgcagattatgcttttgtcattcataccacaaacccatcgtctggagattcttctgagatatatgctgaagtggtgaaagggcttggcgagaccctcgtgggagcctatcctggtcgtgctatgagctttgtttgcaaaaaagatgaccttgactctcccaagttacttggttacccaagcaagccaattggtctcttcataaggcaatcaatcatcttccgttccgactccaacggtgaggacctggaaggttatgctggagcaggattatatgatagtgtaccgatggatgaggaggatgaggttgtacttgattatacaactgaccctcttatagtagaccgtggattccgaagctcaatcctctcaagcatagcacgggctggccatgccatcgaggagctatatggttctcctcaggacgtcgagggagtagtgaaggatggaaaaatctatgtagtccagacaagaccacagatgtagtatgtatgcatctattagacagctcaataagcactgttgtacgcttgtatggttgggacatatgggcgttatggcatgtatagttgtatgcctagatgtacaacacgtgtactcgtatatatatatataaatgctgaaacaagcattggtcctgtactgtagtttctacatttcattgtcaccaataattaagtgtactcctatggctgggagtctatgaaaatggacgtgttgacttattgggtaataaataatttatatatatacttgtgcaagaa

SEQ ID NO: 32460 - DNA, 317 bp, Zea Mays
agagccccgtccagcccggaccctgtcgcaccacgaggcgccgtcaacgagtcgggttgtttgggaatgcagcccaaatcgggcggtaaactccgtccaacgctaaatacaggcaagagaccgatagcgaacaagtaccgcgagggaaagatgaaaaggactttgaaaagagagtcaaagagtgcttgaaattgccgggagggaagcggatgggggttggcgacgcgcaccggccgtatgcggaacggctcctgctggtccgccgatcggctcggggcgtggaccgttgtcgcccgcgccggcggccaaagcccggg

SEQ ID NO: 32461 - DNA, 658 bp, Zea Mays
agcacgacagccactgaagctgtacattcagaggctgtgcagaagaggccagagccgaagatgccaaatccgaagatattaatttagagagcatagctgttgatattgtaacactccaggtttcacaaacaacccggtatgctactgtactacacttccgacgtccatatataaaatttcggcagcatcccctttgcaagattgcataaaagagggagcaacagagtataaacatatatcatgactaaaacatactaagtattattactcggctagcaaggaaagataaacatacgacctgaactgaattaactagtgcgcacgaccatataaaaaaaataaacaaacttcctttgacaataagtttctaattaaatcatggttgcgcctgggcagcgttattgtgagagtgaaagtggacgtgctgctactccccacattcccaacatgtatcaagtacctgcattgagtaatgcaagagtgagatgacacatctcagcaagtaaaataatatcaaacagtttaaccacataagaacattgttttaccaccacttaattccacaaccttcttattacgaaggtccagcacgtatacaacgtacaacgcacctagttaccacacctcacaggtagaaaccacaatagtaacatagtaa

SEQ ID NO: 32462 - DNA, 4881 bp, Zea Mays
cgcgcggccgctgctccggccaacccaacggcagcccgcccacccacccacctacccagtacacccaccctcgcacatcgcagcccgaccgcgactcttctcttctccgccacggcagggaaaagaaaagagactggccgagcgagtccggccccgcgacaccggcacggcgcctattcgcccgctcgcgttcggtcggtccgtggcgtggtcctgaagccatcctcctcacaggctcgcaccgccttcgacttctctcatcctgcgcccagagctcctatgctccgccttcacctgacttgttcgtcgctcgctcccggcccgctggtttcctcaggccttgttccgtggctcaggcagcgcctgagctggtgaggctaggcaggactcaggagtgcccccgccccgcgaggctgttcgaagcgacccagctgccgggtggcggcggattcctggataaagttgattaatgtctgctgttttcttctggttggtaggacactccaacctgccaggcttccttgtggttataaggctttgttaacacacctgggaatgtttggttacgttgaggaagttgctcaatacaccacatcagggtcacagttcagcaggaatttgttcagcttttctgattggatggtttggttctgaaatattgttctgaatttatgtcatgctttagattgacgatatagtgaatgcaaactccggaccaacttgtcacaaggttgagtgatgaagaaatggcatggaggctttgtcattgtatctttgttcatcatcttgatgttaagatatgtgatattggataggctacttgcagaaaaatcgcttcagtatgttttccagcaaaacaggacggcagaattacattggttggatgttccaaacccacctgcaatccagaatccacagatttcttctgaagtaatatcaaccagactcttggcatccaacctttccattaccagaaatctctctgatacagaacttcaatctttacattcttggaatcatttgaaacaccttttaacgcatgcccatatcctaccagatggagtagaggcaatcaaggaagctggagttgcatggagggaactcaatacagcccttgcatatgatgattcagttgtttctgttaatggcagcattcagcagaaggacaaaggaaagcaatgcccttattctgtccgacggatgaatgccacaagattaggggataggtttgctttaaaacttccatgtggattgattcagggctcttcaataactattattggtactcctggtggtcttctggctaattttaagatagagttaactggagctgcagttcctggtgaaccagaccctccaattgtccttcattataatgtccgccttcttggtgataaactcacagaagatcctgtaatagtccaaaatacatggacgatagctgatgattggggttctgaaaaccgttgcccatctcctgattcagatgctaaggacagtgcaaaagtggatgatctagaaaagtgtagtagcatcgtaggtgaggaccagaaagaaatccttccctctaagttacattcacatgttttgaccatgccacctgcaaggaagaagaaagcagaatctagaaagtattttccattcaggcagggatatcttgctgtagcaattcttcgtatcggagcacatgggatccatatgactgtagatggcaaacatatcacttcgtttgcatttcgagaggatttggaaccagggtttgttggtgaagtaagaattgcaggagacattaaattgctatctgtgatagcaagtggcctgccaacaacagagtacttcgagcatgtcactgatctggaaattttgaaggctccacctgttgccatggataaatctgttgatcttttcattggggtcttctctacagcaaataatttcaagcgccgaatggcagttcgcagaacttggatgcagtatgatgctgtgcgctcaggaaaagttgcagttagattctttgttggcctgcacaaaaacgaggtggtcaatgaggaactctggaatgaagcacgaacatatggagacatccagttgatgccatttgtggattactatagcctgattctttggaagaccatagcgatctgcatttatgggacaaatgtcctgtcagccaagtatgtgatgaaaactgatgatgatgcttttgttcgagtagatgaaatactttcttccctcgaccgaaccaatatcagtcatgcactgttgtatggtcgtgtcaattctgattcccagcctcaccgagatccctatagcaagtggtacataacccctgaggtaacttgtgtaaaattatatatacttgagtaaaatactccaattgtccttaaacatgctctgtggtgtcatgtattgttcctaaactcttaaaatgcacatatgggtctcttaaaattgctaaaatgtgctacttaaagtccaaatcactctaatcagcacaaacttagtctatgtggcatatagaatggtacatggtaattttatattcacaatacatggtagcgactttggccatgagcatgtagtagagaacagggatatctcagatttcttgcaagaatgttattatcacatacatgattacaggttgattagggtgtttggacctcttgtggcacacttgaacaagtttatgaacctagatgtagattttaagagtttgtctacctaaatgccaccccagtacaagtttgatgaccaaaagtgcaatttgtttatatcaagagattctgcaaaatataatttctacatatgaaaaggctcttcctctagaacattgctctgccatgtgttttctctaatgttctatagatggtggattgagacgttgcacaagtgctcacttagacagctcaagttttgtataaaagtaacatttaggaggttaggggctcctgcatgaatgtatgcaaaacatataaagctggttaagcacctgcatactgtttcagaactaactagtgcttggttctgcttattaacacatattttttaaagcatattttgctgccttgttttcaataatttagttccggttttgtcattttgtgcggtggatcaagtgtggtaactaatgttttgcttgagttaggaatggcctgaggagaattatcctccatgggcgcatggtccaggatatattgtttcacaggacatagctaaagaagtttacaggaaacacaagaatggggaattaaagatgttcaagctggaggatgtcgcgatgggaatatggatcaatgagatgaagaaggatggcttggatgtcaagtatgagaatgatgggaggatcttggttgaaggatgcgaggatgggtatgtgattgctcactaccaagaaccaagggatatgatgtgcctctgggataagtttcagaaaacaaaacgaggaacatgttgcaaagaataacagagataatgcaaatgatgctttattttacggtggttgctgttggccgttgcttgaacagacaccgtcacgctaaaacgttcttgacatttgacatatacagcccctcctaagaggaatcttgcagaactggatggcaagcgaagttttgggtatcttaagtttgtttcgtcccagtttgaagagtttctagtcaaactaggggatatgcattgtaggcagaatgcaggtcacatcttttttttttgggtaggtaggagagtgctgctttgcttactgtgtggcttgtaaaatactagtatcttgccagaatgtaggatacatgggcggcagcttacgttaggatagattgagccagtctaccattcttttgaaaggaatgcattttgcatctgatgtaaagctatttttggtgaccattcattctcttgtataatccattctcaagaaatttcaaatcggtactgattaaagataggatcacatcacatccaagtttttacagttgctaagaaaacatgaagcataaaatgatcaagccagattcacaggtacggaagaaagttacactgccgtactctctgttccagtctgctgttttttacggagccaaacaaccgatgccgtagcgggtgttggggaacaagaggaagaggccgctgcacacggcgcccaccatgagcgggaagctctccatcacctcgtccatctccttgcggtggccggcgacgaggcacccggagacccggtagtcggcgagcgtgacggccgcaaagaccagcacggacatgacagcgtgcacgacgtcgacgaaggcgagccggtacctttcctccctgggcacctcgacgccgagcccggtcctgaacagcgacaggccccgcggcgtgacgaagccgtagtacaccttcccgtccggggcgcggaagctgtcggtgaagtggaagaggaagcaggaggcggcgcagagcgcgagcagggccctgagcatcgcggcgctgaccgccgagcaggtgccgtcgcctgcggcggccgggagtagcatctcgaaggttagcagcgtgcccgtggggaggaagttggccagcatggacgtcttggagagcgtcttctgcacgcccctcgccaccgcgcggcgcttccttcccgcgcccggcggcgagccgccgccgccgccgcgcacctcgacggacaccgcaccggcgttgctgcgatccatgggcgcgttcttgtccggagagcgtggaactgttttcgcgacgttcccagagactggaaatgcaaagctgttggtttgcttgctgatcggctgttctgtaatcgtaaatagatgcacggcgcacgcgtagtttggcgaacgttaggcagtgcttgagttcaaatgacgtgcaactgttgctacgcataactgttcc

SEQ ID NO: 32463 - DNA, 2532 bp, Zea Mays
gggcagctccacctactcgccacatatctcgctccgccttcttggggccgtgctgtcctgtacggtacgccgctccactggcttcaggcgtagcgacgcggaggccggccggttgtttgtttctccgttcctcgtcttcttttcgtttttttttctctccagcctcagcttcacttgagcaattgagaggagagctgtgtcgtgtgatttgtcggggggtgtgaattcggtttctggatcgagaaatttcctccacgaaactgcaattgcgcgtaggatgctctggatttgatacaactggaatgggatttatgtttctgaatttccagtcagagatgggcaagctgcaatgtcggtggctgggcgtttctccatctcctccttggcttttgccctttgctgcgactttctaactgaaaacgctgcttcggatgtctgcgtgtctatttatctgctctacactgcataaatgtgacgggcatttccgtgccccgtacttgcattgcatcatcatcattgcaccagttctgcggcaccactctgtccccttctccggccgccactgattctcctgcaaaccaaggacaggcttctagtcctcctcaatctgcatttgctcttggtccagtagctgttccaactgcgccgaccactccatcggcgagtccttccccggagaaagccgcggctgtaagtcctgctgctcccacggagccacgaattgccccggctccagtggctcctcctaaagagtatagtgcacctcctccagttgaggttgcacccactgatcccaccgatgaggttcctccaccagtagctccaccacaagctgcagttggaaatcccactccaattcttcctgggacacctgcattgctaccttatgttcaggctcctgctccatctgtcgttctcaagcctaatccaccagtcgtggtgtcacctccacctgcgaataatcaaccaatccctccttatccaccccctgcatcgccccctccggcaaatggcattccaccatacccaccttcaggaaggtttcctgctattcctcctgccacttcagtcccacctccagccacatcacctgttattgcacaagcaccacagcgacgagcagatcctccaagtagagattataagaacggaaacgcagtgccgccagcaaatacttaccctcctacaaatctcaagaagcatcatgttccacatgcatcccctccaaagggatccactggtcaaactgtcccaggtcacaaatcaccagttacaggatctgcgcctgcaacaagtcctttgccccagaacacaaacatgccttcaatcccgaagaatgcttcatcagtgccacatgcccatccctcaccaccaagtatagctccagaattggcacccactggtagatctcatgctcagggatggaaatccagtaatcccaataacaaaacaaatagattacatgccccatcttatccaccgcctcgtgctcaagggcccgaggtctcacgaaccccaagacagactgggactaaaaactatactcaccatgcgcctccaccattccctcaagaactgctggattccacaggaaatcatatttctcctactcttccttcaatccctcccctaccagagccaaaagcaccgtcagcgcatcctatttggacattacctccaccaccacctaattcagattgcaattccttatcatgcccagagcctctaacagatccacctgcgggagcaccatgtgcatgtgtgctaccaatcagagttggaattcgtctaagcgttgacctttactcattttttccattggtctctgattttgctgaagaggtagcttcaggggtaaacatggcacagaggcaggtccgtgtaatgggtgcgaacgttgcaggtgatcaacctgacaaaacaatggttcttgttgatctagttccagtgcaagtgaagttcgacaatgctacagcattttcagcatttgaaagcttgtggagcaaaaaagtttctttaaaaccatcagtctttgggaactatgagattctctatgttgtatatccagggcttcctccttcaccaccttcagggcaaggtgttggggatggggcgtttggcaacaacagaaatgcaagggccgtgaagccccttggggtcgatctctttgattcgtagcagaataacagtaacttttctccaatgaagtagtgccactgttgaaattcatcatgaacttgtagtctataagcaagttttttttatttggtatcctttccaaggaaaattccattgcttatttgaaatgccagccaacagtgcttgcaatgacttttcagttaaaaggctttcgtttcagtttctgcatcgtgttatgtgcccttgctagaataatatgcacagtttaggcagtactagttttcgttctgaccagtgttttaaaggtgtcgcctaggcgtccaggcgtctcagtcgcctagctaaatcagcaagagggcagaggggaagaggaaggggcggtgccgaatcggg

SEQ ID NO: 32464 - DNA, 1698 bp, Zea Mays
aattttcgggggccgtttcttggtttttcctctttctcctccctcctcctcctcctccttcctccttcctctcgctcgctcgctcccctcccttcccccgctccctctcctcctcctcccttcattcctacctccgctcgcgccactctcctccgaccgaggggcagggaacggtgcccacccgcccgcccgtccgaccgccatggtctcctggcggcgcagcgcgtcctggctgtcgtcggcgtcgcgctcctcgctcggcaccgccgtcggcggggaggccaaggtcacgccggaggcggatccggcggcgcagcacgacgaggccgacgaggagcgctggtcgcgcctgctgccggagctgctcacggagatcatgcgccgcgtcgacgccggcgccgagcgctggccgccgcgccgggacgtcgtggtctgcgcctgcgtgtgccgccggtggcgcgacgccgcggtctcggtcgtccgcccgccgctcgagtgcggcaggatcaccttcccgtcgtcgctcaagcagctacacatcctatcggtatctttgatttgaagctctaggaatgcaagagatgtcttgtgcgcccttttcttatgcggtttgactccatctcagcctggaccaagggatgcgccgatgcactgttttatccggagggacaaaaaaaattcaaccttttctctctatctcagcttaacgcaggccctaacggataaagggaagtttcttttggctgctcgaaggttcagacaaggagcacatacagaatatatcatctcttatgactatgatgatctgcacccaagaagcagttcatatgttggaaagttgagatctgacttcttggggacaaagttcatcatctatgatagccaggcgccatatgacggtgccaaaccttcgaggacccgatccactcgccgctttgcaagcaagcagataagcccacaggtttcaggcggcaatttcgaagttggacaagtgacctacaggttcaacttcatgaaatcaagagggccgagacggatgcagtgcaatatccagtgccctgtaggccagggcagcgcttcggatccgtccaaggagaaaacaccctcgccgagttccttggacctgaagaacaaggctccaagatggcacgaccatcttcagtgttggtgcttaaatttccacggtcgggtgaccgtcgcctccgtgaagaacttccagctcgtcgccacagctggctccggcggtccatggggcgtcggagacgaggagacggtgatcctgcagttcgggaagatcgaggacgatgcgtttacgatggactaccggcagcctctgtccgccttccaggcgttcgccatctgcctgaccagctttggcacgaagctggcctgtgaataaatggttgccggtttaccaactatgttggggatcagattgtagggggtagtctgaactagttgccctgagcacctcagatgggagaaaactggcgataagaaacagggcggacgttgtccctataagctttgactccttgtaatcgcctaaatgattgatttatatatatatgatgtgcgcctatgttgttgaagagatgacgatgacttatagttgtaaatggcactccctttcgtttggtgacattcactcatcactcataatgcctcattccgttgtaatgtgctgttgaacttccc

SEQ ID NO: 32465 - DNA, 1035 bp, Zea Mays
ggacatcctgcgagcacccaggcttcacaatgctcttcacctgcaccacagagcaaaacagattaggcatggcgaaggcaaaactcgtcagtcagttgcggcctcgtgtgagtttgaagcaaaaatgcgtagcgggggcatcagaactaccttctccagacatggacactccttgggcaaattttacattcccagttctagatcagaaaagcatccaaccagcaggtgcaacatcagttcttgctaagcaggcggcatctcctgatcaacattctcttcccaccaagtagcattctacagcacagaaaattgattattgtaactcgtattgtctctatgatgtgctataatgaaatgtagtttatgcaagcaggcgctttgacattctcttcccaccaagtagcattctgcagcacagaaaattgattattgtaactcgtactgtctctatgatgtgctataatgaaatgtagtttatgcaagcaggcactttgaagctgcaaccggctgtttagctaggataagatgagccatgtatcctcttctaagaaattcaaggcagcttccttgttcttcttgtaaaccaataactctcgattcacctctaactgaataagcccgtacatggactacatcatggattggatagaaacccagctggacgacgaagccattttccctcaacggcttggggctgctttccctcccaacttccacgacgttgtcaagacggtcctgaagcgcctcttcggggtgtacgcgcacatctaccactcccacttccatatgatcgtcaagctcaaggaagaggtgcatctcaacatttgcttcaagcactttgtgctcttcacgctggaattcaagctgatcgagagcgcagagctggctcctctcagtgagctgtcagtactaaactgcccatacagctccgagctgcacaacaacaaagacgaccaacaatcggacacattcgttgttcgacaccctcgacgggacgaaaggagtgggacgtctgcacaattaaacctcttatag

SEQ ID NO: 32466 - DNA, 6475 bp, Zea Mays
caacaatatcaaacacaacttgttcagtccttgtattgttgataaatccgaaagttattggcatcgtgatcttgccgagtgctacaatctgccttcctccgaagccacaaaggggatgtgtagcatcatggatcttatcttcgggctcttgcatctgtctgaaggccttagcaaatataatatccgctgcactgcctgtgtcaaccaaaacgttgtggaccagaaatcctttgataacacaagaaataaccatagcatcgttgtgagggtaatccttgagctgaaggtcctcttgggagaaggtaattgggatgtgggaccatcttgacttgatgaagggtccttgcaccccgatatgatgtacccttctctgtgcctccttcttctgcttcttgttggctggctctgagcatgaatcgcctgttatcgggagtatcagcttcggagccgaaacaactctggcttggttgttgaacgaagccatcagctcaaaaaagtggaagtgagttcaccggaggtgggcaccaatgttggggacttgttctcaaatgcttcgtctctgacagaaaatgattccagtgtaatgcgttagcaattacaggatagcgtgaacagtgccggggtaatgttcacctatttataggcacagggtgcaacctgcgtaaaattacatttaagtcctttacaattgactacaataatgacacaaacatcatgggtctttaagtcaatccatctttaagtcggttcagcccttcgtcttaagatctatcattgtgccgaagctctctaagtaatagcttcggcgcttgctcctgagagtgtctgccgaaggtgttctctttctttaggatcttcggctatgaagcatacccccaacaattatgattggagattcactatcaaccgggcaaggtgaatctggttgcggatgccttgagtcgaaaggaacatgtccattcagctattgttgcacagctacccgatgagattgttgaggatttcaggagacacaacctgggaattgttgcacacactgaaggagttactattgaagtggaacctaccttggagcagaaatccgcaaaggacagatcggtgatgctaaaatccaagagatcaaagatctgattactaaaaggtagaggtccagaattcacggaggatgagcaaggcacagtatggttcaaggaccggatatgtgttcctgagatagacagcctttgtgaggctatattgaaggaagcccatgaatctgattattctattcatcctggtagcactaagatgtatcaggatttgaagcaaaagtactggtggtatggattgaagtgagatgtgactgcacatgtggctatgtgtgatgtgtgtcaaagagtcaaagcttaacatcaaagaccagctggactattgcacccgttaaagatacccgaatggaagtgggaagagattggtatggatttcattgtcgggttgcctcgcaccctgaaaggatatgattccatatgggtgattgtggatagactaaccaaagtggctcatttcattccggtcaagactacttataaaggttctcagttggcagaattatatatggctcgaattgtgtgtctacacggagtaccgaagaagatcgtttcggatagaggttcacagtttacctctagattttggaaaagctttcatgagaataaggatacgaagttgaactttagttcggcctatcaccctcaacctgatggccagactgaaaggactaatcaagtactagaagatatgttgacagcttgtgcccttcaacatggaggcagttgtgacaagagtctaccatatgctgagttctcatataataatagttaccaagccagtctgaagatgtcaccatttaaagctttatatggcaggaagtgctaggcctaaatttattcaagaggtagaagaacaagtccgtataatccaggagaacttgagggtagctcagaccaggcaaaagagctatgctgataatcgaagaagaccactggagtttgaggaaggtgataatgtgtacctcaaggtgtcaccacttcgtggaatgaggagattcaaagttaaaggaaaattatcccctctctttattggacccttcaaaatttttaggcgagttggggagatggcataccaactcgagctacctgatcatctatcagatgtgcatgatgtattccatgtgtctcaacttaagaagtgcctccgtgtccctgaggaatagctaccaatggaagaactcaatgttcagggtgatttgacttatacagaatatcatattaagataattgatactttgactcgagttagaagaaataaagtgataaagatgtgcaaagtacaatggagtcaccatggagaagatgaagctacttgggagagagaagaagagcttcgaatagaatttccccatcttttccctagtccttcctaaatatcgaggacgagattcttgttaaggggggtaggatttgtaatacccaaaagtgtaaacaatgaaatagagttgatctccctaattgtatgacttctatttattatcacatgttaacactcatgtctaaaagtaaacaaatcaacaaaaggcacattactaatttatgcatcatgttggcttttgtttgtatgtgcatctagtaaaaatagtaatcacattaatggaaataaattaatgtcccaaattgtggatctaatacctattttgaatatttaggaatgggaaataacaaggaaggtaggagaaagaaaatattatacaaaaaatagacaaatatatccttcttacactaggatttgaatttgaatatttagctcaactgagagactcatgacaaaatgtaaactcaaatttgaaatcaagaaaatgaaaagggaaaagaaatcagaaattctaaaataaaaagaaaaggaaggaattggctacttgggccggaggaaaccgatttggcccacttcgctcactcgtctgcgtggcccgatttctcccaccgcgcgcgctcgttcatccggcagtgggacccagaggtcagtctcatatcctcacaacactgtgcatgggacccacttgtcatcacgccacaacaggtgctaaccaacccgcgcgcatggcgggcggatcctggagctcggctccatccttccctcgccctacataaaccaacagttgccgcacccacgatcccttcgtcagatccactacctacagctagccaagatcgacagagggtgagaagaagacatagagagagaagagggccgccgccggttatcttcatatgtgccgacgtcccggcctcggtttgtggccgacgacgtgcgccagtgtccggggaagccgaccgagtcctcgaggcgggccctgcgtcttcacggcgcgagaaatttctcgtcagacggcaaggaaagcaccgcgccgcacgtcatcgcggactgcttcaccttcatcagcattttgggtgagaacctcgcctctgatttcgctttggactccgcgtcacgtaggttaaattaattgagatttgggccatagaatcgtcgattcttagttcgccggtgggagggctccgccgtgtgctcatgtccgtcgccctgctccggctggagaagggtaaaacctacgcgggtcattggattcgcatctgatggcttagattagaatgtagataacgcttgggcacataagatcttggccgcccatctagatcgaatgactggtattagatcatggtgtgggggagtcccctgccatggatttttgatccaacaaccaagatttcataccggttcgcgtaagtatcggttctaatctcgattgtccggtggagatccaacggacagattgcccacgtaccctttcggcgaggaatttcgctaaagagccatcggggaaaatgaaaatcaacccgcagtactgcgtatagtgttctgagtcttggaactatttgcgcagagacccacccgagcttctgtattttatgtgcgcagtccagagaacagttaaattagatgaataaatatggaaagtgatttttaatgtaaaaataatcattaaaacttgtttaatccctagaaaattcatactaattccaaattgatccattcgagtttctataatttttaataatgttgtctatcacaaagagtctctgttttgacatgaaaactatattaaaattaatctcctaattaatcttgtacctagcacatagaatctttttaaattcataacttaaaatccataactctaaaattaatgtttcctgttcctatgatcttattttaatatgtagattattaatatgtattttgtatacatgtttggtgtgatgttaatttctcctttataccatgcttgtttgtattgtggcgagtagaagagccagtggctgaggatcccggtgttcaactggtagaagttgctaagcaggagctcattgaaggcaagttgtgcccttgaccacttttattacccaataattgtgacaccccggtgtatatttcgcgttatgtcgggagatttatcctaatctcggatgctcagtgaaaatttctatttctcgctcgcgtatgtctctgattatccagattattcattcacattttaccgaattcgtagttattcagtctcacagaaggccgaatttggagcctgttaaaacttttatttctcggcatgaatgcgaacttgataatccatctcgatttataaatgtcgtctaaagctcatttaatcaagcgctcgacagttgctagttgagctgtgtccgaatccaatttcttgatgattcgatctatatccgaaaattaatctgagtctgtatcctcaagtggaatctccaatgcgttgtcctcaaataaattcttatccggctcgacttaatacctctgtgtccgatccgatttcaaaaatcaacatcggcgatgatttttagatgtcgcgatttgtctctttcaatcataaatccgaaagccggtcatatctcaagacgatttattttcgaaccatgcgtagggaattattttcgagcgaaatcaaatcatactcttggccgagtttatcgcccgatcttctgaaatctatttcgctttgttctctgtagagacgaattccgcaggaacatttttattccagaaaatatttagcgcagcccaattacgtgttttgggccaagcccagcccagcccagcccatttggcccactagaaaaccctaaccctagtgcccctctataaatatgaatccctctcccttgcacttggctattttccattcccacccctccattttttcagccgccacaacctttcctccctgtcttcttctcccacgcgcagcagcaaggcgcccctttcttcctccctgctccacggcagcaagcatggagcttggctcctctctccatggcgcacctcatccctttcctctgcacggcgcccttcctttcctttcctgtccaaggcgtggacaccccttctcccatggccgagcagcagctctgcatgcccctcccatggcgagcaggccctcttcttcttccatgggcgcgggcctccacctccttgcttggacgctggccaagctcccttggagcaggcgctctccagccatggtgcgacctccattatttccagggccgccgagctctttcccatggcgtcccttccctccagcgccccctgctccacgaccagcactagcgagcggcctcaccaaccttgccatggcgctgctcgtcgaggatcccctgcaaggtgccatcgtggcctcgccgggcccctgctcgccagcgagctcatgttgctcatggtgtctttccctgcctgctcgctgtccccaacgaccaacagcaaggactccatttcctccatagcgtaggcccccttcctccctttgttcctcccggcttgcgtgctgccgcgcggtgcactgttggtgcttgctatgtgctcgacgaaatgcgcagcaagccacacgtcgtcgatttcctgcagtagccccgccccttgccttttgtcgtcgtcgagcttcgccactctcctccccatgaccagcagccctcacccactctgccctcccccgaaacagcaagcccacagtagccccggattccctccgtgtcgcttgcatcgacccgatctgcgcagtcccgacgcatgttgtcaaactccgccaccgtcaatgcttcacctcgcgcttgcgtgctcgacggatcgcagtagcgagccacgcccttcacttcgtttcggtctcccgtgcgcgacaacgcgttcgtcttcacaccacatgtgcagcaaccacgactgaggtttgatatggaccaagagatgatgatcgtgcacgtgatgtggtgccaaccacaagatgcagttggtggacgacctgaagaatgatggacttaacaagtggatgctcgccaagcgagtgccagcccagcaaacactatctaag

SEQ ID NO: 32467 - DNA, 3466 bp, Zea Mays
cactccaccttttccttccccgccggccgccgcgcagcgcgagcggagtcgccctctccagtagagtaggagtgacgtctctacctatccacctcagccccctcttttcattccccacccgcgccgcgcgagcggagtttcgcagcacgctgcggctcgcttcgccagaattcctggcgagggtacagaattccgcatcgaaacggaagggttccgctcaccgagaaaattggcctcaatcgcgcgtccgtcctcagcgtcgtgcgttcggatgccaaggagggaacaacaactggggtttcagcaaaggattggacaaacacaatattggcacttgtgtctcctaattccaaaccggaggacttcaaccgcccaggtcatatttttcctcttaaatacagagaaggtggtgtgttaaaaagggctggacatactgaagcatcggtggaccttgctatgttagctgggttacctccttttgcagttctttgtgaaattgttgatgatgatgatggctccatggctttgttaccaaaactgcaacaatttgcaaagagggagaacctgaagataatatcaattgcagacctgataagcgaggggggcaccgacacgaagccacgagatggtttggagagaaacagttgaagcatctcccgcggaggttcacactggtccctctccgcgccgaagcacaacgagactgctttctgctcttcaccacctgccagccatcctcctgaagaccccagggtgatgttggggatggacaagagatcttagtacgagtgcattcggagtgcctaactggggacatatttggatcagcgagatgcgattatgggaattaacttgctctggcaatgaccatgattgagaaaactggccggggtgtagtagtctatcttcgtggccatgagggtaggggtattgggctgggtcacaagcttcaagcatacaacttacaagatgatgggcgcgatactgtcgaggcaaacttggagctagggctgcctgctgactcgcgggagtacggtataggtgcacagatattacgccatcttggtgccaggaccatgcggctgatgactaacaaccctgccaagtacactggactcaagggctatggtttaagtgtccttggtagagtgccattgctaacaccgataaccaccgagaataggcgctatatggaaacaaagcgattgaagatggggcatgtttatggaagccgctccagtaatcatgcaaacggcagtggcttggctggtgctggcgagagagaggagcaggatcagaatgacagtgctggcgtgcaagagcgaactccagaagcttgagtgcctaactctgcgttccttagagctgctccaatgggagtcttaaaaagagatgcatcttaaaatatagggctccatggcaaaaaaatcactccaacggggacctcattttacaaaaactcaggaaacaaatttgggctccggtctcattggtcccaaatgtaggacttgaaactatcggccctattctcgttcccacgcccccacgaccttcggtcttttcctgttgcattcgttctcaagccgtctctcccacaaaccaaaccctctgcctgtcgagaagcattggcgagatggatggacggccaccgccttttcctcgttcacggccaacaggttggcctcgttgaacttccatggagatggcactagatgtgatagggagatcatcagctgtgtcttctccgccagatttgcgcaggcctcctgtggccgtggctgcagagcgaaggcctgcaagtatgtctgcaacttcccaacagacacaaggacaagcgtcttggcatcgaatcgctgcagaccatgccgatcggagtttatcagtggcaccgatgatgtatcaagatccattgtcaatgattgatgactataggtaataacctttctgttgagattagtagtcgattatatttgctcatgaattcaatcgatggtgatctgggatctccatggttgagaaattgaagtcaaggcctggtgaggttacttgtactggtaggtgctgatagatgtagtgctcaccgatgcttgtgaattgaattattggttctgaaaatatcctcacttcaaccatgcatacgagattatgagtaaatgtgaattccatacactctgttgccccagtccaatacaaccttgctgaaccttgcatatttgtgtgagcaggtacatttttgggagtctctttaatgtttttcttgtttggtctcataattagtggagtacttcaacttatgtgcattattatatcaatttgattaccaaactttattgtgtatagcgtcaaagctgttttgaatgtcttgtgtttgtgtatatttcattctaattccataaccagagtctgctcatatttttacactactctattgaaccaagaacctgaagatgtatttgcctgccaagaaaatatggagagcgaaaatgaggtcatggagtcaccaccattgaatgattcaaattcacagtcaaaaccaaagggtcgatccaagaattttaatgaagctgaagacattttgttgatgtcagcttatcttaacatacgtaaagatgcaattactggaagggatcaataagaaggcaacttttgggaaagagttgagaagtactttaacgttaacaggacatttgagtcagatcgtaactggtcatcgttgaagcatcggtggggtataattcacaaataagttagtagtttccaaggtttccatgacagtatcgaaaggaaaaatgaaagtgggaagacaagtgatgataagctggctgaagcaaatgtaatgttccatcaatttaaaaataaggccttttctttgttccatgcgtggaacattctcagacatgagccaaagtgggctgaagataaaacatctaatgaagggaatgcaaatggggacagtcatcccaatgctcaaagacctgcaggaaggaaagctgaaaaggaaaagatgaaagcaaaaaggcgcaacagtgatgaagagtctgatcctttcattgaagaggtaaaaaaatttgagagaatcgagagagaaaactgagagcgaacgaaaggagcgtgatgaaagatactttgagctgcataagaaaaaagtagacttggagcaagaccagcatgacaagttgataatggcacttgagtcttgacacgagcacaatggatgaccaaggaaaacagtattttcagttgatgaaagaagatattttagctcgacgctttgggagtaggcagccatagttatttagtttttaatactttagacttttttccattcaaaacagattatcttgatgttcatgtaatgtaagaacatattttcattcaaagcagattatcttgatgtttgcaacaatctgtgttgacattgttttctggttactgtaaaagttgagttgaaattttgcttctgaaa

SEQ ID NO: 32468 - DNA, 3231 bp, Zea Mays
ccgccgtcccgtgcgccattgccaagtcgaggcacgcggccagtggtgccctcgtcatcgtcaatgagcaccgacgccgcgcccctcctccactccacctgcacagcgccgctcgcccccacaccccaacccaaccatccgctccttgtcgccttccgacgctgagtttgctggtgtcgatttgcgccgtcggatgctcgatctggcagccgcctgtgccgacctactcgtcgaatccgttatctaacgtaatggatgggcaaggcacaaagcacaggattttgatggtgtctgactttttctttccaaactttggtggggtggaaagccatatctactacctgtcacaatgtctacttaagcttggccataaggttgttgtcatgacacatgcatatggaaacagatctggagtacgatatgtcacaaatggtttaaaggtctattatgtaccatggaggccattcctgatgcagaatacacttcctacactattcttgacgtttccaatttttactcttgcagatattgatcaggcaatatgtgtctcacatacaagcaaagagaacactgtcttgaggtctgggatatctccagagaaggttttcatggttcctaatgcagttgacactgcaatgtttactccctctcccaagcgcttaaactgtgatgaaatagttattgttgtggtcagtagattagtataccgaaaaggcgccgaccttcttgttgaagtcattccagaagtgtgtcggctatttccaaaggttcgctttattgttggtggtgatggtccaaaacgtgtgcgccttgaagaaatgagggagaagttctcccttcaggatagagttgagatgttaggagctgtacctcatgctcaggtgcgatcggttctgatatctggacatatatttttgaacagttcactcacagaggcattttgcatagccattctagaagcagctagctgtggactgttgacagtgagcactagagtcggtggtgtccctgaggttcttccagatgacatgatagtacttgcagaaccagctcctggagatatggtaagagctgtcaagaaagccatcgacatgctacctggaatagacccccagattatgcatcttcggatgaaagaactttatagttgggacgatgttgccaaaagaactgagattgtttatgatcgtgcaatggaatctccaacaacaaatttactagatcgccttcctcggtatcttacttgtggatcttgggctggaaaactgttttgcctagttatgatcatcaattacctactatggcgccttttagaatttctacagcctgctgtaggtattgaagaagtcccagatatagggccactacatgctcatttaggttcaaggaatgatgaggctcaagagaagtgaaacttaaatctttgacagttttgaaatggttggggacttgaggtggcagtcatggtatcttctgcttgtcagcattcgttctgatccacatgcagtatatgcctttatgatatggcccccgcacagcattttctcttgaagcttcccgtctccgtagtcgcagctgaaagagagtggaacgccttgatttgtaggatttcttgtcatgctggttaaagctatggtccgagtctctgtcattgccagcttcttttttttttcttcctctgcgtaatgcgtagtgagtggatggcctgcgttttaggcacgtcatcaaaccaattatctgctggaacgttggtactctcttgccaccatattgcaactagaagtcttgattggcatgttgccacacaaattcctactatgtttgatgtcttgtatcatgtcggagcaccaattcctgctgtgtttgtgatgtaataatgccaattccaaccagcgacgtgagaccaatctgcatggatccagtcgataatactttttgaatataaaataagtgcaatctcttttcggcactgtttggaattcaagactggccattcgctttgtaagaaactgcgggtttgctgaaattctcctccactttcccaagcaaagaacaaagaaccgcccttgttctctgcgactctgcccggccggtctccgaggcgggcggagggaaccagagagcaaggcgaggagcgcggaagggctgagggaaggggcggcggggcatggctcgccggccggcgtcgtgggagcagggcggcgacgagtacgactatctcttcaaggtcgtgctcatcggcgactctggcgtggggaagtccaacctgctctcccgcttcaccaagaacaccttcgccctcgactccaagtccaccatcggcgttgagttcgccacgcgcacactccaggtggagaacaagattataaaagctcaaatctgggacactgctgggcaggagaggtaccgagcaattacaagtgcttactatcgaggagctgtcggggcgttgctagtctacgatgtcactaaagtaatgacatttgagaatgtgaagaggtggttgaaggagctccgggaccatgctgactcgaacatagtcgtaatgctcattggcaacaagactgaccttaggcacctgcgctctgtcgccgttgaggatgctgcaagctttgcagagagcgaaggtttgttcttcatcgagacctctgcgctcgatgcgacaaacgtcgagaaggccttccacaccgttctagccgagatctaccggataatcagcaagaagcccctgtcttcggaggagtctggtttggggtccggtaacctcagagagggacagtccatccaagtgtcagccacaaattctggcgcccttacgtcgcggtgctgctcttcttagagccacgcccaccaggatcatctgaagaacaacagttcgtcaagaaggtcctctcttccgagtcgaaatatttactcccctttgtgtgaacaataagcgtagatttaaagaatgtcagactcagacgctgactatatatacttgacctgcatagtcatgttccgtcgagaggtgctgtgggagaaaagttgtattgctctcgagcatagaagaaggctgtgtgtatcagaccccagcaaagctgcttgctattaaccgtggcagggtagtctctgtgattttgcagctataattttgttgggggttagttactatgactgcggagggtgtcgtggcttgtggcaacttgattcccgacgtattatagaatcctctttgctatccgtttggca

SEQ ID NO: 32469 - DNA, 840 bp, Zea Mays
tttatgcatgcatgcgtggcacaaatttctttgctctcctaagtgggatttgagatcgtgcgaagctaagcttttcatcaagatggcacttgttgttatctatggatctatctaccccatacttccatggacaccggctgctacaactgatgccaagtactgctgcatatatgctgcttgagctagatgctgctgcttcacacctgcttctgctagctgttccctcattaaccaaaagaaatgagaagtctccaaatttcttaagggcgtagctgctgccaaggttccccgttcaacgcttgcagccacatccctctgccagccaggcggtggtggggagggagactgggatggagcatgtgccgaagtggctgcgtgcgttcccggatctgcacacctatgtcagcatgtaggtgtgggttgagccgttggtgactaatgacatgatggacaaggtggagcaggtgcgacaacggaggaagtcgagaagtccctactcagcttgcaatgaaggttggctatggcagcgcggaagaattaaaaaataatggttgtcaggagacatatgagagccctagaaaagtggaagctaaaattgagaagatgaaatatgaacatctgacgagggaggctgctttggcaaagaaggagcttcttgaagaggagtacaagaaaaagtttgatgaggcaaagaaggaactatctctcgagaatgatctagcaggcattggtctagagagtgatctttacgccaaggcaatccccaaaacaatccccaactcaagaaatccaggattcttccaaaatccaaaggataggggaggaaacgagaatggataa

SEQ ID NO: 32470 - DNA, 3506 bp, Zea Mays
cttccctcttgtgtgattcagaatctgggattcatcatccgctggtacatcccgttgcgcgtttgccttcgactagggcaaaatttagggagcaatggattatcggtgattgctatttggactttggagatggggcagggttgaaccttgtgaagacttttgttactttccggggtcatatgctagttctggtggcagctgggcataggaaagtaggaaggcacaaacaaggaggggaggacaattatttgtgtttcttaattttagttatttggaccggcgtttattctagggctatccaatttgcagttcgtaaaatgtagtgggacaaatctttcaattctacgatattttggatttcagggattgtactattgcatctgtagagggtcatccttgtgaaacttgcgatttattcattgattgccagaacaagatcagtttttttttcagcactgaccaagtgaccatgcatttgagtgccctgttgcgaagtgcctatatgttagggatagggaatgacaacggcagtgctgttttccatgataaattaggatgctgaagcttcaaattagcagtgaacaatgtcaaatggattatgtaattctgtccagggattgagatgttgtttttaatgactatgcacatggtttacttttaatgctaagatacatgaaatttgatagtgacatatattaacaagaaaaccattgggggtccaatggtccatcattcgtagcaaatcaacctatctataccactttagattttatatcctcattttttgtgtctcttgttgggtctcatatgtaggctgtagcctaccccaacttgcttgggaatggaaggctttcttgttgctgataaaaaaacaatgttcatcttatagcctacttatatttgtttcatataattatttattaaacattcagggatcaatggccatttgagaaagtgccttgtgatgctttggggctaagagaactatacatccatagacacactgaaatacatcagatgaaatttggtgaccccatatcagctctttattacttagatcctgcgggaacaacaccaagtcatgtaatgatggataggaactccatctggttttgtcaaggtccagcagccaaaaaactgaatattgatttgccagaaactgaaattgtagaaacacacaggaaccatagtgcaaggatcacttgtctgaggctatttcctctgattgatacgccactgtttcgaagtgatacacaaaaaaatgaaaaagcattagtcacttcaagcacagacagaacaatccgtctttgttggaagggctactcacgctgttacaagggccattcagcgcctgtgactgctctggctgacagattgcttatggatggtgaatctaaactacttgcaagtggaggggaagactgcaccattcgtctatggtctatgagtacgagggcgaaaaatcacccactaatagcaacatttcatgggcatgaaaaggcactgtcatttttatctgttgcgtggcataaatcgtccctgttggtgagctgttccaaagactcaaaggttaaagtttgggacacagtgtctccttcgagtggttcatcatcatgtgtaggcagtgctcacctcaactcaaacgggccaccaattgctatgaaatgccatgaatccctttgctatatcgctgctggagctgaagtgacagcgattgacttgaggacaatgaagaaggcttctgtccttgcactccagaaccacagaatactttcttgtgagatgatgccttctgaatggttaatatgtactggcacgaaagacagggctcttctatgggacatccgcaaggctcaggagctcccaaacacagtggcggagatgcaatcgagcggcccggtgacattgcttcacttggaccaatacaaggtggtgaccggagtgccgtcggacggccaggtccacgtctgggaaacacggacggggcactcgctgaacacgttgggctgtggcgaaccttcgagactgggtgtgcggagcagggtgtcggccatggccgtggacgggtgcaggatcgccatggcgggcagctctccggaaggctgcatgctgcactaccgtgacttcgcgacggcttctgcccctgtagtgtccttgccaggcaaggagaaggaggtctccaggttctggaggccccaggaattcgacgacagcgaggaagaggagtattgattaatcattacatccccagttccaaattataagtcactttgacttttttttacgtaaattttgccatgcatagtaaaattgatgtaccaaaaaaagagtcaaagctacatagtttggaactgaattagtattacgctatctcggtgagcttccagttctgctacatgcagacaagagaaaagcttgtatatataaaaagaaagaaaggtatgtcaactgggcctgggtgcgcggcgtgattgcatcatgcatcccacagctgcagcctgcaggatactacagaatgctagaggtagaagtgataccagaggttgcattaccatgggcgccgcatgtgttggtcgctataccgctgttgcttgtgttgtttgtgtcgcctttggacttggtgaggataatgccgatgctacgggcaattaatgcgcctatgctttgctgtttgttttatgcctgcagctccaaagcttcgtggaacaaccagacaaggtgatggtcacagaccttttctccattggaatcctgtggggacgagcgagcactcacggtcacggccatgggcacggggggatcctgggttctgcatggcacgtacatgacaaaataggcaagcaacaagaaggcaggaaggaccccagctgcccagcagcccaccctgcaggttttccacagctgtttggcctggctgcccagcccacaggaatgcctgatgcgatggttcctctgcctctccggccggcaggcggcagcagcttataaaacttgagaggggactcaattttcattggtttgtgtacaccggcggcggcaacagagtggagtaggacgacgacgacaacacgaaagcgaagagggagcaggctgtgccttactatataacaacatgcatgcatgggcgctttgtcatgtatgtatatagcagttgaaatctgattagaattctgggatgcaaaagttccagatgatcaataactatttttgaacgtaaggaaatttagaaggtatttgaatacagtagagataatagttagttagctaaaaatatactagtagaattagctagctaataactagttagctaactagtagctaatttactaagaataactaatagttgggtgtttggatatctctagttaattttagccactaactattatctctagtgcattcaaacaccccctagatagtggtattaggccgaaccatagatcacgtatagctgtaaattaaaagacgccatcgattaccggctatttgattcctgagcgtgtgca

SEQ ID NO: 32471 - DNA, 299 bp, Zea Mays
cgcatgctcgcgtttgccgtcaagccgttgaacccgttttcccctgctcgacctcgtcttcgcccttctggtggtcgtcgtcattatggtgctggactacgctccatcatctagtcgcactggctattgactttgttggtcctttccatgttaaaccagcaagctctgccatcgttactcagctgctcgccccgcgtgtgctcgtcaattttcttggtcgtgtctgtcgagctgaccaacgctccagctcgccgttatcgccaagtcccacgcagccgtgttgttctctcgtcgtcgtc

SEQ ID NO: 32472 - DNA, 1806 bp, Zea Mays
cctccacctccgccgcgttgtccctcccgctgccggctccctcgacacctctccccgcccccatatcctgcgccagcgctgctcatcccgctagcacacgccactgtggatctagatccgacactggctgtgcgggattagtcggcgtgcgtgcttagcagcgtctgccgatggatggagaatggtggaatcgagaaggccggtgtcacccacaagatcgacatcagcgatggccccgtgctcccagtcccgtccgcctcgaatccattcgtttgcctgcacaggagaagaaccacgcgtcgttcgacttcatcttcatggacgccgacaaggacaactaccccgagcgactgctcaagctggtgaggccgggtggcctcatcggctacgacaacatgctgtggaacggctccatcgtgctcctggacgacgcgcccatgcgcaagtacatccgcttctaccgcgacttcgtgctcgccctcaacatggcgctcgccgccgacgagcgcgccgagatctgccagctccctcgttcatgtggtgctgtgtatcggaagaaaatgcgacatcaaacttcgccgccatcgacgcaagcttgggagatgcgacgggggaaggtgtggcggcgcgggggcttgcgacgagaggcgcgcgcgcggcgagctcggccgtggcactgggcttcagcggggaggcggagaagccccgcgaggagggcaagctgatgttgagttcggcggacgaggggcccggcgacgacgacgcagttgaagagccgactccacggacggtgcaattgcggatacttggaggtatttgggctgataggattggtgatctaggatgcaagtcgttgtaaaagaataagaactatggaaagccatcgcatgcgtgtaggtgctcttgcatggagttctttgctttcttctagaagccgtgataggagcatcctccaccatgatatccgtgctcaagaagattatgttagcaagcttaccgggcacaaatctgaggactatggcgcatcacagtgtatgtctgcaattgctggctcctatggctatattgctccagattgctatcttgtggatttacaggaatgcatatacccctaaggtcaatgagaagagcatgtctacacctttggtgtcgtgcttcttgagctggtcaccggaaagaagccagtaggtgagttttgggacggcgtcaacattgtccatcgggtcaagtcgatgacaaacacaaacaaggagcaggtgatcaagatcattggccctaggctgtcgaccgtgcacacaaggtcatgcatgtattctgtgttgcacttctctgcgtcaaggagcagagcgtgcaacagcctatgatgcggaagatggtgcagatgctcaacgaacttcccaatccagctgcaggcaaggagatgaggttcccgacggcgacgatttttccactacacaatcggattcttcagcagcagatggatctattgaagcgtcgtgtgacgaagtcaccaaagagcagcagcaaacgagatctttgctatgtttccttctccttgctaaccactgatctcatcaagcttggtttttctcattgctatgtttccctctcctggtgatgttaagatatttggacatttctagcttattagggccttgtgtggaacatgtttgaacaattatctcatttaaacaatgtcaacatgtgtgatatatagaaaccgtagcaacgcacgggcacctaattagtagagttttaaattccaaaacttgtaaaatccataacttttgcatagagactccaact

SEQ ID NO: 32473 - DNA, 3499 bp, Zea Mays
ccagcgtgcacccgaccaagcgaacaggaagcgccgcctctgccgaccgggccaggggcctccttccgcaggccgcagcacacttccccgctccgctgacccggccagccacaacccacaaatggaagcgggctccttccccagcaagttcccgccaattcccgcgggcgacaaaacctagtatcctaccaaatctccgccccaaaatcccccaaaccacccttccaatccccagtcctaatcactccacccactcggccgcttctcctttcctcccgcgccaccgccttcgcgccgccatgacgcgccgaggatccagtagcggccgccggcgccgccgcgaccaggaggatgaggacgacctcccctctgacgacacctccgacaccgatttcgtcgccgactccggggacgcggtggagaacgacgacagcgacgaggagttcgcgcccgataaggacaccccgcccgcgcccgcggtgcccgaggcggccctgccgccgccggtgccgatccggattaagaatcaggcgcggaacaggagggagaagaggaggcgaggtaagaaggcgaggagggacgcgccgcccctgccatgggaagagtggcaggtggcaaacgacagttggctcgacgagcggaacgcagccgacgggggcgtcgaggccacggacgccacggtggcggccgtgccgaccgcggacccggccccggaggtggtgctccgattgctgcgtttccagaaggagtggctcgcttgggcgctcgcgcaggaggcgtccgtcacgcggggcggcatcctcgccgacgagatggggatggggaagaccatccaggctatctcgctcgtcctaaccgcgcgccgcctccggcccccggaccatcactccgccgcctcctcgtccaactcctcggtgggccgcaccaagccccaggtcgggtgcacgctggtcgtctgccctgtggtggccgtcatccagtggactgaggagatcgaacgccacactgctagtggcagcgtgcgcgtgctcatctaccacggtgccaagcgtgtcactcagagtttcgatttcaacagctatgactttgttatcaccacctactctaccattgaggcggactaccggaagcacatcatgccgcccaagactcggtgccaatactgcaataaattgttctaccccaacaagatgaaggtgcacttgatgtatcactgtgggcctaatgctaaacgcacagaagctcaggctaagcagcagagcaagaggaagtgggacagcagcaaggaaaaggtgaaggagaagaggagggttcataagaagggtgatgaggtgaataaggattttcaagagttggctgatgaactgggcagacagttaaggggccaatctcctctgcattctgtgcggtgggagcgtgttatcctggatgaggctcacttcataaaagatagacgatgtaatactgcacgggctgtttttgcattggagtcagaatgcaagtgggctctgagtggaacacctttgcagaaccgtgttggagaactttactctcttattcggtttttgcaaatcttcccctactcatactatttctgcaaggactgtagctgtgagatactagataccagtatgaagaaacaatgcgactgtggtcactcatctgttaggcacttttgctggtggaataagtacatatcaacaccaatacagtatgggtcaacaagtttcgaaggaaaaagagccatgactcttctgaaggaaaaagttctgaaaggcatagtgttaaggcgcacaaagaaaggccgagcagcagatcttgctcttccaccaaagattgtgacattgaggcgggactcttttgataaaaacgaaatggaattctatgaagctttgtacactcagagtgtcacacaatttgatgcatatgtagatgctggaacactgatgaataactacgctcatatcttcgatcttctcacaaggttgagacaggctgttgatcatccctatcttgtagcatattctaaaacagcaggacatcctgaaggaatgaagaatgaaggaaacgagtccatggagagccaatgtggtatatgtcataatttggctgaagatgttgtggttacctcttgtgatcatgcattctgcaagacttgtttgatagactactctgcagctttggggaatgtttcatgtccatcctgttcaatacctctcaccgtggacttaacagcacaaaattcagttggaaaagtaactcgaagtgtcaagggtcgcaaatgttcaggaatattgagcagactaccaagccttgtggattttaagacgagtacaaaaattgatgccttgagggaggagataagaaacatgattgagcacgatggttctgccaaagggattgtcttcagccagttcacatcattcttggatttgattcagttttccttggagaggtccggcattaagtgtgtccagttgaatggagccatgaacattaccgaaaagggaagagccatagacaccttcacccatgatgcagactgcagggtcttcttgatgagcttaaaagctggaggagtcgctctgaatctcactgtagcatctcatgtgttcctgatggacccttggtggaatccagcggtcgagaaccaagcgcaggaccgtatccaccgaattgggcagttcaagccaatcaagagcactaggtttgtgataaaggacacggttgaagagcgcatactgcaactgcaacagaagaagcagctggtgtttgaaggcaccgtgggggactcgccggatgccatgtcgaagcttacagaggcggacctcaagtttctgtttcagatctaaatgctgacgtagttaagcatgagtagggagggccaggctatgctaggactaggagcactgacttgttggaagttggaaccctgacgctgccataacaccaggacggacggggtcggcggtgcgtagatcgactgctgctgtgcctgttggaactgatgtacttttgcagtgtgtgtaacatcgatggcagcgactagcgaggctttccgttggagtagcccgtttgggaaagaacagaacagggtgttgtaggcctgtgtagtgtggggggcgtgcagcgtgctggtgccgcaagaggtgcggtggggtgggggtacagtctcagtacagggtactggtgtgcgctgagtgagcacttgagcccaacgcgctcaattgtttgcaggcggtcccccgcccccgtatctcgtggacaggcaggtgggtaggggaattgtagcagcgtgggaagcggcagtgacactgacaggaccatccgtccgaacgccttttgcagggcggattgcgaacaccgaccggattcatgtgttctttctcttgtgaagagaccgcaagagctgccgatgcacaggtgactagtggtagtagagtctggcagttgtctagtagaccgatctggccaaaacaggtgaggcggtggcagcatc

SEQ ID NO: 32474 - DNA, 2320 bp, Zea Mays
cgctcggcactttccaatcaggccgccgtcctccttatctgaatcgcgtgccttccaggcttccagccctctgcccgctgtgccccacgcccggccccccgatccgacccacccagcgccatgtcccccgcgtgcgccacgccggcggcggcgcgcccgctcaacacggttccgacacgccgctcgccgccctctgccgcgcgcccgccatcggccatccccgcccgccgctccgccggctgctgcttctgcgcctcctcctcatcctcggcatcgtcgccctccacctgggactggacccgatggagccgccacttcgacgaggtcgaccaggccgagagctacgcatccctcctccagttccagctggaggaggcggtggagaacgaggatttcgcggaggccgccaagctcaagagggatatcatagcggccacaggaaacgacgccgtagcccacgtcatggccgaactcaagagtgctatagaggagcagcggtaccaggacgcctcgaggttgacaaggcttgctgggaccagcttggtaggttggtgggtgggatatgctaagggcattgatgattccattgggagaattgtacgaataagccctggtgttggcagatatgtggccaaaagctacagcccgaggcaattggtcactgcatcttcagggaccccattgtttgaaattttccttgtcagagaagatgacaagacatatacaatgaaggtagtacacttgcgaccaacaaaaggaactttaggtgcatcatccatatcatcagcaataacagaaagcccagcaacggtagagacaccagaaagtagtgctatatctgatagtattacagaggaggcaaatatagatactccagtaaaaggaaatggggatgctgaagagaaagagcaagatgttggtagcagcaaggatactagtgttgatggatttaaaagtcttttgaatttttttaagtctcgaattcctgaattcaaagttcaggtgataaatgttgatgtgtctgaggaaactgaattggctgcaaattcgtccgaagaatcagtgcaagacgatgtgaagagtactccagaaggctcattggaagagccaaccactgaggaacttgagcaggaggaggatgttccagaagaagatatggatgaagaaagtaaaagtacgaaagtgaagctttttatcagtggtgtggttcacaataaagaagatgctggaacaaaatcatacgttcgtgttccagctgaaataaataacatggaaaaagactcctttgacctgtacattcctggaaatggttctggtcatgatctgcctgaaacgaaggctgcaaaacagaaagttgcagatatggctgctaaattagcctcagagcttatgccgtctgatgttgccaaggcattatggggtacaaccaagagttcttcaaagataaataaagaagttcaggagcttttaaggcttaccttaagcaaggcccgagtcaagctgaccgatgataccttttttaaccggatcattatggacactaacagcatggatccatttaatgtccatatggaccagaaattgtgcagctccgtcggaagttcggccactggaatagttccgatgacgttgagtttttcgagtatgtcgaagcagtaaagttgactggtgatctgagtgtccctgctggccagataacattccgtgcgaagattgggaagggcaagcgacttgagaatcggggcgcgtatccagaggaattcggtgtgattgccagttataaaggtcagggtagaatagctcagcctggattcaaaaatcctcgatgggtggatggtgagctgttggtgctcaatggcaagagtacaatcccacaccttggaggcgcagagctcggtttcctgtacagtgtacctgagcagagttttctggttctcttcgatcggcttaaccttcccgagtgttgagactcctaaaaggagcagatttctcacatgtagattgcatgaacgcacagaggctggccccagttccaagtgttcgaacaagtctgtggcctgcgggcccttttttccgtcgtcctctgggctattttgctacctgagatgcctgccaatcttttctccgctcctactcggcaggagctgaactgcttttgtgagggaaggctgaccagttttgtgggttttcccccttcactgttggtttcagtaaggtaggatggaaaacaaattaaacaaaatcgttctgttgtatcaggatgttacatatataataataaaaaggcaaataaagtcccatgatttgtgatgacgcatca

SEQ ID NO: 32475 - DNA, 3090 bp, Zea Mays
atccaccacaccactcgagcgcgcgcgcggcccaccgctccgccgctgcccgcccgccgccatgcgagggatcctctcctcttcctccgctctcctccggcgagccggcgcccagctctcgcgcacggactgcagtagcccctcagcgtccgcgacctctcctctccgccgctcccctcttcagaatgggaaaagagacacattttgttcgctttggttcaaaggtcgttcggtatcaaccacaggtataaccatttacccaataggtatactttttttgctactctttttactgtcagtgttctgcaatagaaaattccaactttaaaaactcggccggggaccgccttcccggtattatattaagaagagaccgaaaacaatggtcccggccgagaaaatctccgaactcaggccccccatcactaacaggccggcgtcaactgtccactctgcaacggcccaaccggaggatggcgcacaagacatcgtaacccgagagcggatggggcacagcgaggggatttttttaaccaagcctgaaaattcgctcccgaggggaatcgaacccaggacttggaggtgctactcggaagtccttaaccactaggctagaggccctttcgcaaattccaactttaatgttcctgcaagaactaacttttgaagtagttcccaaagttatacagttgttattcttggcattctgtattcacgctaccttatgagttgctatgttactcaggaatctgtacaaatttccagttgatatgcagttagactatgagagtgatccccctcttgacgatacaaaagctattgagaaggagtcatcacttaatgttgctgtttctcaactcgcaattgacttcgatagagactctaatttatgtttggagcgattttcccgtgcaaggaaagcatctgtagtctctactggttctcttaagcttgacctcgctctcggcgttggaggattaccgaaggttgcattgtgttcataccattttatttgttcacataatatactttattattattttatatacctggaatatttacttgattttatatatcctattgatattacccacaagaaacaaaagttcatacttttacaagtacctccgtgttcctgtcaacactagcaaatccaaaattaagtaggccatgtgttttcatcttttggtgcctatctactctacgtgtcaatctaatcaccatcaaggtctgaactactttatcgagtggcgaatgtccttgttttgtgattggtaagcattctagtttagttataattcacatccattaaagtgcatttcaccttcaaaatctctgcttacaaaagatacacataagaacacatttgtggtcatctcttgcctaaaaattccattttgagagaatatattccctagaaatgctcccaccataggtgtccatgtcttccaatctttctttttctggtcactgcatatgttgaatagcaacatttccttgagaaatttgatccatggcaatagactggacttatgttttattactgtgctttgaccatatttggcagattactgattaaagtagctcaacagggtagaatggtggagatatatgggaaagaagcatctgggaagacaacactcgcgcttcatgttattaaggaagctcaaaagaatggaggttattgtgcttatattgatgcagaaaatgccttcaacccttcatttgctgaatctattggcgtagacagtgaaaggctcttgatagcccaacctgattctgctgaaaattctctaagcattgtaaacactcttgttggtggttctgttgctgttgttgttgtggacagtgtggcagcacttattcccaaatgtgaaattgaaggtgaaatatacacaaattgtggagacatccaatcccatttgatgactcgggcccttagaaaaattcagtacactttatgtcgatctgaaacacttattatttttgtgaatcaggttagaacaaagaggacatcaagtaatcctgggatctacaaggaggtgccttgcggtggtaatgcactaggattctatgctgcagtcagaatgaggacttcaaggagagaactgcgctatagtgaagatgaggctaccggcgtaggtatatcagtgcagatcatcaagaacaaattggctccagcgaacctgaagaaggaagccggcatcgacatcacattcggtaaggggatctgccacgagtcggagatcctggagacggcttcctccgtcggagtgatcctgaaagacgggtgtgggtattggatcaacaacgagttcctggcaggcaaggtggaagcggagaagttcctgcgtgaaaacgctgcagtggcagatgagatctgcaataccgtgaggaacgagttcttgcaaaggtgacatagggcgaccgattagagaggctaatgcattgttagtcggaaatgttgtaccgtcatgtattcatagaagaagatttatgtaggatgttgctgtgcctgtcgtgtaactttgactcgcaacagttcattgagtttaccagggccattccctcccagatcatatcgttaggttcttctatgttgctggttgaattcagggctgacttgtcatcacacggcttgagggacggccaagaattccaaactgtgcgccgtgcgcggatacgtgttctgtccacagcaagcgaagtggcgtgcaagcgcccctgggaagggattgggtgcgtggacaaagctccacccttgattctgtaaccgcgtgttttgtccctgctcttctctgtcagcgaagcggaggaagcagtcatcggtgcggcaaatgacaaagaaggtttggctgcaacagcaggagatgggccgtgtcgggccaaaaggctgaggaagtgcaacccaaaggtctttgggccggcgtggctaaacagcacaaagtaatccagccgattattaaataagggttcggcggcgcgtagggtttttaggctgtaacagaactctagactctagttcttcttcctttccaagtactatctcaactactctgttctccgtctctgcattctccagatattgtg

SEQ ID NO: 32476 - DNA, 1843 bp, Zea Mays
cacgggtgggttgagttggagtgtggatggaaccatacactctatctcttccttctcccaaccccgctcaaaaccctagctcaacgccacaggctcgccgactttcgcccggccgccgccggggacgatggcgaagcctcggcgcggccgctccgcgtctcgctcctcctcgggatcttcttcccgctcgctgtcccactccgtctcctccggctctgtctcgtcccgctcccggtcgcgctcccgctccttctcgtcgtcgtcctcccagtcccggagccgctcccctcctcaggctaagcgcagttcgcctggagcacggaaagggcgatcaccttcaccgccccctaaaaagggttcaccttcaaagaaagtccgttcgccatcaccaccacttaaaaaggcttcaccccctaggaaagtgtcgcctcctgctgaatcagctgttctctgcattgatcatttatcaaggaatgttaatgaggctcacttgaaagagatatttggaaactttggcgaagtggtgaatgtggagctatcaatggaccgaatggttaaccttcctcgtggctatggatatattgaattcaagaagagagctgatgctgagaaggctcttcttcacatggatggtggtcaaattgatggaaatattgttaagttgagattcactcttcaaccacgccaaagggctgcatcacctgtaaaagctccgccccctcctccaaaaagagatgctcttcagattgaaaaaggtgttagcagtgctgaaaaggatgcccagcagcgtcctaaggaatcatctccacgaaggaaaccagcttcacctctacggaaacgatctccaaatcgaagggctgaatcacccaggcgtccacctgacccatcacctaggcgccgtcctgattctccacctatacgtcgccgaccagatccttctcctgtcagacgtggtgacacacctcgcaggagaccaccatctccagttcgaaggcgttctccttctccaccacctaggaggcataggtcaccgatgcgtctttcacctaggagggggcgtggtagcccatcaccacgcaggcgctcccctgggcctcttaggcggcgctcaccacctccaaggcggttgaggagcccaccaagaaggccaccacctccacgtcgcttcagtcgctctcctcctcgccgaccccttcgctcccgctccagatcaatttctccaagaaggggacgagggcctccattgaggcgtggtaggtcagactcatcatattctcgatcacctactccaccaccaagaaaggcctcctagagcaggaagaagcgtctccagtgacagccgcagcagcagttcaccttcccctagacgcggcaggtagaaagaacccgtggcattgtgtatgcggcaggtaaagccttttatcccttgactctatctgtatcgtttgcctgtgcttgtgacttgctgtgagttcaagtattggttcgaggagaagatgagagaacgctacagcaatgctccaaacggatctgctcaacatgcctggtcgaccgccctagtttgtgtggtctaccctagacagaattatctgctgtgttggcttgtgtactttgattgtaccccaagtattttgaagttctgaacttatttctgctaattggtgtctgaagtggatatgttgaatgtattttgttttgttggatagagttcctcagcattgccaccgtatgaaagatgaatctattgatcaaccaatttgtgcatgcgtcactatgtagttgagactagacgcatgtgccacgcgcagcttacaatttgttttctaatctgtttttaaaaaag

SEQ ID NO: 32477 - DNA, 178 bp, Zea Mays
ttctaatgtgttactgacaatgcatccgaaccactcccatttgtttaatttacaaacctgagtccccgacgagcgccgggtcgaacacatggccgacgccactgggactcaccgccggcaaccctctcccgaggtggcgagcactcaatgtaatactcaaattgtaaaacataagaaa

SEQ ID NO: 32478 - DNA, 2287 bp, Zea Mays
ggccctctagtcacctcacctcactgcaatggtggaagctgcaaaggctgaagcccttgcccccctgctcctttgtcctctcgattagcccttgacgcaacaaggttggttggcttttggtctcttggtctctctctctatctccctttctctctcctcctcctccgctgttcagacagggagagcacagagcagcctgctagtggaaaacctcttgtggcttccgagactcacacacaaacaaacaaaaaaacaaacactgcactaggcttaaacacaaaacatctgcagcagcatgagagctcctcctcttcctcctcaatagctttaatttagtccgtgtctcgttcaaggagagggagttaagagtgaagtggtgtgttgtaaagcctaggattagagagagagagagaaggggaggtgtcagaggctcgtccatatagctcatacatatacacatctagtgggggaggaaaacagaagagtataagagtaggtgcagtatatcagtaaccagtaaatacttggacccagcagtaaccaggaccaggagagatcatcaaagtaaccttgctgccttttgagaacagaagcgtcagcagcaccagcaagaagcatcttctctctggagcggcgcctccgagaagaggacgacggatcgggaccaggaggcatggatctatctggcacgcagggcgagctcgcgatcccaatgcacgccaacgtcgcgtcgccctacggagccggcgtcggcggccatgtcctgcagctgcaccgtgaccacggcagcaacaacggccagtctccggcgccgccgctgccaccaccgcctgccgcggcggaggagacggagagctcggcgaagaagcgcggtccggcagccggggccggcggcggcgggggcagctccacggtgaagtaccgggagtgcctcaagaatcacgcggcggccatcggcgggaacgccaccgacgggtgtggcgagttcatgccaagcggcgaggagggctcgttggaggcgctcaagtgctccgcctgcggctgccaccgcaatttccaccgcaaggaggtggacgacgaggacgacgacatgtacggcgccgccgaaggcttcagcggcctcggtctcggcctcggcctcgggcacggccacggccaccgtgccgcccgccgcctcctggcccccgccatggcgcacccgcaccacaagagcggcggcggggggctcctgatctccggggccgacccctacgccgcctacgcgtcggcgcgcgcgctccctccggcgctgccgccgccgccagggcacgcccaccaccaccaccagtacgtgatgccgctgaacatgatgcacacctcggagtccgacgacatggagggcggccgcggcggctgcggggacgcggcgcgcggcagcggcgggtcgtcgtcgtccaggaagcggttccgcaccaagttcaccccggagcagaaggcgcgcatgctggagttcgcggagcgcgtggggtggcgcctccagaagctggacgacggcatggtgcaggccttctgccaggagatcggcgtgaagcggcgcgtgctcaaggtgtggatgcacaacaacaagcacaacctcgccaccaagcgcctcgaggcctcgccggcgcaggagcaggcgatggcgggcatggcgtcgccgccgccgccgccgccacccccacagctgcacttgcctctgcagatgcccgctggagtcatgccgccgccgccgccgccgccgcaggccgggtcgtcctgtcaccgcggcggtcccggctccccgctgccgctcaagctcgagtgaccaccgacaacctgacaaaaaacaagaagagggtgaccaccattggtggccgttgatccgtcctggtgggagagaagtgggtgatgaacttttcttgaaacaacaaaacgaacaaagtccaggttattatcgtctcttttttttccttcccttttccggtgctcgttgctttgtcacaaggtaggggagcaagcaaccaagcatgcatgatagtagtagctgatttcgactggactggactgatttccttccaattttttttcctgatggtgaagaaaactaaatatcctactagtatctatcctccatttatgttatgtgttagtattcattttcttggctgctgacctcttactctatttcatcgttgatcgaaattgggggatgaagacgaattgaggtgtcgttatggacaacatcttttcgttgagttctgtgccggggatttggaattgtgtgcgtgca

SEQ ID NO: 32479 - DNA, 568 bp, Zea Mays
ccttcccctaactccgccgccactgccgtccgcgctcgccgtcgccccgaacctatcgcccactgcatttttccggcggaggtatgcgatgaggctgctgcaagcggaggagctatttcggaaggttctggaggtcgggtcgaagaataaggcggctcggctgctggggctcgacgtcggcagcaagtacgtcggggtggccatctccgatgagaagaacagggtcgctatgcctctgagtgttttgtgtcggacaaaaacaaacatcaacttgatggcagatgatttcaaaacattggcaatccaagtaagtcttgctggggaactttgtaaaacagggaaacttgatgatctgccctacgcatattgggatgaaaatttcacctcaaagtgtgtagaagccctcttgcatcccctgaatctaaaagacttggacgatgccaaaacaatgacagacaaatttgctgcagtctgtatactccagggttatcttgacaacatgaacagaaaactgagatccacagataagtctgaagcataaagcttaatagaagcaacgccagctagc

SEQ ID NO: 32480 - DNA, 3991 bp, Zea Mays
ggacgggtgcctcgacatttttggggaatatgtggaaacataagcatcgtgtttctgtagcagaggttcaagtagccaacaagcatcgggtaataccatccagaaacaatggagcactaccatctccaatgaagcatcctcttgcctccagaataaaagggaggagccttatgcgagtagagcatcggagacgaagaggcattgccaccctgaactgccttggatggtagcgtagtaggagtatatgattggccacggcattgccagcttgttagtatagtattgctcgaatgcaaataagaatgctggtatccttgcgttgaacatggatctgttgttgccgagtagcccacctcggctaggcaaaactctgtctgcacatgacttgtttttgccgattgcagccaggactggaaaagcaccttctgtagagacttgggaagctcgatcataaatcaaagcaagtcaccatctataaatcttcacttcagtcagactgacagttcgtcatccatcgacaaacaaaaaactacccttcgatttaagaattctgagtcgactttcaaccgttttttactaatttctcgctaatcactggactatcctgttttttactaatttctcgctaatcaccagaaacgagaaaccagacgattttcatcgcttttcagttcactagctagttttcattttcaaaatttaaaaaacaatctttgaattttctggccaagaaatgtcgtttctcggttttttttgctaaaaattattgtttcaaatttagaaaaacgaaattcatatttgtcggccgagatcccgtgtgctctttatgaaattcgttgtctttttaccgaacaatgaacatttttttaaaaaaacaaaagttgatatttaccaaattactcaagaaagcatgtaattttttatcatattttccctggtttctatagtttttttcattttttccaaattttgaaagggattaaaaaaccattgggaaaccgtttcccggaccccaatacccgcggttctaggctgtgctaagatttgggtcaattccctaaaactctaaaaaaacactatatatactcaaaataatagtttattttgtacatgatccaagtcaaactagcaggaagacaagaaaacagaagtaaatgcaaaacatatcaaatacaaatgatagtgccgattctcagtccgagccatgaattgatcaagtgctttgatgaaaagaatcttgcaggttagcgagaaagacatcgctgcaacatccaacactgaagcaagaacaaatagcaagcacgtcacaggtcaatgaaacaaatatcatcataacctaggagttcggtggaaatattaatattcacatgcagctctgtttaatttgaatagagattgacagaaccaaatggagacaccaaaaaacatagatagaacaagagaagagaaacatagcaaacttggagacgccagaaaacatagatagaacaagaaaagcaaaacatagcaaactagtgagattggaggttctcagccttgagttatgattgaatttaggcgtctttcatggaataaagatgtatcaggttaacgagaaagccatcattgcaacccaaaaaattgtaaaataggcatgcacaaactgggatgcagggcacaaaagattgtaacgccctcaacttgttatatcttcagacaaacaatgctgctcagttatggtttttgaatggatagatgctatcctcatagtatgtctcaggttaacgagaagtccatcatggcagccacaaaaagcagtaagcaaactacaaactgtaatgtgaacacattcttgcacttgggcaaagttaacatgatattgatgtaaccagcaaaatatttgaaatggaactattattaaggaatggtttggatacaagagctgattagaagctagctaaaaattggccctggtgcatccaaacaagaggggccaatagatgagctatttttttagccaaatttccaactacttagccatctaccaagccaaactgggctaaactttagcccaactagtactatccctaggctatctcagccaaacagaccctaaattaaccagtgtacaacatagacaagcacaaaagaacgttacttggaaacagcagcagatacaaaaaaagagagaacaacgcagtagcagcagcagattatggaactggaggcgctcagcagcttattattcaaatgaatatcatcatcatactagcaatgcatgcttaacaagaacttgttaatggggaaaagaggaggaatggatggaaacacacaaactcagagtgagtgagtgagcgagagagagagagagagagagttcttgaaaatgctagcataagttcttgaaaaagctatcatcacagcagcctccagttcctaatgactccccaactttattatcctcctaataggcatggcttccatgcgagtaggaatgaaacagaatcagatacagatggatattaatgctaatgtgttctatccaatatgtttcctcgaatatcagcaccatcatatcagattttgatatcaatctcatatgcatatcagaaatctgaatttgagcatttggattcgaatatgttacatatattaaatgttcagattcaaatgcatccatgtagggttatgatcctttcgggaaggacgggtgtctaaaaaatttcatccctacatgtgagtaagcaacaacaaaaaagggcaaacctagtgccggaaggctcccatacgagtgggatctagggaaggaatagggaagccttcccccacaaatgcggagagactgcttgaaacccgtgacctagtgacccagtaccagcccacacttcagaattttcatcgtaagtatgtatttgtttaccttgctacggaaagccataacttttgtggaaatactataattcacattcacatgcaacctttgaacagagattgatagaactcaatcaagacaccaaaaaaacatagaacgagaaaaaataaacatagcaaactagtgagagtcgaggttctcagtcttgagttatgaatggactaggtgtcttccagggaataaagatgtatcaggttaacaagtatgacataattgaaacctccaaacatgtaaaacacacatgcacatgctgggatggaaggcacaaaaggcaaattaaatgatggtaacaaaagagtgcaacacctcgaacttgttatatattcaaacaataacaatgctgctcagttatagtttttgaatggatagatgctatcctcatagtatgtctcagtttaacgagaagtccatcatggcagccacaaaaagcagtaagcaaactacaaactgtaatgtgaacacttggttgcacttaaacaaagttgacatgatgtttgatgtgaccagcaatatagttgtaatgaaaacaatccctaaattaaccgatgtacatcatagaaagtcaaaaaaacttgtttggaaacagcaacagaggcagcaaatgataagaacacagtagcagattatggaattggaggcgctcagcagcttattattcaaatgaatatcatcatcatactagcaatgtatgcttaacaagaagctgttaatgggaaggagaggaggaggaatggatcgatatatatatatacacacagagagagagagagaaagaaagaaagagtgagttcatgaaaatgctagcataagttcttgaaaaagctatcatcacagcaacctccagttcctaatgactccatctttattatcctcctaacgggcatggcttccatgcgagtaggaatgaaacagaatcggatacagatggatattaatgatcatgtgttctatcccatatttttcctcagatcacagaccatcatgccagctattaatatcaatctcatatgcatatcaaaaatctgattttcagcatttggattcagatatagtatggatattaaatgttcaggttcaaat

SEQ ID NO: 32481 - DNA, 4476 bp, Zea Mays
ctccgccgccggcggcatcatcagtttctctctagtagaattgagatccctcctaccacatccgttccccttcccttccctcctctcgcgcgccggctccacgcagatccaggagatatgcctcgctatgatgaccgctatggaggcacgcgcttgtatgttggcagattggccactcgtactcgttcccgcgatttagaacatctgtttggcagatatggaaggtttttcggtttttaccggaggtctttggtggaagggtgcccttggtggacttggtgaccatttggtgaagggtgcccttggtgtaatgttattgactgttttagtggaagttccaagttggtgatgcatttgagtacttgacacatgacgtgacggcttactgtttgtggcaaccctttgcgcagaatacgagaagtggagttgaagcgtgactatgcatttattgagttcagtgatcatcgcgatgctgatgaggctcgataccagctagatggcagggatgttgatgggagtcgtattgttgttgagtttgctaaaggggtcccacgtggttcaggtggctcacgtgaatatatggggagaggccctccaccaggtacaggtcgttgtttcaactgtggagttgatggtcactgggcaagagactgtaaagctggtgactggaaaaacaaatgctaccgttgtggagaaaggggccatatagaaagaaattgccagaacagtcctaggagtctcaggcgagagagaagttactcacggtccccatctccccgccgtggacggggccgcagtcgaagctatagcaggagcaggagccggagtcggagctatagtcgatcaagatccctgtctagatctcctaggggaggtcgtcgtgaccgtgacgataggagatcaaggagtcctagctatagcaggagccccatgcgatctgcctcgccaccagtaaaggaaaaggagcgcagccccgcacctgatggaagcaggagcccaaggagtcgcagcccccaggatcaggtgatgagcccaccaccaaaggataatggcgaaggcaatggctcagaccgtggcggcagccccagagggagggagaacagcaggagctgcagccgcagccgcagtccatctggtagtaaccgcagccctgcggccaatggacgtagccggagtcctggaggtgagcggagcccgagtcctggaggtgagcggagcccgagtcctagaggtgagcggagcccgagtcctagggctgaccgtagcccaagccccaatggcaatggtaacaatgatgctgctgctgatgtcgatgctgatgctgctgcccgcagtggctcccccactggaagcaagtcaccctgagcgctggcggtcccagattgtggtggtgcttctcaatgcaatgggcaatcgtattgctattttttgctaccatatcgaagacacaatagctacatcattttcttctctgaaacaaggactttattttgcttgctttgagatatgactcttaccctctcatggataatatatatatgatatgatgccactggtgcttgcttgcatctgaataagtgaatgctcgcatgttgaggtttgcctgatgagtgctgagggctgaggccgtgagtcaaaacaacccgatactgcatttagaaattgcggttgatgcgcgacttgtgctgccgctgttgctggttcttgctgccaaccgcacggtaacagagcgctggtgagaccgtgatcgtcctggaagacttcttgctgctcacatggactgggtggagtaacggtgaccggtacaacgacccttgtttgatcctctcttttttttcctttttacgatatgttcggtgacatggtttccgacaccttcaccatctttgtagcgtgtctttcagcggccaactccgactcgcgtgctccagctccaggcagctccactcctatgcttcttctacatatataagtaaacgcgccaagccacgccacgctctgccatcccaacccgaccacctgccgaccgaggtctccgcagcgacacgccaccaccagagcgcgccgagctcgtgcacccagcaaggagcaaaggaccaacaaccgactgacgcggatggccaccccgggccacgccgtcgcggtcgacatcgacgagccagcctcctgcggcaacggcgaggcggcggcggccacgccgctgccccagccgacggtgccgtacgtgctccgcttcaccgacctgtcctacagcataaggaagcgcggcagcgggctaggctgcctgccttcgcgctggcccagcaaccgcctggcgtccttggacgcgccggcgtcgtccgcgaccgccgccagcgccacccggaacaccaagacgctgctggacggcatctccggggaggcccgggagcgggagctgttcgcggtgatgggcgcgagcgggtcgggcaagtcgacgctgctggacgcgctggcggggcgcatcgcgcgggacagcctccgcggcggcggggccacgctgaacggggagccgctgcagggccggcggctgcgcgccatctccgcgtacgtgatgcaggacgacttgctgtacccgatgctgacggtgcgcgagacgctgctgttcgccgccgagttccgcctgccccgcgcgctgcccgcggaccgcaagcgcgcgcgcgtcgacgcgctcgtcgaccagctcggcctcgcccgcgccgccgacaccatcatcggcgacgaggcccaccgcggggtgtcgggcggcgagcgccgccgcgtgtccatcggcaccgacatcatccacgaccccatcctgctgttcctcgacgagcccacctcgggcctcgactccgccagcgccttcatggtcgtgcaggtgctccgccgcatcgcgcgcagcggcagcgtcgtcatcatgaccgtccaccagcccagcgcgcgcatcctcgccatcctcgacaggctgctcctgctctcgcgggggcgcaccgtgtacgccggcacgcccgcggggctcaagcccttcttcgccgacttcggcgcgcccatcccggacaacgagaacccggccgagttcgcgctcgacaccatccgcgagtacgagcgctgccccgacggcgccgccccgctcgccgacttcaacgtcaagtggcagaacggcagcagttccacttccacctttgacaacaacaacgacgacgacaacgatagcagcagcaagctcatgccgctggagctcgccatcgccgagagcgtgtcccgcgggaagctggtggccgggagcgcggtcaccgcgtcgtcggtgccaacgttcgccaacccgccgtggaccgaggtgtgggtgctcatcaagcgctccttcaccaacacgggccgcatgccggagctcttcgtcatgcgcctcggcaccatcatggtcaccggcttcatcctggccaccatcttctggcgcctcgacgacacgcccaagggcgtgcaggagcgcctgggcttcttcgccatggccatgtccaccatgttctacgtgtgcgccgacgcgctgccggtgttcgtgcaggagcgccacatctacctccgcgagaccgcgcacaacgcctaccgccgcatctcctacgtgctggccaacgccgtggtcgcgttcccgccgctggtgttcctgtcgctggcgttcgcggtcaccacgttctgggcggtggggctcgcgggcggcgccccctcgttcctcttcttcgtgctcatcatcctcgcctccttctgggcgggcagcggcttcgtcaccttcctctccgctgtggtgccgcacgtcatgctgggctacacggtggtcgtcgccatcctcgcctacttcctcctcttctcgggcttcttcatcaaccgcgacaggatcccggactactggatctggttccactacctgtcgctggtcaagtacccgtaccaggcggtgctgcagaacgagttcagggacgcctcgcgctgcttctcgcgcggcgtcgagatgttcgagggcacgcccatagggcacatgacggagcccgtcaagctcaaggtgctgcaggccatcagcaggacgctggggtccaacatgacggccacaacctgcgtcaccaccggcgccgacgtgctggcgcagcaggccgtcacggacattggcaaatggaaatgcctgctggttactgtggcctgggggttcttcttcagggcactcttctacgtcgtcttgctcgttggcagcaagaataagaggaagtaaaattagtatacacaatgtatacggcgtatacataacatatacatatgtgtcaatgtgtgacggtgaaacaaatgtataggtcgacatgtgaaattattgttttgtttttaagaattgccgtattttttttcaaacatgcgtttacctagagtactgaattatatttgaattctttgcagttattcaacggcgtcatgctttcaatagatatacatatatgt

SEQ ID NO: 32482 - DNA, 808 bp, Zea Mays
gcatgcacccggagtggcaggaccttgccagggaggaggtgctccgcgtcttcggcggcgcctcctgcagagtgctggactacgacggcctcagccgactgaaaatcgtgaccatggtgctgtacgaggtgctgcggctctacacgccgctgccggcgttgcaccggcggacatacaagcccatggagcttgggggcgtcaggggccggacgccgacgagttcaggccggagaggttcgcagagggagtcgccagggcgtcgtccgccggggacgcgcctccatcgttcttcccgttcggctggggacctcggacctgcgtcggtcagaccttcgcgctgctggaggccaagatagggctcgccatgattctggggagcttcacattcgagctctccccgtcctactcgcacgcgccgttccccgtcgtcttgctcaagccagagcacggcgcgcaggtcaagctcaggaagctcccatgagctgcatccgcttgcatattgcagagacgaaacggtcataaatttccctgtatatatacggaaaaaaaaggcaacaacatgtttgctgtttggatggaccaggactattgttagtttatgcctaaaaatactctatatgcgtcctaaaataagtattcgtaggtttaaggtgaatagataattgtctttaagaaattacatgtccccctataaagatgtaactattgtactttggaaaaggagaaggtagaaaagaacaactagagttagtttaacttgtacctggaggtgcacttattttgtcataatttttttaaattctaggag

SEQ ID NO: 32483 - DNA, 2261 bp, Zea Mays
tgcccatattaaaactccattatacgaacagtgcaatctacagtgcagaacaacagctaaagtatggatagactactggacatggttttagtaacatccacaattataaaaaaaactaatatgatatgagcatatatatctctaaatagcgcatcacacaactagatcaaacaaagtgcataccacagataatctatatcatcaaccaaagtgtacaacgcagaaagtctatatcgtcatccatagtccatagcacaaaaaagccaaagcagaagacatgcaccatcatgtttccctcgcatccttctagttaccgttgcccttggccccaagagcgttgatgcctggggtgttagggttgcgcgatcgtcgccatcgtctgcgtggtataggctgtgaaggttgtcttaggagcatcctatggtccaatcttgtcgagaggaatcttaatgtcatcctcgtcctccttgtggctcgcaaacgcatctcgtgtcgtacgtgacgagccctgtgcaacggtgatagctccaagtcctagcgaggtgtcaccatggtgctgcagagtatgttgtatgttaactacggcgctaatcctgcaaccacaacgagcagcagcacaacgtaggcgacgtgatagcctctgttgttcaaaagctagttagccaccaaggtttcaacattaactttatagtgatgttagggtaatatttagtacttactgagagaaaggcaagtgtcctgtcgtcagaagtggtcttagagaaatgctcgatgtcgaccacagactgcatcatggagttgccctgcgcacaagataaaacatgagatagaaccaacaaaaggtatgacaatctatttacaaaaattaaaatagagaagaataagtaccactctatctaggattggtgcagcctccacgtgtgtcccatgccgagtaactaggtcataggatgtgtcttcgtcatctgaagactctagttcggcgtagtccgctgatgtccactggcccttcaacttgcaccgagttacaccgacataccaagagatgtactcgcgaaagttgtagttggtgtgggactgatcgctctggtagaggaggtcatgcatttggtcccattcgtcaatgtacacttggtggtgcgcctcaaagtcagtgatcttcttctgcttttggcggtcgaacctgaaaatgggaaacatctcttatgatattggattgcacatttcacataagagttagagaagaaagagaatgaagacacttacttgtggagttctaccgatgtcgagaagggctccacagggaactcctgacgtagaccgaactggcgtgctactctatgaggcaagtggtactcaacggcatagaaacaaatcagtggacaccttaataaataaatgtcttcatctgtcgtgcacgcggagctcaactgaatgtgtggcaacggtggctcatcatatggttgccagctaacctgaaaacagaaaaacatttgcaggttatatttatagggccaacgacatactaaccaagttaaaagacatactaaatacaaacaactcaccatcgacggtgtaagtgcgtccagctcgtttgagtactcgacgtaggcgcgctggtgacgtgcgaacggagcctggacctggtcccaacggtaagccgccgtcggtcgtagtcgcaagccgacgacgtcgaaccaaggtcgaggagcaaactcaatagggcgaccaaccggtaggtgcgaccacatccacaactggagtaggtacacgcaaccgcctaaacttgcgttctttgccgtccgacgacaagcctcacaaagttgtctgtacaggaaggatagcactgcagaagcccagctgtagcctcctgccatgtcccaatcagtgaggcaaggaaggaacatccaggacgcgctatcacccgtcgcgtctggaaaaaggacggagccaaacaagtgtaggacccaagctcggcagtagtagctaaccgtctggtcatctgctgcagctggacactccccgaacgactgcctaagccaggcgagagaaaccccagatgtgtggctacctggtgtgtctgtgggaacctcccttccaagaaaggcctcgactctctgtctccagccaccgggcgctgcctgaccggtcactggacgcccacgaatactgagaccaagttgcttctggctgtctcgcagtgtcacggtcatctcgccgcaaggaagatggaaagtgtgagtctccggccgccacctgtg

SEQ ID NO: 32484 - DNA, 3755 bp, Zea Mays
aaacagggcaagaccacaaatccaaacccccgcatcgtcctcgtcgccgccacagagcccctcgtctcggccgcccttcgccgcctccgcggagcaggcatcgcaggagaccaaagatccggccagctctgatgtcaggagctagtggctcaaccgggcgcgcggccccgcggtacgccccggatgacctgacgttgctcaagccgtggcgcggcctcgtcgacggcaccaccggctacctgtactactggaacccggagacgaacgtcacgcagtacgagcggcctatgccccctgagaatcagctgcccccgcccccgcccccgttgcctcccccgcctccccggagccgcgaccggcgcgacaggtccagatcccgatcccgcacccctcccaggcgcgaccgccgcgaccgcgaccgtgacgacgagcatgcgtcctccaagacggcgtcttcccaccaccatccggctccgatagccgtcgccgactatccgtccaccgaggcataccgacgccgccatgagatcaccgtcacgggggataacgtgccggctccaataacttcatttgaggctggtggcttcccatcagaaattctgaaggagatgcgatatctgctccgagggggagctaatgtcgtatgctgcctcgcgcgcccttggccaatctataagtgagatgagctgagggcaggtcttgctgatggagctgccaaggtgggtgaacgctcgaggttgctcgcttcctccctggggggccgcccatggagcggaggagggccacccactcgtggcacccacggtggctgatttgtcgctctgcgtccaattcttggaaaaggctccttgcatggatgatgggcttcttctggggcttgacccatggaggtctggcccaggctgtcaacgcccatccatatataggatcgggtggcagctgctggaaggggccttgtggatcaacggtctatgcctgagtgagcctccatggactctgttagagctttttctacttcgccttgtgtgcgcaagtctacacattgcgggaacattttatttatacaacgtgctggatttgcaagcccaacacctatccaagcgcagtcatggccaattgctatgcaaaatcaagatgtagtagctattgcgaagactggatcaggcaaaactcttggttatctacttcctggatttatgcatatcaagcgcctgcagaacagcactaggaatggtccaacagtgctagttttggccccaacaagggaacttgcaacgcagattctggatgaagctatgaaatttggaagatcatctagaatttcttgcacggtttgttctgtctgtatctattttaatatacaaatggtcacgattttatgttttaccaggttattaattcaaaaaaccttctgaggaatgtttaaactgttgaccatgtgttgaagttatattgtgaattattatattgtacttgttgatctgtgtgactgtctaatgtttgtctcactgtcatgatctctggtttatatattcattgtttaacctttggttcttgatctgcttgtagtgcctatacggtggtgctcctaaaggtcctcagttgagagatttagatagaggggttgatgttgttgttgcaacacctggaaggttaaatgacattttggagatgcgaagggtaagtcttaagcaagtgtcatatcttgttctggatgaggctgatcgcatgctggacatgggctttgagccacaaatacggaagatagtgaaagagatacctcaccgtcggcaaacccttatgtacaccgctacttggcccaaggaagtccggaggattgcagatgatcttcttgtccatcctttacaggtgacaattggaaatgttgatgaacttgttgctaatagtgctattactcagcatatagaagtcataacaccctcagaaaaacaacggcgcctggagcagatattacgatcccaggtttcaggttcaaagatattaatattttgtaccaccaagaggatgtgtgaccaacttgcaaggacactcaccaggcagtttggagcttcagccattcatggtgacaagtcccaaagtgaaagggagaaggtcctgaatcattttagatctgggcgctctcctattttagtggcaactgatgttgctgcgcgaggtttggacatcaaagatatcagggtagtgatcaactatgacttccccactggtgttgaagactatgttcacaggattggcaggacaggaagggctggtgccactggtgttgcatatacatttttctgtgatcaggactcaaaatatgctgctgacctaatcaaaattcttgaaggggcaaaccaacaggtgccccgtgatttagaggatatggcttctcgtggtggtgggcgaggtaagaagaggaaccgttgggcatcccgctctgaaaggggtggtccacgatctgaactggattcaaggtacagcggcagagatggattagcatcttccgggagatcagagagtggtcgtggcagtcatggaagggatgattatggtagccgtggcaggtatgactctggtgaaactgatgggcgatctcgtaggtctgctagaggtcgcagtagaagtcgtagcccaagccccaagaggtcacaccatcatgaagctaggcgtagccgaagcaggagcaggagccgaagctgtagaaactttcgtgctagccgcagcaagagtcacagccctgttgctagcagtaggcatgaaaaggctgctgttatttcaggatctactcaacctaacttggggtatgcagagcacaaaagccctccaagatctcactctggggatgaccatgtgaaccaccctgatcaaaaggatgaccacatgggagatgggaagatggaaagggttgatcttgatcgctcgcccagcccacaatatgataagtctgctccatatagtcctgcgtacaatggcaaagccagtgactcgatgagccctaatgttcagccaaaggcagatgccaaatatgtcaaaccttctgggaaacctgagcctgcatctccattgcgccacagcaaaggcagagatgatgatgaaggtatcatagacgacgatggagagattgctgagggtgagatgatgatgaaggtatcatagacgaggatggagagattgctgagcgtgatttgcgtgcaagtgcagctgtgtagagaatggtaataactgacggagaatggcctgcatcttctgtgacaacaagactgttatgcaaactgcagtcgttcccatctgcaagagtccagaatgtagaaatgcatttgtgccattaaatgtctcgtaggacctatgataatacatctgccatatatgaacaaaaactgttgatgtatgtcctgttgtttgttaaacttcaatgacttgtgttctggtgtcttactgctagttctgttaagtgatttatgataaaacatattgtcaggtctggaagtgataaatttatgatacttgtcaggtctggaagtagtttattatattggcagctccctggttggagattcctaggattgcaaaacctggcttgtttgagagcaagggcattggaggggattgatccccttactatcttatagcctgatttgttgtgttgttttttctcgaggtgtttggttgcctgcatctggtcggattctgctttccagatgtaaaagacagtctagagcctggcatcacggatagcgtacggtacgaatttg

SEQ ID NO: 32485 - DNA, 2258 bp, Zea Mays
atggaggcgaaggaaggcgtgatggcgacggacttcttctggtcgtacacggacgagctgcacgcgtcgcgccaccgggagatcctggccaatcgtggcttgccttatgatggtccagttatcccacccgcaccacagcctacaccttcaccggtcaggaagacgcacaagaatttgaagtacgtactgatcggggccattggtggaggcctcctgctgatagccattgttgcagccattgtgttctgctttgtgtgttctgggagtacagggaggaggaatgatcagagagaaagtggggcatcaccaagtgcaccattgggagtgtcagctaccggcacaactgcagctactggtggcacctcgggatttggggaagataggctcatcaagcacggtcactcaggtgatctataccatggtgtgctccaagacgggactgtcgtggtggtgaagaggatcacttcgcgtgtgcctcggaaggatgcttatctggcagagttatatttgtttgcaaaaggagtgcatgaaacgctggttcctttgttggggcactgccttgataaagaagaagaaaaggttcttgtgtataggtttgtccgaaatggtgacttgtcaactgcactgcacagaaagtcaagggaggaaaatgaaggcttgcaatctttggactggattaaaaggttgaagattgcaacaggggttgctgaggctctttgctatctgcatcatgagtgttctccaccaatggttcacaaggatgtgcaagccagcagcatccttcttgatgataaatttgatgttcgtcttggtagcttgagcgagatatttcttcacgatagctctctgctcgcaaccatctcccagctgagccgccgcgccatctccctggccatcaccagttgtgccctcgcggcatttgcaagggattttaagcaacgcacgcacgagcatcacctagtgttctcaagaataacggaacgaaattctttccgtgacaaactgagcaccctaatcccaaatcgagcggctgaagcgctgggctccagctactgctgctcgcctgcttcgggacggccgattgggtgccggtttgccaaggacatggaggatgcgagcggcagctcgtcgtctccagccgtcctacggaacaagtattgggtcctccgccacggccgcagcgtccccaacgagcgcggtctcatcgtctcatctctggagaacggcacgaagccggagttcgggctggccccgcagggggtcgagcaggcgcgcgcggccggcgaaaagttccggaaggagcttgacgagattggtgtgccggtgggttccgtcaagattcgttactcgccgttctcacggaccaccgagacggctagagtggtcgccggtgtgctcggcatcccctttgaagctcctagttgcgaagttggctcatagaaggacttttgcaggcggtgctgggacttcgtgagcgctactttgggccatcatatgagttactttcacatgataagacatatggtcagtagatgaagcacatccctgtatggctcctgaaggtggcgagagcgtcgcagatgttgctagtagattttcagctgtgctgttatctgcagagacacagtttcatggctctgcaattcttattgtcagccatggggacccactacaaatctttcaagctgtcctcagtggagccaaggagaacatgtctttccttgacgatctcaccaacctgaaggtgaaagatactgacgatctcaccaacctggaagtgaaagacacgatggtggcatccattctgtcacagcatcgtaagtttgcgctcatcacaggagagctgcgccgagttgtgtaacttgctgctgcttgggtttaacgtcgcctgtcaattgaccatatgtaaacctgcaatgtttgcctagcacattcctccgtaacttgacagggatatgaaattcgtctcctatggaatgctataacctcagaagtcttaaattattttgaagaagcggcctaaatatttggttgcttgttgaattgtacgattgaaacccagctgccttttattttgtccttttttgcagtgttttgctaatttctcttacgaattacgatttgagcttcggttcatattttacttccaggtcagagcttgagcgatttggcttgtttgcccttgtaatcttcaatcatcggggccagagctatttgttggccactcgttttttattctttcggaatataaaaaataa

SEQ ID NO: 32486 - DNA, 266 bp, Zea Mays
tacatttagctgtgacacaaagctattgtagtatttctggtcgtccttgtaatctttccaacgagttaggataggcatggtttcccaaataatgataccagcctctgatgcaaacttggcagcttgaacaggttcatgtggcctttttttgccttcctcgacagctatgggcagtctcctttgcataactttagtcatcctgtccaattgttttcccttagttgctgccctgggtctccatggtgctcgttgtgtaggagctacaa

SEQ ID NO: 32487 - DNA, 3762 bp, Zea Mays
aaacgaagtggcgcctcgaatcagcgctcgacacctcccgctgcgcccccatccgcgccgggcaggcatgggcaccgccgggtcggcgcgcgcccccacctagccgtcgactcggcgctgctcactcgcgctccacgcccacgcccacgcccaccgccccccgctatttatgcgtacttgcttgccgggagagtcgccggagagctgggcgtcctcctcccgttccagagcctcactgcttcgctccacccacccttaagcaagagtggtatctggtggttttgtttttcaaaagaagacagaaatgtcttccttgaggcctgcccagtcttctagttcatccagcaggactcggcagagctcccaggcacggatactagcacaaacaacccttgatgctgaactcaatgcagagtatgaagaatctggtgattcctttgattactccaagttggttgaagcacaacggagcactccacctgagcagcaagggcgatcgggaaaggtcatagcctacttgcagcatattcaaagaggaaagctaatccaaccattcggttgcttgttggcccttgacgagaagagcttcagggtcattgcattcagtgagaatgcacctgaaatgcttacaacggtcagccatgctgtgccgaacgttgatgatcccccaaagctaggaattggtaccaatgtgcgctcccttttcactgaccctggtgctacagcactgcagaaggcactaggatttgctgatgtttctttgctgaatcctatcctagttcaatgcaagacctcaggcaagccattctatgccattgttcatagggcaactggttgtctggtggtagattttgagcctgtgaagcctacagaatttcctgccactgctgctggggctttgcagtcttacaagcttgctgccaaggcaatctctaagattcaatcgctaccaggtggaagcatgcaggccttatgcaataccgtggttaaggaagtcttcgaccttacaggttatgacagggttatggcttacaagttccatgaagatgagcatggggaggtctttgctgagatcaccaaacctggtattgagccctatctaggcctgcactatccggccactgatatccctcaagctgccaggtttctcttcatgaagaacaaagtcaggatgatctgtgattgccgtgcaagatcggtgaagattattgaagatgaggcgctctccattgatattagcttgtgtggttcaactcttagagcaccacatagctgtcaccttcagtatatggaaaacatgaactcgatcgcatcccttgtcatggctgttgtggttaatgaaaatgaagacgatgacgaacccgagtctgaacaaccaccacaacagcagaagaggaagaaactgtggggtctcattgtttgccaccacgagagccccagatatgtgccgtttccactgcggtatgcctgtgaattcttggcccaggtgtttgctgtccatgtaaataaggagtttgaattggagaagcagatacgagagaaaagcattctgcgaatgcagacaatgctctctgacatgctattcaaggaatcatctcccttgagtatcgtatccgggagtccaaatatcatggacctcgttaagtgtgatggtgctgctcttttgtatggggacaaagtatggcggcttcaaacggctccaactgagtctcagatacgtgatattgccttctggctttcagaagttcatggggattccactggcttgagcactgatagcctccaggatgctggatatccaggagccgcttcccttggtgacatgatctgtggaatggcagtggctaagatcacgtccaaggacattcttttctggttcaggtcacatacagctgctgaaatcaagtggggaggtgcaaagcatgatccatctgatgaggatgacagcagaaggatgcaccctaggctgtcctttaaggctttcctcgaggttgtcaagatgaagagtttgccatggagtgactacgagatggatgctattcactcgttgcaacttattcttagaggtacactgaacgatgccttgaagccggcccagtcatctggtttagataaccagattggtgatctcaaacttgatgggctcgccgaactgcaagcggtgacaagtgaaatggttcgcctgatggaaacggcaactgttccgatcttggcggtagatggcaacggattggtcaacggatggaaccaaaaggtggcggacttgtcggggttgcgagttgatgaagctataggaagacacatacttacacttgtggaggattcttctgtaccaattgttcagaggatgctatacttagctctgcagggcagagaagagaaggaggttcgatttgagttgaaaacccatggctccaagagggacgatggccctgttatcttggttgtaaatgcttgtgccagccgtgacatgcatgaccatgttgttggggtgtgctttgtagcccaggatatgactgttcataagttggtcatggacaaatttacccgggttgagggggactacagggccatcattcacaacccgaacccgctcattcctccgatatttggcgccgaccagttcggatggtgctctgagtggaacgcagccatgaccaagcttactgggtggcacagagatgaggtgatcgacaggatgctccttggcgaggttttcgacagcagcaatgcttcctgccttctgaagagcaaagacgctttcgtacgtctttgcattatcatcaacagcgcattagctggtgaagaggcagagaaggctccaatcggtttctttgaccgcgatggcaaatatattgagtgccttctgtcagtgaacagaaaagtgaatgcagatggcgtcgtcaccggagtgttctgtttcattcatgttcctagtgatgacctccagcatgcgctacatgtgcagcaagcctctgagcagacagcactgagaaggctgaaggctttctcgtacatgcgacatgccatcgacaaacctctctcaggtatgctctattctagggaaacactcaagggcacagacctggatgaagagcagatgaggcaggttcgtgtcgcggataattgccatcgccagctaaacaagatactcgccgacttagatcaagataacattactgacaagtcgagttgcttggatttggacatggctgagtttgtgctgcaagacgtggtggtgtctgctgtaagtcaagtactgataggttgccagggtaaaggcatcagagttgcttgcaacctgccggagagatccatgaagcaaaaggtttacggggatggtatacggctccagcagatcctctccgacttcttattcgtttcggtgaaattctctcctgctggtggctctgttgatatctcttccaaactgaccaagaacagcattggcgaaaaccttcatctcatagacttcgaacttaggatcaagcaccaaggagcaggagtcccagcagaaatactgtcacagatgtatggggaggacaatagagaacagtcggaggagggcttgagcctccttgtttctagaaaccttctgaggctcatgaatggcgacattcgtcacctcagggaagctggcatgtcaaccttcatcctcactgctgaactcgctgctgctccttcagcagctggacattgaagccgtcactgcaaacaagtgccaaatgtcctcaagagtattatttctgcccttggtgccag

SEQ ID NO: 32488 - DNA, 2708 bp, Zea Mays
gactcgacaccgcagcatcaaccatcagagcaactccctgctcaggcctcaaaaagactcgcctggatcaaagcgcgcggcaaaggtagctcgaccgtgcgccagagcagcagagctagtccgctcggcgccgtggccggacctcgccagcgcggcaaaggtagctcgaccgcgcgccggagctagtacgctcggcgccgtggccggacctcgccctcgcggcagcggtgcgcgcagctgcctgcgcggcggcagcggcggagctctcccacgcagccacgtttggtgtgcttcttcctcccctacgcccgcctcctctttttcatcgagcgtgcgttggggcgaccccgtccgtgaaaaatggcgggcctcagcggcggcggcggaggctggggcggctacgacgacgacgactggggcctcagcgcggagcagctggaccagatggagcgggacgccatccgccagctcgctgagcgcaaggcctccgcctccgcggcctccaccgcccccatccccgcctcccctctcggagccacctcgccgctcccctcccgcgctaccgtgccggcggcggccgtctcgtcgccgctcgggggcaaccaccccgctaccagggcctctctggaggcccgcttcggcaaggtagaagcactatctccctcgagaaatgcagtgaataatagccagggcagctcgcctaagatatctgttcatcttttcctccattctagcggtatgatcgctgcaagattcccatacagccagttacttgtcgatgcatttcggaagataccaaaagccagttggaatgctaaagaaagggtatggatgtttcccccctcgtctttagcaatagtagaggaggttcctcgctcagtacctggattaactgtggaggttcacaaattggatccgctagttcagcgtgctttagctgctgctttacgatccaaagatcttcgaggtttgtatgacaggattccccctcatctcgagtcaaagcttatgccatttcagcgtgaaggcatcaggtttgttttacagcatggtggcagagccctgattgcagatgaaatgggtcttggaaagacactacaggcaattgctgttgcttcttgccttcgtgatgcctggccagtccttgtaatctctccatcttctttgcgattacattgggcatctgcgattcagagttggcttaacatccctgtggaagatatcttggtggtattgccacatactggaggatcacataaagcaggattcagagtggcttactcaaactcgaaaggagattttcacttggatggggtgttcaatgtgatatcttatgatgtagttcccaagatacaaagcacacttctggatttggatttcaagattgttatagctgatgaatcacattttatgaagaatggccaagcaaagagaacagttgcttcacttcctgttttgcagaaagctcaatatgttgttttgcttagtggaactcctgctttgtctcgcccgattgagctctttactcagatccaggccttgtatcctacagtgtacaagagtgttagtgagtatggcaatatatattgcaagggtggttttttcgggttgtatcaaggtgctagcaatcatgaggagctgcataatttgatgaaagcaactgtcatgattcgtaggttgaagaaagatgtcctttcacagttgcctgttaaacgtagacaacaggtctttctagatttaagtgagaaagatgtgaaaaatgtccgcgctctgtttattgagttggagactttgaaggtcaaaattgagtcctctgactccaaagagatgatcgactctctcagatttgcttaccagaatattgtcaataaggaaggttgcaagttcttaatatttgctcatcaccaacccatgattgatgccattgagaaacatctcttgaagaagaaagtaaagtgtatcaaaattgacggcaagacacctttaactacaagacaaaccttagtcacagatttccaaaacaatgatgacgtcaaggcagcagtgttatccatcaaagccggaggctacgggataactttgacagcagcgagcacggtaatctttgccgagttatcatggactcctggggacatcattcaagctgaagatcgcgcgcacaggatcggtcaggtctcgtccgtgaacgtgtattatcttctctcgaacggtactatagatgatcttatgtgggacgttgttcagggcaaacttgagaacctggggcagatgctggacgggcaggagaagacgctggaggtttcccagagggactgcaggccaagcccctcgaagaagcagaagacactggtcggcttcctcaagcggcccagcgcgtccacgtccgcggaggagggtatgcccagcacttaatgaagcagcctcggatctgaggcgcggtcgtggcttgtgagcgaaccagatcaggtcataggcagccagcagccacaatggtgttcggctctatcacgttgtaacacttctccctccgtatttgctcgctctttcgtttcctgagagatgacagatgtatgcgtttggctgacgaagggaagaaaaatgagcaaaacttgaagtatttgttagggaaggatcctaaacactgaattatatgataaatttaacataattgcgtttgctaaatcagaatttggtgtaagccagccaat

SEQ ID NO: 32489 - DNA, 686 bp, Zea Mays
gaaaggaacccaacccacgaagcatccgccacagccgaactggcccgatgtcgctggttgcctacgatgcctcctccgatgaggaagacgccggcgagcctgccgccgccgcggcgccacaccctgcccccatcggtccgcagccaaggcctccgtctcctacggcagtgagccctgctcctcggcctacgcctacgcttacgccgccgccgccagcagccagccaggatgcagtgtcacatcggcagccttggccaccacctcatatgcatgttgagtctgggtgggacagtgctgatttacgtccaatttcgtggccgtctttcaccatagtagttcatgattcagcagtgctcatgttatggccgaaaggagtgcatgttgttgctacattctatcatcgaggagttcacgagttggtgcaacctttgtcagcccgagtaactgatggacaacgctataggcctatgaaggtggatggggctcccaaatggatggtgattcaataccatggtgcagctacctgtttacccggcgttcaaccttctgtttccacaggagcggtagtggagctgttgttgctctcggctgcaagtgctgctatggtcggaatgaagattgttgatgttggaattgatagtggtgctaacagggtgcagctcgcgggcaagctcaagatatccaag

SEQ ID NO: 32490 - DNA, 1180 bp, Zea Mays
cttgccatttaattccaatgtatttaggcaatgccaagtacagtcatgcatgcaggttactgcaaaggggtatgaaacattgtcatactgatgaccacagtaaacgtatcccctgttttactcagaggggttgtgattttatacggaaactctgacaattcgatcaggccaataggagtatgctcgcatgtttatgcaaaatgattgtaaggagagcctagcaatgagcagcatgcatataattaatatttggcagtgacaagctaccgagataaattgttataaatgatcttgaaattatgttatcacggttttgtgcagcaatatattatatgactactaatcccgaaacgacaagttcattcaacatcgcattagtttatgaaatggtagggtcgtcggaggaggacgaagcatgctcgggaggagacacggaggcgacggagccggggcagcaggagcacagctcccgcctggcggaccgtgagctgaaggagatgctgctgaagaagtacagcgggtgcctgagccggctgcggtccgagttcctgaagaagaggaagaaagggaagctgcccaaggacgcgcggtcggcgctcatggactggtggaacacgcactaccgctggccgtaccctacggtaaccatgcatgcatcctggcaaacacgcagcagcagcatcgctcgctggaatggcagatctgtgaccagcattagccggcggtgcaggaggaggacaaggtgaggctggcggcggcgactgggctggacccgaagcagatcaacaactggttcatcaaccagcggaagcggcactggaagccgtccgaggacatgcggttcgcgctcatggagggcgtcaccggcggcgggccctcgtccgggacaacgctctacttcgacacgggcaccatcgggccgtgaccaccacactaccagcttgggcaacgcaaagtgcatacgtttttctttgtgtatatgggcgacaacgtgtcggtaggtacactcagcatactggagctgctgtccagttcagttcagtgcatatggcctcgtaaaggactctgtaccatgatgatgtaatgctaactccaacccttctcacaaatttctatttttcttattttctattttatatttaaatatcttttgtcccagtttgccttctcttcattcttc

SEQ ID NO: 32491 - DNA, 1238 bp, Zea Mays
cttcttctccatttgcttttttccctaaagtttctccgtcctggcggctgagggctgctgcttcgtccctggtggcggctgagggctgctgcttcgtccctgatggcgcctgattgcctgggcgcgatccgcccgtgcttcccatagcgtactccgtccctggcgcccccagtgaggtccgtccgtggcgctccgcctcccgtcgtcttccgtcaccacgctctggtcgtatccccgccgtagcgtcgtccagtgctgccctgcagaccgcacatctgtccacctgctgtgtggtttggttccctccatggattctaccaatccgaaccataaagatgacgagttcccatagaattcgaccgcgaacgggacaaattttggttccaatatgtacaaccagctgaagaaaccggttatattatggcaattgagaccttagatttaagtactattgtaatccgtatggttcttgctattaatttctaggcatatgaaacaaataccgatgagcgtgcaattcctatatattaaagctatgtagctagacgcacagccacataggccacgtcgttcaaatttttgtaagccatccgatacaagatcgttggttaccaggcgcgggagcaaaggtagccaaccacacgacgggactcttccagatggagacgaaacaccacatggcgggggaaggaaaagagcgatcagatctcagacgccgtcgtccgtctccgccaagctgcatcgcctcaaacgctttgtcccggccatcacgccggccatggccgccatgtcgaagaaggcgactctccatcccttccgagttccgagttcatgctcccctccgcccctggcatcatgccacgtcccgcggaccgtactatcgcctccacagccgtggtcgctcggccacacgtaccggtcgcttcgcctgccgtcgctgttgcgacagccgtgatacctgccttcatcagcaacacgtcccaaaccgactaagcgtcccgggccaccgcgatacttcatttccgaaatcgctgcggtggcagcagttatgcctgccttgctccaaatatatagcactgtgagacgagtagcaaatcaagttgaagccatcggaaattgtcaaacctcttttttctctctctttttggggtgaagtctatgtgggaacactgaacctgcaaccgagaccgtagcgattcgacaatatcactagaggatcatacttctacttagggatg

SEQ ID NO: 32492 - DNA, 2118 bp, Zea Mays
cgccccccgagccgagcgttcccctcgttgccgcgggccggccggaggtaggattccttcaaattcccgctgcgtgcgacggcacgccggcggtcgccgctatgtccccctctctcgtgctggtgcactcactcccgctcccttctcgccgcgcgctccccatccagctgccccgccgcctcgcccccaaacacccgtcccagtggtcgctccgcacgcctcgacgtctcgctgtctttgccagggcttcggcgtccgttgtggtgtcgccgcacggcgagggaggtggtggcacggcggcggggcggaagagcacggggtataggaaccggttcctggacctggcgcggctgggggccgtggcggagggcgcggcggaggccttcttccgcagcgagatccggcggcggctggccgtcactgccgcgctcatcgtgctcagccgcgtggggtacttcatcccgctccccgggttcgaccgccgcctcatcccagactcttacctcagcttctccgcgctccctgcagatgaccttggcgatttctcctcagaattgaagctttcttttttccagctggggatcagtcatcaaatttcagcatctattgtcatgcagatggtggctttctttgtggtttgcaactgtggctgcttttactgtgtcatgcttttccctgcagtattcagtatatgctgcaagttacagggtcaagcatgtaattataacaagtcttctgcttgttcttggtgcaatgtcaatgacatggatttgtgacaccattacagaatttggatttggacatggctcatctttgattatctgtgtgggaattttgactggctacacagatacactacacaagatgataactcagttttcagggaatttttcctattgttggccttacatcttgggagtagctggaatttttatgatactcaccatgggggctgtgttggtgactgaaggatgcaggaagataaagcttcagtactatggattcaaattagcatctggtgcagggaatgaaagcagcccagttacagaggttgagccatatatccccttcaacatcaatccaactggaatgcagcccttgcttacaacctcatacttactagcttttccaagtatcatggccagtatttttgcctcacccttttgggaaaacttgagggaaattttgaatccaaagacttcaactggtggtagtccctgggtttattacttgacatatgctttccttgtcttcatcttcaatatttttgatattgctaacttacccaaagagatatctgattacctgaataagatgtgtgcgagggtaccaaggataaagcctggaagagcaacagtagactatcttacaaagatacaaacatcaacacgtttctggggaggtctactgctaagcttgcttgcaacttcctctttattgcttgaccgatatctcaggcaaataaatgaagggttgtcaataggattcacatcagtcttgattattgtgggctcaattattgagcttagaagatcatatcaagcgtacaatgtgatgccagcactgagcaaagttttgaggagatatggtgcttaagagtatgtaagctgatacgttggtgatgatggcaccatccactagctcgtggtgttgcaaggtcgattggtctttagaaacagcatggatatgatgagaagtttaccgctcaagcttctgttagattaaaaggtggaaggaacatggctttacaatcacatcggactttatcgacaaggtgaactgaggaagcaacaaacatgcccaacaacatggctgtgtgtatttgttggaagtgatctaaaatcttccatgtcctaatcgccatactggatcacatagctaatctgttgggttctataaattctccaccgttcaaatgctccgaaaggaagggcctttggataagtttctctttttttccctttttttgtttgggtgtgcacacattgttggacgggctgtagttgaatgagtagagtgtacgcctcgggctgaagatgagtcggattcaacgacgaacatttttgttgtgcccgcgaatggccaatatttcgctttcatgtacaactctgatcggat

SEQ ID NO: 32493 - DNA, 3609 bp, Zea Mays
cccaagccacctctgcttctcctccgtctcgtcgtcggccatgacacccgccggtggcgccaaccactccccggcgccgcgtagcctggtattcgccttctacctcaccggccatggcttcggccacgccacccgcgccatcgaggtggtgcggcacctgatcgcggacgggcacgaggtgcacgtggcgacggccgtgccggagttcgtcttcaccgccgaggtgcggtccccgcgcctccgcatccgcagggttatcctcgactgcggcgccgtccaggcagatgccctcaccgtcgaccctctcgccacgctggataagtaccgtgaggcggcagtgttaccccgcgagttcatcctcagggccgaggctgagtggcttagctccatcaaggcagaccttgtggtctcggatgttgttcctattgtgtgcaaggtggcttcagatctgggtgtccgctctgtatgcattgggaattttagttgggacttcatatatgctgaatacatcatggaggctggatatcatcaccgatctattgtgtggcagatagcagaggattactcccattgtgacatattacttcgactacctggatatggcccaagtatactcaactatatttggttactcttttttccttaaaaattgtgttccctgtttctcagttatcatgaaaatagagtattatttcattccatagtgccggcttttcgcaacgtcattgatgtgcctcttgtggttagaggattacgcaaatctagatctgagttgtgatctattaggtgaggaaggaactaggaattgaggagaatgctaaggtgctcgtttttaattttgggggtcagccagcaggatggaaactgaagcaagaatgtctccctgatggttggatttgtttggtctgtggtgcctctgattctcaagatgttccaccgaacttcattaagcttgcgaaagatgcttacacacctgatgttatggcagcatctgactgtatgcttggaaaaattggatatggaactgcaagtgaggctttggcctgcaagctaccattagtgtttgttcgcagagattacttcaacgaagagccatttttgcgaaatttgcttgagcactaccaaaacagcattgagatggtcagaagtgatttccttgctggacactggaaaccgtacctacttcgtgctctcacacttcaaccatgctacaatggcccaataaatggtggtgaggtggtttcccagattctccaggacactgctattggaaacaaatgtatttctgataaagctagtggtgcaagaagattgcaagatgccatggtctcaggatatgtacttcaaagggttcctgggagagatgcaggcattcctgactggtactctgtgtccgaaaccaaaactggtggcggtccgacctcacaaaatgttgctacaaaggaaagtgcagcattatgtattgaagacattgagatactccatggggaccttcaaggattaacagatacagtggactttttgaagagcttatctgaacttaatggaaatgatttgaagagccctaagaagcaagacctagagagaactgctgcatctgttctttttgactgggagacagaaatatatgtagcaagggcacctggacgtttggacgtcatgggtggcattgctgattattcagggagtcttgttttgcagatgcctcttcgggaagcttgccatgttgctgttcagagaaaccatcccagcaagcagaagctttggaaacatacaaaagcaagacagcttgttaacggaggcttggtacctgtgatacaaattgtatcatttggttctgatttgagtaaccgtgcaccaacttttgatatggacctgtcagattttatggatgatggtaaaccaatatcctatgagaaagccagggagcttttctgtcaggatccatcccaaaaatgggctgcctatgttgctggaacaattctagttttgatgactgaacttggtgcccagttcactgacagcattagcattctggtttcatctgccgtgccagaaggaaaaggtgtttcatcttctgcatcagtggaggttgctacaatgtctgctatcgccgcagcctatggtttaaacatcataccaagggatcttgctttgctttgtcagaaggttgagaatcatgtagttggagctccttgtggagtaatggatcaaatggcatctgcgtgtggagaagctaacaaactccttgcgatggtttgccagcctgccgaagtgaaggaattggttagcatacctactcatatacggttctggggtctagattcagggatacggcatagtgttggcgggggagattatggatctgtgagggtaggcacttacatgggacgaaagatgatcaagtgtacagcatcagatttagtttcagaatccttgacttcagggtcccctgctcagtctgattgttataaagaaaatggtgtgggcgtactgaaatctgaagctgcactggagtatttgtgcaacctaccacctcacagatatgaagctgtttatgcaaaagacattccagaggtgattagtggagaagcattttcagagaaatatggagatcacgatgacacagtgacagttattgatcctaaaagatcttacagtgtgaaggctcctactagacatcccatatatgagaacttccgtgtcgaggccttcaaaacgttattagaggcaggtaatacagacgagcagctgtcagcccttggagaacttatgtaccagtgccacaacagctacagcgcatgtggcctcggttctgatgggactgacagactagtcaacctggtacgagaagtgcaacacaggaggacatccgaaggcggaagccctagtctgtttggcgcaaagatcaccggcggaggctccggcggcacagtatgtgttgttgggaagaactgcgccaggagcagtgaagagattgcagagattcagcacagatacaaggctgagaccgggtatctgcccattcttttcgacgggtcgtctccaggagctgggaagtttggttacctgaagatccgacgtcgttgtccctagtggctgattgggaaacgaagaacttcagttcgagctttgtcacatatcactcaattgttaagaacctcactccaactctccaagccattgtagaacatagaggcgtattgccacttgcgatgattcgtcgttcacacacaaaatattatcatgtgctacaccaattctggaagctactagaggaaaatgtgaggaatataaagaaactcttgttgagcagatgtagtctagtggtctccgtgtgcttgctgcagtgtaaccaaactccaagtagatgtgctctgggctctggcatgtggtatgtgatgaagtcgaggatggtttcttgccgtttgatgaccagtgtagtcgttggttaacttgtcagtcgtaaactgatgttgtcagttaggagcggataaagtttgtgtgtgttgtcagtgtatctgtgtgtaagtttattggacagaccgaaagatacaccacgaacccagatgaagtaggtaatagtcgtatgtgaagtttttatcatta

SEQ ID NO: 32494 - DNA, 1367 bp, Zea Mays
gaactccagggttcacaaatttgctattatcaaatgcagtcaactggctatttgtgatggatttttctttgctgtcaaggaagtatcattagtggatcaaggactcaatggaaaacaacgcattctgcagcttgaacatgagatatctctcttgagtcgtttggagcatgaaaatatagttcaatattttggaacacataaggaaggtgggaaactatatatttttcttgaacttgttagtcaaggatctttggcagctttatatcaaaaatatcatttgcaagattcacaagtctcagcatatacacgacagattctgaacggtttgcactatctacatcgccggaatgttctgcacagagatataaaatgtgccaatatcctagttgatgcaagcggactggtcaaattggcagattttggacttgcaaaggagatgtcaattttgagccaggcaaaatctagcaagggaactgtctactggatggcccctgaggttgctaaggctaagccacatggacctccagcggacatatggagtcttggctgcacagttttggagatgctgacaggcgaagtgccgtatcctgatatggaatggtatagtggacctaaaatagcagtagtcttggtcaagatgattccgttattttcacgagaaatatcatagatgcgcgcgcgcacacagacgcaggctttgctcaaaattggtaggggaataccaccagaaattcctaatacattatcagaagatgcgcgtgatttcataaagaagtgtgtccaagcaaatccaaatgaccggccatgtgctgctcagttattcgagcacccatttgtgcagcggccactgcaacaatatggcgtgtgatgttctccttggctgctaacacatttgattgtacataagctgatttaacttacatgcctaagctgttgatattatgagaatgatcccttggcccgagttccgagagtgaaccctcaatctgaaggcatccgttgctcaatgttccattttcatgctttgtagtttaggtttaggggtaggtcatcccttgctcactgtaccattttcatgatttgtagtttatggggtctaaaattgctttcaatctggtaagcacacccagacacttagaagcaacaatgtttgctttgatgtgggatgacttgtataagtggttcttttcgagcttgtccactttttacaccatgctctaacgactgtctcagcatgatatgcataatgataaacaagggaaatggtttaaaatgatgtttattggcgccttttgaaataccacatgtttaaaacgatgactattggcaccttttgaaataccatatgtcaacagagtggctcttat

SEQ ID NO: 32495 - DNA, 1665 bp, Zea Mays
gtatttttttctccctgtgaagggagggaacagcgtcgtcgtgaggtaggcggtgacggcgggggtaaaatgactttcgaggggctcttgtccaggattgacatcttcttccttgatttttttcgatatttcctccccgcggattggtctattcaaagggagaaaattcgtcgggttgatgtcagaaaaggggaagaggagacagacgacgggtggagagcgagagaagtggggaaggcgagcagagcaacaaatcaagtctgtttcatttcagcaatcagcaccaacccccgtccaatcgctgcggctggatgattgggcagtgtcagcctcgcgttcgttcatttaatgtttctggtagcggtcaatgcgggatggttgggtggcggattggtattttgggactccatgtactacttcctgtcttcctccaccttcccggagaagcagcagaggaagggagggtgaaagaagaaatggtcgcaaagaggtggagggaaggaaagggtcaatgctgctcggtgtccctcaacctcaacacgggcgcccctactttacttgcttgttcccggtgtccctatcactctcagaggtggacgatggatcgtccctttcacatttcacacaccctccgttgccatttcaatattatcctagtcgccagcgtaagctcgccgtagctacctgctctgctactcgaccgctggcactggcgcgtttctttattgcttcgtccccttcatccggcaactccactgtcagcgccctattcggctcaatccatccctctgcttggcgtcctctctgctgcttgatttgctacctgtacctggtgctgggaatggattctgctatcagagggatcctgcaagtgtgaaatctatatattctggacaaatggggcaaaatatgttacagccacaagtgctctgcctgtgctccattatcctcacgttattttttacccttttgcaaccgaccgctgcacagatcactgcaccatgggaagttgatgccctcaaggctattaggggcagcttgatagatccacacggaaatcttagcagctggaaccgaggagatccatgcatgggaaattggtcccatgttatctgttacaatgcaacaggcagtgatggatacttccatgtaaaagaattacagctcctaagtttgaatctatctggaattttggctcctgagcttggtcagctttctcaaatgaaaattatggattttatgtggaattcgattggcgggaccatacctaaggaggtcggaaatatcacttctctggagttaatgctcctgaatggaaaccaattgaatggctctttaccagaggagattggcttccttcctaatctgaatcggattcagattgatcagaaccatatatctggacttatacctaaatcatttgctaacctgaataaaaccaagcactttcacatgaacaacaactcattgagcggtcaaatcccacctgagttatccagattaccttcacttgttcacctattattggataacaataacttgtcaggctacattcctccagaactatcaaagttgccaaatgtgctcatcatgtatgtagagtttttttaaataactagagtgaacaacacaacatattaacgtctgtaggagtgtgtgtgtgtg

SEQ ID NO: 32496 - DNA, 534 bp, Zea Mays
aatcttccattggtatgaactgtgatctgattctttgtctcgaccggtgcaggaaggaggtggtgaggagggtcaaggccgcggtggcgggacgtgagtgaagtgagctttgtcgagcctatatgtggaggtcagtcatgaagctgggactaggacaagggcgagctgaaggctagaagctgtaaatgcacccttcaagagtcttcataggccaagtctctactggaaggaaacagtgggcgatgaaagcagggaatttgggaggtacatgcgacagagagaagagcaagagaagcaggaagcatagttgttcactcgggctcctgtaaccaaacatgataagcagatcgagaagcgcataaggatacaacttcatgggtatgttcagatagtttatcttttgttgcttattgactgtgtaaatacacaatcgcctttgatagcacttggtttgcccattgggattttcagcttgtcttaatatccaacgtacaccaccatctggtatctgatcccgacaataggctaggaggc

SEQ ID NO: 32497 - DNA, 982 bp, Zea Mays
tctgcatctgtactttccacgacatgttcaatctccttctacggccatgtctagactttccacatcggactcatcaagtgtgagccaaaagctaacatattctccagcaaagaataaacatgagttcacactgccgacagccttagccggtatggagcttggcctcgagtgtaggcccccaggaatgtcaggctaacaccaagccaagctgggttcgtcttctacatagtctcgtttgccaatatgcgatggtatggattttttcactgacaacgatatttcttgtttgtttttaaggggatttctatgacgtatattgtcctctatctatatctatactataataatctattaacaatttaatatgggccgggcacctggtgctacttcaccatccgtgctaccacaccgcgcaaaaaatagttcaaagtgagcactcaaacccacagcccattcctccaaccatttgagggtaaccactaggccacacttacacttaccttagtgtttataaataaacaataattatatttgaatacatatctcatacctatttatctatattgctatattaagaacttaatgtgggcacctgatgctaccacaactttgtggaccccagcgcccacgcagccaactactgcgttgctcagcatccaaccctacccacgcagctaccagcctaccacaccgcgcaaaaaagtgcgagcgagcactcgaatccacaccctagctccggaaatttggagctaaccaccacacgtatcttggtgtttataaataaacaataattatatttaataaatatcttaatacctatttatatgatatataaaaatcgtagcaaaatatgagcaactagctaatattatatatgagttttctcgtgtaaaggttttctcatgaatttataataaggggataatcattatatgttttatcactttattcttatttttattagatttaaagaaaattttaa

SEQ ID NO: 32498 - DNA, 243 bp, Zea Mays
ttgagcggacgcgcaaacagcttatggactcgtaccacgagctgggcgtgcggaccactgactttgaagtgccagatcaagagcccggacttcgctgcctcgagtggctgcaggaggagttgctggcgctccccgccattgtggagggctttatgtcctatgcctccctggtcacctgcgaagaggcgatgaacgcgctgtcccgcgaagggtgccgacactatgaggtcttcgaccaagctg

SEQ ID NO: 32499 - DNA, 773 bp, Zea Mays
aggtcccatgggttgcacgaattgacttgatccaatctcgatgcattgtaaatcttcttttttggtgtatgcttgggggagaggagagcacgggaggcttggatttggagatgataagagtagtcacatggtgcccctaaaggttgagcttctagctggagaggatattgttcaggtatcatgtggaggaacacattcagttgcgctagctcgagatggccgaatgttttcttacgggaggggcgaccatggccgtctaggctacggcaggaaggtgacgacgggccaccccatggaattgcccatcaacctgccgccgctcagcagcagccgcgacggtcggtggcaggcgaaatacgtggcttgtggcgggcggcacaccctcgctattgcggagtggacagaggccactgattgatcaccgtttgtggaataagcacaaggccggtgccaacgggcgtaggtggggctgcagtcgatggcgctgccggccgccgcggtcggtacttaccagaagtagttcagtaccgactgccattgccatgtgtcgtcttttaattagttgatgtccaataaattcataagttttttttaaaaaagtctaagtaatctgaaaaggtatttatgaattatgtaacttttttacttttttggtattatggtattttttatgtttatatgagttaatgtaaaattttatttatgattttataaattacatactgtgtatttatattcatgaactatataccttttttttattttggttactt

SEQ ID NO: 32500 - DNA, 1420 bp, Zea Mays
gagtcggagaccccaaacctctgtcgaaagtttcacctccggtcgctggtttcctccaatctccgtggtagttcagcgcgagcgggcggcggggtttgagctcgatggtcacttccggcgaacaatcggctggcggcgggtctgcggcgagggcgtcgaagctgcggtacccgctgcggtcggcgagcaaggggaaggcggcggtcgtttccccggcggctgatgctcctcccaccatctctgctccgcgacgatgtcagcaagagcatgtgtttagacctttctgtgaaggataattctgccaaacccccacggaggcactcaatacaaaccaagccaggagctagcccaaggccaacaccttctggaactgtgactccggtgtctggggttcggtcaaagaggtcggaaagccaggggaggtttgataccccgacatcagaagtgtccatgtccatctcaaggcgcaagttcagcacgctttcttcaatctcgtactggatgacacagatcaggctggcagaggctgcttccaagcactcggtttctctgggcttctttaagcttgctcttgaatcagaatgtgagcctttggaccggatgagggaagaactcaagtcctacgtagcacggcatggcctggcgacagaattggaggacccagttaaggacattctccaggtttatgatattttggatgattttgagaagctgaagatctctgcagagccctcacagcaaccaaaaaagtctgacaaggctgctcgtactgccacaaatgcgtcaccgaatggtaacctgaagccaaggtcactgaactctgatgctactgaaagcaaggaagctgtaaagaaagagagcattcagaaagtaaatcctggtgcaaggatcagaggctcctgtaacaggaatccagtcaaaaacaccaccgcaaaggaagcagttgccaagaacaccggtaaggaaaccaagaaaggggccaagggtcagcaggaagttagcgaggctccgtcagcccttccaaatcaggaatctgctgatgttgtgaaggagatcacccatgaagataaagagaacatgggcgatattgaaatggcagtggatgttgccgtagcccaagatatctagaacagccggaccaacttcagattcgatccccttttttttctatcgctgaagatgaagtgttagcgtgtggttgcttattttggttttcaattgttaatatgttattagtagagcttgtctgtgtgattgctgtctggctggaccttgaacggtcttcaagagcgtgtcataagttgatgattgctttcattcctctgtcaagtttgcggctttgcatgtgctaatccgtgcaactgaatatagttgaatttatctattctcgtggttcctccgggcacaagatcctcccctg

SEQ ID NO: 32501 - DNA, 715 bp, Zea Mays
ccgatttaccatatttctcggcatgtgcttagtacgttcaaacgcttgactcacggtaccacaccttaatccttattcaaattttcatcccgtggacaaccaatccccatggattgttgtccacaaccagcatcattatgagaagaaagtggatacaatcaatttcctgacctcgcgcgagtgctagaaaaatcactcgacttctaccgagatcctaattaataaagcagctactcgacctagcatactagtatccatcacaaaaaggattcctgagttcatgcaactagggtttcaaccaactcctacacttaagtgcacaatacaagcctacaatcactaagtgtagtaaaatagcatatataacggttatgcataaaaccggggcttgcctttagtttgacacttagatagtgtttgctgggggaggtactcgcttggcgagcatccactgattaagtccaccatccttccgtacgtccaccaactgcagcttgtggttggcaccacatcacttgcacgatcgtcacctctcggtcctaaatgagatgcaggatgcatatgtatgaatacaatgaaaaatatcacaagctatataaatacatggtagcaaactaacatttaattgtaagacatcgcaacgactatacgcaagcgctagctattcgtatgttatcggcgttcatcattaacaccattaacaagacgaccacat

SEQ ID NO: 32502 - DNA, 559 bp, Zea Mays
gaagaacatcacatataatgacaaagtgtataaggataaatgtcataaatatcatatatgtaattattacatagcgaaagtcttacaaaaataaatggtaatgataaagtgaactaattattatttccctagcaccacaaagttgactgggagacgccacttagatcaagtcaaactcctcgttgtgcggctcctcttcgaccacctgctcttcacctgtgcgggggtttatatatcgcaagagtgagctcacaaaagatcatagctcaacaaattgtggggaataatgtgcatgaactcgccaaaggtgggagttcatgtgaggtgtaaggctgaccaataaataaatgttaaagttgagcattgcttttataagttggtcaaaattttattatcagttactaaatgtaagtgattaccaaaccatagtaatagtaaataataataataataataataataataataataatcctaatgcgatgcaaatgacaaattgagtttaatttcataaattaatcatgtgagagtccaagctgctcatgaccgtgagcacggt

SEQ ID NO: 32503 - DNA, 4330 bp, Zea Mays
agtcccttcccttggctgcctctgtgtcttgtccattccagggctccagccagcaaagagctggattcttcgtatcccctaccaaaccccaccaccacgagcggccgccgcgcggcgagaccaggacgcatggcgactgcctcctccttcaccgccatctttttcagcagtgccttcgtcgcatgcttcgcggagccaaagtgcagatccagctgcaaaggaaggcaccattaccaccaccacctgtggctgcaacagccacaactgctgctggtggagggacactagccacaatcatgtgcatcgccagagaggaaggggttgtcgcgctctagaagggcgtcatccctggcctccactgtcagtttctctatgatggcctccacatcagcttgtgaaggctttcttcgtcagatgtgctgttgtgggtgatgtcagtttactaagcaagattcttgctgcgcttgccacaggtgtgatagctattgttgtggcaaatccaactgatctcgttaaagttaggttgcaagctgatggaaaggctaacacagtcaagaggagttattctggagcccttaatgtatatgctacaataatcagacatgttactttaaccatcatgggcagtaagtgtacaagattatttcttttttcgttgtccttaaaatatttcatgtttccaggaaggtattggagctttgtggactggccttggcccaaatgtcgcacacaatgtcataattaacgctgccgagttggacagctatgattagttcaaacatgtacctgttgactctaatgtctttgtggtgggcattatatttcattatcattattcattcatttgttctgttcatgtagatgtttctaaaacttcctaggtatactgataacgtgttacccatcttttagctggacttggtgctgattttttttactatttgcattggctctccgatggatgcaaataagctttgactaaatatcttactagcagttcacaaggttcagcaaaaaaaaaactaaaacaacacaattgttttgtattctttacttcaatagtcatcgagtgattcatcctccatattttgcacaaaaactaagggaacacctagcctacctaccgtggacaaataccatttgaagaattgttagataatttcacacatgtatttacatttttttcctaatgagtacgtgcaggtttatactatatattaatctaccatatctctatacacttagacatgactaattttcgactgaaattagctgcaatctcagaaaattcgttgaacattggttgttttaattttggggaaatcatgtatcttagagaacccttatttacattgcacatttgaagccatcatttaaaaaatcaaacaaattataaattaggatggatggaatatttgtttacattttccctagagggggtgaacattctgaagcattaacgaactacagcctaggaagaaatttaggtattggtacatttggaaaagtgaagattgcagagcataaccttacatgacatagggttgctataaagatcatcaactgctaccaaatgagaaatatggaaatggaagataaaaatatggtttcgggtgaaggaagttgttaatattaacaaattgttatcaacatttgggtttgtacttgccactcaaacttttatctctactaatatgaagaaggtaaggggtaggttgcctaccatggttctgcctaccccttgttctgcctcctgcgcctccacgctaggcaaccaagaatgttcttaaatgagcaactttttcatgcaatcaagaatcagaagtctgtgttggtttacatcttttctgaaagtgatttactattttatacttgagtaactttgtcctatgatatgagatatccaaattcatctaataattagttaatttgagatgagttggtcctacaagggtccataactgtattgtatgcacttgcacccacatatatctaataagtgagtctgagcagtgacatagtccattggtaccatgggttgtatggatataggtcactgcattgctgatagtgaggagcagaaagttcatgttattgctggtgtgctgacccttaccactccaattttagtccacccctattgaccacatagttgaaatgagtattataggtgtgattacatgagtcatatctgcagcatggctcatttttgaatgtttgctggtgggaggatcgtctcttctatgtctacaagaatattttgccagtgatgacggtgtttagaggatgggatccttgcaattgtcaaacaagatgagagaccccttgaattgcttgctaaagaatatgctatcaactcttttgacatagatcctcaaaacccctcttggtcccgttgcaacgcacggtggttggaagactcgatcatacgacgccagcaaagaggccaattctggtcgttgcgcaggcagcgtggcacgtcattcggcgatcgtggaaaggccttctgccatgagcccatgacgcgcatacgctcgcggcggaagcgaacgggtacttgtcacgtcctttccgagaacctcacagcagagtagcagaccacattttgttttgcagctggtgccgcaacccggacggccggaccggacggacggcatctgctccctgcccgtgggcggctggccccgatataaaactgacaagagatagactaatcaagtctctcaacccgagtctaatcttggtccccaatccaatcccgcacccaccattgcgagagatcatcagaggaccgcgtccaatcgaagcggagaggaggagaagggtgtgctgatggcgacggcggtggcggccacggccgcggcggcgggtggcagcaatgtcgagttcatccgcgcgcgcagcgacaagcgggagtaccgccgtgtggtgctcgcaaacgcgctcgagatcctactaatcagcgaccccgacactgacaaggcggcggcgtgcatggaggtcgaggtgggctcgttcagcgacccggagggactcgagggcctcgcgcacttcctcgagcacatgctattttatgccagcgagaaatatcctggagaacacgagtatacgaaatatatcacagagcacggtggctcttacaatgcatatacaagctcagagacaacaaacttctttttcgatgtcaatgtggacaattttgaagaagccttagatagatttgctcagttcttcattaagccactgatgtcacaggatgctgttcttagagagataaaagctgttgattctgaacacaagaaaaatttgttgtccgatggctggagaatgtatcagcttcaaaagcatctggcttcaaaggatcacccttaccacaaattcagtacaggaagttgggaaacactagaaactaaaccaaaagcgaggggcgtggacatcagacttgaacttctgaagttttacaagaattattcagcaaaccttatgcaccttgttgtttatggaaaggagagcctcgattacattcagggcttggttgagcgtatgtttagtgacataaaaaacactgatcagagatgcttcaaatgtccaagtcatcctctttcagaggaacatttgcagcttcttgtcaaagcactaccaatagaagaaggggactatctaagaattatatggccaattactcctagcatccagttttacaaagaaggtccttgccattatctaagtcacctcattgggcatgaaggcgaggggtccgtcttccatattataaaggaactaggatgggccatgaacttaatggctggagagagcactgacagtaatgaatattcctttttctcagtaagcatcaggctcaccgatgctggtcatgaacacatggaggatattgttgggttgatctttaaatatcttcatctattaaaagtagacggagtccacgagtggatatttaatgagcttgaagcgataaatgaaatggagttccattatcaagacaaagttgatccaataagctatgtgatgcgtactgtctcaactatgcggttgtttccaccagaagaatggctggttggagcagcattgccatcaaagtatgcaccacaaagaataaatatgatactcgatcaactatcacctgaaagatgttatgcaccttgagtccagccaatgtaacccactagtgttaggtatatgtaatacaaagatcactattaatgacttagggtttttactctccaacattggagttttttcttttgcaccttccctagccgtcgcctgcccactagggatgccaccaccatggtcgacggccctcctctcc

SEQ ID NO: 32504 - DNA, 2513 bp, Zea Mays
ttgccacgcaggcgatgatggatcggacggtgcagacagcctcgagatccgtggatccagcgggtaactagccttcccctgtccccgccaccgcgcggcgccacgtccacgcccacgcgctcggcctcgccttccgtttccaaccaggcacctcgccacctcctcgtgggatcgcgcgcaggagcggatcgccgccgcaggagagcgttccgagtccgaatacgtacgggatggtggaggcgccggccggtctgagcgcggcggcgcaggtgagcgcgctgccgctgcaggtggatctcctgcagctgccgccggaggtgcccgcgccaggggatcccgccctgcgcggcgtcctcgacagcctcttcgcgcattggctctcgctaccgaacaccgccgtgctgctcgccagcctcgtgcacaaggccaaggccagcggcggcggcgccgcggcggcgggggctgggatgctgccctccatgttgctgcaggggggagccgccgtgccgcctctctccccgaggtccccgcgcctctcgcggaggcccagcagcctcggcgttgccccacccaaccacgccgcgtcgccgctccgcccgccagccgcgcgccccgccaaggaggtcataccgcagtttattttcgagatggccggccaccgccgtacgaggtgaggaggcaatgcatatcgacagttgatcagctcttcgccggccactcaaatggtctccgggctccagaatttcggatggttaccagggaactctgcaaattaccgacattctttactactgttcttttcgataagatagacaaggagagcacgggattcgtgacaagggaggccttcattgatttctgggtgaataacaatctgatgagtatggatagtgcaacccaagtgttcacaattctgaagcaacagaatcacaattacctcacaaaggaggattttaaaccgattctgaaagaccttttggacaaccatcctggtctggagtttttaaagagcacacctgaatttcaagaaagatatgctgagactgtcatatatagaatattctattgcttgaatcgaattgggagtggacatctaacacttagggagctgaagcgtggaaatctactcaacgcactcaggcatgctgatgatgaagaggacatcaataaagttttaagatacttctcatatgagcatttctatgtgatatattgcaagttctgggaactggacacagaccacgacttctttattgacaaagaaaatcttattaagtatggaaaccatgcattgacatataggattgtagatagaatcttttcagaggttcctagaaaatttaccagtaaggttgaagggaaaatgggctatgaagatttcgtccattttgtattgtctgaagaggacaaatcatcagcgccaagccaagaatattggttcacatgtatagatttggatggcaatggcatacttacacacattgaaatacaattctttttcgaggagcaacttcatcgcatggagtgcatggcccaagaacctgttctatttgaggacatcttgtgtcagctcatcgatatgattggacctgagaatgatagctatttgacactgaaagacttccgaaggtgcaaattgtctgggcatttcttcaacattctctttaatctgaacaaattcatggcatttgaagctagggacccattcctcatccgccaaatgcgtgaagagccatcattgacagactgggatcgttttgcacggagagagtacgtaaggttggcgatggaagaagatggtgaagatgcttccaatgcaagtggagatgtttgggacgagtcactcgaatctcctttctagatttttttttatcaaaaaaaaaaacactgggaagacataacagatgttcacatgcagccctaataatcaagtcaaaatcatgatcctggctaagcatgaaaagttatttggtatcttatatctacagaaactatagttgaggcagctgcatgcttgctggcaccggccatccaaattttgacatgggagtacgtccacccagtttcctggtgacagtgagatttttggccatggcttccatgatatgctctagttttgctgttaaacttcaactgattgttctatggcagcaacaagagaacagcaccttgtgattgttccggaggcacatcatgggtcgttgcagcggatgcaatcatcatatggtggatagtggatagtgaatagttggcgtcacaatttttgttcccatagtcacgattagccatctgtcaaagtactctctctctctctcttcgttgaataaggtcatcaagaaggccggtcatttacttgtgtattctgtactttatttagtttgtagtcacatgaacaatgagctgaaatactatatcacaggtctattgtcatttttatcacacactgctgtatttagatgaataatacacaagcatttgaggattcaaatagaccaatcctgtgcaaatgttcg

SEQ ID NO: 32505 - DNA, 1357 bp, Zea Mays
cgtagtctagtcaagactcaagactcaagaggagtccccaccctgccggcaaatgcttctcctgcacaaatctgttcccctccgcctgctccttccacgccgtcctctcaaaacctttctcctcccgccgccgtctcgcccccgctgtctctcgctcctcccacgcgctgccatgggctccgtagctggagacaccgccgcccgcctcgcgtacccgccggcccgccgcgacgattcggtcgtcgacgactaccacggcgttcggatcccagatccctatcgctggctggaggacccggactcggaggagacgaaagagttcgtggcgcggcaggcggagctggcggagacggtgctcgccgggtgccccgacagggagaacctgcgccgcgaggttacgcggctcttcgaccacccgcgccacgccgcgccgttccgccgcgggaacaagtacttctacttccacaactccggcctccaggcccagagcgtgctctacatgctgttccagacgtttatgtattgaaggcggaagcaatggtggtcttctggttgctgcttccattaatcagaggcctgatctctttggatgtgctctcgctcatgttggcgtcatggacatgctccgttttcacaagtttacaattggtcatgcatggactacagactatggttgttcagataaggaagaagagttccagtggctcattaaatattctccccttcataatgtacggagaccttgggagcaaagctctggtaataactgccagtatccagcaaccatgttgttgacagctgatcatgacgatcgtgttgtgccattgcattcactgaagttattagcaactttgcagcatgtcctgtgtaccagcactgaggacagtccgcagacgaatccaataattggtcgcattgatcggaagtcagggcatggagctggcaggccaactcaaaaaatgattgacgaagctgcagacagatatagctttatggcaaaaatgttaggggcttcgtggactgaatagtgaattttgtccagcttagtgtggagatggtgagcaagattactctatgcagtcaaagtaaagtggctgtaaaagttatattgcttatgttttgctcttgcttggatgatcatccaccaaatagtatagtgtttatgcttcggtttgagataagggttcagggagcattgtcatgcttggcgttggtgcaccatttctttcatatatatcttttgattgttaaattttatacgttactacttcattgattctaaattataagatgttttggttttttcagatatattgtttttgttatgctatattgctatgtatactatatgtctaaa

SEQ ID NO: 32506 - DNA, 2198 bp, Zea Mays
ctaaagtttagcaggaagctaaagtttatctcgtgagattgaaacggggcctaactttggcgagtgggcgagccgacctaaaatcctccgcctccttcctcgccgtttcgggcctcgcctcgtccccaaatccaacccttcgtactcagtttccatcattggcatggcgtccgataccgagggcatcgccgccctcttctcgatgtacaacgacgacgaggaagaggaggatgccgacgagcccagccctcctttcccagcgcttcccgccgccgtcacctcctcctcgccgctgtcccctcaagccggggccgaggaccccaacccttctgtggcgcctccgtcaccttcccgtcccgaggaattggccagtctcaaaaccctagcgagtccccacccttccccggcgcgggggctgcttccgccacttccctcgcggcgctcttcatcaccctttgcagtgtcgtccccctccccgctacggggaccgttcttcgcgccgccggcagacctgccgcgccctccgcggcgcggggcgcttgcaatcgtggactatgcgcacgacgagacggctatgtcgcccgagcaggaggatggggagatcacgagcaacacatacggatttggctcagatgctcaggctgcagaggggaatcttgaagaacgaacttactccggcacagttcatgttatgaccccaaatactctagcagaattgtctcagcatcctgatgcacccgagcagaaccaagtagggacagacatggcagtggacgtaactagaacagaaattaaaggtgcccaggtggaaggaactactgatatttcaactaatggtgaaagtgatgatccatcaaatcgtttccttcctccacccgtgactacaaaatgctctgcagcattacagttctcttctcttttcatgtttcgtggaagcgtcatggcaatgttgctattcagcaaaaaattaacaggttccttgcatacagaagggctggaaagagctttaatgctgaagtgcgcaacaggaaggactacagaaatcctgactttttgcagcatgctgtgggataccaagaaattgatcagatagggacctgtttcagtaaatatgtttttgatccttatgggtacgacaaaggcgactactatgatgagatagggacagatatttcagccgttaaagacaatttggcaccaatacggaacattcagttttgtctgtttggtgatacataatggtattccaatttacaattttacatcttatctgttctatttgagtgcagaagctgaaatgaagcgtgaagttgagaggaaggaacaggagaagaaaaggagcccaaaagttgaatttattactggagtacaacccccaatcaatgcatcaataccgaagatcccaggtttggctggtgtctgtacactaccggtacctacagaaggtgtacagaaagagactagaccaaacaagaaatcaaaatgggataaggttgatggtgatgttaagaaccatgtggttcctagtggacacgacaacttatcagcaactactgcggcactcttgacttcagctaatgttggtgctggatacgctggttttgcgcaacaaaagagaaaagaggccgaagaaaagaaaaacgatcataagtcagacagaagatcgtagcaccaccttttgtttcattctgagcagtcagcgtatcatttattttttttcagtgacatagttttgtaatgtggatagagaaaagaaggaaacaattaaaaccaatcctagggaaatggtttcagaaaagccctctgggcaacttggtagtcttgtattatacaggtaccagaaacttaacattttagaccaagaaaaagagaaccgtgagcgttctgcacttctgccgcctgttacagtggtcaattatgtgtttttgcattcagctcattggtctgccgcttgaatgctgggattttaaatcgccaaccatttatttatcatcgatggtcacctaatctttatgtcttgatcgtttatttttatttcatatcgattgggtgcgacatatatatttggacttgatatagatttaaactgacttaattctactcaattttagatcaaaatgaatgaccctttaggggtgttgactaaattttagtctctttattttagtttttaaacataaaaactaaaataaatataa

SEQ ID NO: 32507 - DNA, 3132 bp, Zea Mays
cttttttccccacactagtcgaaccaatttggtcatgcttcttggatttgtacttcttggacgatctcttgaagaaagtgcaaggcttaaggcatccagcgatatgaatgagctcatttcactgttatcacctcagtcgaggttaattgttacttcctcaagtgacaacccttctgcggacagtagtttgaattctgatgcgatcacagtcgaggttcctgttgatgatgtccgtgttggagactcaatattggtcctgccgggagagactatacctgtagatggtaatgtcattgaaggatcaagttttgttgacgaatcaatgcttactggagagtccttgcctgtagccaaggagactgggcttcctgtattttcaggaactgtgaactgggatggcccgctaaagattagagcaacatgtactggaccatcatcaacaatagctaagatagtccgcatggttgaggatgcccaagcacgtgaagctcctgttcaaaggctcgcagattccatcgcaggaccatttgtgtatactgttatgacgttggctgcaacaaccttttccttctggtattacattggcacacacttatttcctgaggttcttctgaatgatattgctggtccggatggggattcattacttttgagtataaagcttgctgtggatgtattagttgtttcctgtccttgtgcacttggattagctacacctacagctatcttaataggaacttccctaggtgctaaaagagggttactggttagaggaggtgatgttttagagcgtttggctggaatagatactcttgtgcttgataaaacagggacgcttacagaaggaaaaccagtagtgacttctattgcttctctggcatatgaggagacagaggtccttcgtcttgctgctgcagtggagaaaacagcattgcacccaattgcaaatgctataatgaacaaggctgaactactcaagttggatattccgatcacaagtggtcagcttacatcgcctggatttggttgtttggctgaagtagatgggagtttagttgcagtgggcactttggattgggtgcatgatcgttttgaaactaaagcatcgccaactgaactgagagaccttagaaaccggctggagtttatgttgtcaagtgaagcatcatcatcaaaccagtcgaagtcaattgcttatgttggccgtgagggagaaggaattataggtgctattgctatatcagatattttacgagaagatgcaaacttaactgtggagaggttgcagcaggaaagcattacaacgttcctgctgtcaggggataggggagaagcagtgacaagcattgggaggaccattggaatcaggaatgaaaacataaagtcttccctgactccgcaagacaaagcaagcattatatcaactttgcaagcgaagggacacagagttgcaatggttggtgatggaataaacgatgccccgtctttagcagccgcagatgttggaatagccatgcgaactcattcaaaagagaacgctgcctctgatgcagcttcagttgttctactaggcaacagactttctcaggtggtagatgcgctatccctgtcgaaggcaacgatggcaaaagttcaccaaaatttggcctgggcagtggcatataacatagtagccattccaattgccgctggagtgctgctgccacaatatgatttcgccatgacaccatctctctcaggggggttgatggcccttagctcaatctttgttgtcagcaattctttgcttctgcagctgcatgggtcgtttcagaacacagaaaaacggcagggtgatctgagctcaagattaaactgaattgttgggtttagtttgacccagccgaaggacagtggtattgaattatagagggttctgatactggttttccagctccggctaattgaactgagtcagaactataagtagcaagctattcgtgtcagtagtagcatgttcctgtactgtttgtcaacccaactatagtagcaagtatgacccagaaggacaataatctaccacggccttcaaaaacattgtaaattagtaatggtactgctgtaagcctgtaaacaaagttaaggcgtatgactatcgttcatggtctagcaatgtgcaacaagctataagcttcatttcacacaggtatgggaagttcagtcaacagaactagtcgaatagcaagcagtacacatagcaactatggccacactataatggcaatcatacccctgaacaatagcatagctaggagattactggcgattcttctacttctacttctacttccatgtgttggttgttctaggcttctagcactcttcgtatccatcgttgttggcccagtgcaccttcttgccgctgctgctccgcatcaccttctcgtcgacggccttcaccccggcctccgcagctgccgccgactcggcctgcacacgcgccatcttcctccctcgctttctcgccgcggccgccttctccgtctcggcctcctggtactccctcgcccaacgccggctcagcacgcatgttgcagctagcgcgacggcctgcgccatgaacatggccagcagcagtagctcctcgaggaacgccagcacgaactgctcccggcgatccctggcggagccgaggaggcggaggctgtggtcgtggcggaggaagaaggccagggaggccagtgcgtggccggacagcgcggcgagcgcgagcgccgtgctcgcggcgaggcagaggtgggtgagctgcgcgtggagcgctgcgagtgcggagagcagggtggtggcgtgcacggagacgagcgcccagccgaagggcgtcggccgcgggcggaggaggaagaccgggccgagcgcggcggcggcgaggacgaggagggagaggttgaggagccagaccagtaggttgggaagagaggagcatctccgtaggctcgagttctcggtggcggacgccattgctttactgggtgcttgtgttctcagtgcgacagtgatcgtgtgagtctgatctgttgctgaatgctgagttcagaggagcggggaagtgcgtggcgcgtggggtaaggtttatacagagtgggaagactgacc

SEQ ID NO: 32508 - DNA, 4759 bp, Zea Mays
gatggtactctatggaaatggctggtgttgtaacatatactggtgcaaagattatccaaaatgctcgattacttgtagaaaaaattggaaggccactggaactggatacagatggcatttggtgtgttttgcctggctcttttccagaaaactttactttcaagacaaaagctgggaagaagctaactatatcttatccctgtgtcatgcttaatgctgacgttgcaaggaacaacactaatgatcaatatcaaacattgaaagacccagtaaacaagacatatacaacacacagtgagtgttccattgagtttgaggttgatggaccttacaaggccatgatcttacctgcctctaaagaggaagggattctgataaagaagagatatgctgtcttcaatgaagatggcactttggcagaacttaaaggttttgaaatcaagcgtagaggtgagctgaagctcataaaagtttttcaggcggaggtatttgacaaatttcttcatggttcaactttggaggaatgctattctgctgttgcctctgttgctaaccggtggttggacctactggataatcaaggaattgatattgctgacagtgaattgcttgatttcatatcggagtcgagcacaatgagtaaatctttagttgactacggagagcagaagtcttgtgctgtaactacagcaaaaagacttgccgaatttcttggagattcgatggttaaagacaaaggactacattgccaatatattgttgctcgggagccacaaggcactccagtgagcgagcgtgctgttccggtagctatattcgagacagatcctgagatcgcaaagcattatttaaggaaatggtttagattctcctctgatgcaaacattcgatctattgttgattggtcttactacaagcaacgcttaagttcagctattcagaaaatcattacaattcctgcagcaatgcaaaagatctcaaatcctgttcctcgagttcttcatccagattggttacacaaaaaggtcagggagaaagatgatcgatttcggcagcgtaaactgcgtgatatcttcagtcccttggctaaagaagaggggctgcataacttgaataggactggagatatggaagatttattaatttcaaacaaggatttgaggaaaaatccttctcatggtttagacattgacaaagaaaacaatccaaatggagcatcagtgggatctggtttgaatattagtaaaaaacaacaaaactgtatgactgggttaaatgttccttgcacttcacaaatccaaaatgctgcttcttatgaaacagttgataagggtactgactatcaaggatggcttgatgctaagaaaagaaaatggaaatatgtccgtgaacaaaaaaaacgtcgaaggttgggtgctgccgccacttttgacgatcctaacgctttgctctcggccagacatgccaatcagctacctgtcaacagtcggaatagatctacatttttccagaaacaagaattggccctctttagatcacattggcagataatccagcttgcttcaagtacagtgcctggtcacttttttgcgtgggttgttgctgaagggattatgttcaagattcctattaatgtgcctagaactttttacctaaactcaaaggctcctgtcacagaagagtttccaggaaggcgtgtcaaaaagattctcccacatggtagaccttgtttcaaccttattgaggttgtaacaactgaagaacagttcagggctgaaggcaaaaaacttgcagctcatctagcagagccagatgttgagggaatatacgagacaaaaattccaccagagctcaatgctgttctccaaatcggatgtgtctgcaaagtggacaagtctgcaaaaagacgaagtatacaagatggatgggatctagccgagttgcaaatgaaaacaaccgccgagtgctcatatctggaacagacattttcatttttctatttataccacagcttgagtgaaggaagggctgtatatgtattttacttccccacgtctttccgaatacatgcagtgattgtcaatcctttccgtaacaaagaaatatctccgtcatttcttgaaaagcaatttggagatgcttgccaagcccttggttctgtccctgagaatctgtctttccatgtggactaccaaacatcaattgatgctggaagcaaatacgcacaaagaatgttacttgagtacaggcaacaacattctggacctgtcgtaggcatcatagagtgccctaagctccaagctataaaggtagctatacgagcacttgatgatttgccatgtgtaaccattcctagcaatgcacgtgacaacaactatcaggctcttggctggcaagcaacagctggccgaacaagtatgcagcgttgtgctgcatcaacccaatggttcaatgaacggatttcactcgctaaatatgcacatgtgccactgggtaattttgaactagactggcttctttttactgccgatgtattcttttcaagggcattgcgtgatcaacagcaggaggcacttatgaaggagagacatgttttgctgatgaagtcattcagcctgcacttacttatcctggtgcatatagaagagtttctgttgagcttaagatccaccatttggcggttaatgctctcctaaagagtagtcaagtggacgaaatggaaggaggatcaatcggtagctttggaaacgacgtgcctccgggttcaaatgccactgaaactgactttgatgatgctagcttatgtatacctgctttccaggtgctaaagcaacttattcaaagatgcatttcagatgcagtgtcgtctggaaatgtatttgctgatgcaatattgcaacatctctaccgctggctttgcagcccacgatcgaaacttcatgatccagctctccatcgtcttcttcataatgtgatgaagaaagtctttgctctattgttggccgagttacgaaagctgggggctaatgttatttttgcaaacttttctaagataatcatagatactggaaaagtagatttgtcatctgcacatgcatattgtgacagcttattaaggaccttgcagacgagggacctcttcgagtggatagaattggaaccattgcacttttggcattccttactgttcatggatcaggtttgtactttttgtcgtgttaccacactatgttgatttagacttctttttttttgcctttgatggttctttatcttatgttgttttatggtttagtataactatggcggaattcaagctaaaacacaaaacgtagactcttcagatggtgataatgatattgatattgtctcaagctggaacatggcagaagatttgcccaaagatacacaggatcattttgtcttaatcgtatcagaattcctatatattccgtggaaattcatgaaggaacaagtagctgctcaagctaccataagggatgatacctcatgcactccatctgtaacaatcatggctgctgagaatcttgagggccaggtgatagaacacctccgtgacaagattagcaattactttgcagacaagcttctaagaactgtaagtgatatacttcaccatttcaaagggaaaagcaaacatgagtcagatgaacctgcaaaatctgatcctcacacgcataaaggcgatgctgcattggagttcattaagcatatctgtgcagttcttgctcttgatcaaaatgttcagcatgatattttgagaatgaggaagaacctgttaaagttagttcgtgtaaaggagtttgctccagaagcacaattccaagacccatgcgcctcattcactctgccaaatgtgatctgcagctattgcaacgattgccgggacctggatctctgccgcgactcggcactccagggccaggagtggagatgcgcggtgccgcagtgcgggcagccgtaccaccgcgagcagatggagaacgcgcttctgcaggtggtccggcagcgagagaggctgtaccacctgcaggacctggtgtgcgtgcgctgcaggcaggtgaaggccgcccatctgtcggagcagtgttcctgcgggggctccttccggtgcaaggaggagccttcgtatttcctcagcaaaatgcgggtgttcctgaaggtggcggtgagccaaaagttcccgctcctgcaggactgcgtgcagtggattcttgaagccagatgacgcgggctgctacttcaacatagttcattagttcacctgatcgctaggttgtacaacgtgcacaggctgtagctccgaagagtgtataaacgggtgtatagcgctgccacagttcattgtagctctgccctgcttgcaaaaggttgttgttgtattgtagatattcaaaggtggatggcgagaaacgatagtaaccttggtatcgaaacatctggataactagccctctcgtatgtgattgctgggcatagactattctaagttatgatgtgggcatgtggttgcataagcggtttcgatgacgtgaatagaaatacacgcgtcggaccgtatgctgccagcctgccagtacactgaccttggccacgtcatactagttgtctgtttctgttgccaatcctacactgtattatctgcacaaaggaaaatgaaacggaggacgttgtgctttcgaggggccaggactcgttgggtggatgaagcacgcgtgcccggtgacctcagccttta

SEQ ID NO: 32509 - DNA, 1454 bp, Zea Mays
agtgaacgcagaacaatcgcgtcgttgtcgtccagtttacacgtaacccctcgcgcttattcagaattctgaaattccaagcccgatctcctctcctcttccccgaatctcgggcgccgccgtaaccctagcccccgcgatccgctcgccggagggaaggagggatctccgcaggcgcccatggaggtgaagttgtggaacgacaagcgcgagcgggagctcctggagagctacgcggacctgtacgcgatcatcaaggccgtggagaagctggaacgggcctacgtccgggacctcgtctcagccgccgactacgaggcggagtgcctcaagcttatctcccagttcaactccctctcctcctcgctcgccggcgccgtcaccgtccctcgcttcgtccaggcgtaccgcctcgattgccccgccgcgctcaaccgcctcctccagtcgggcgtcccggccaccgtcgagctccgcgccgcgtccgcctcatccgcgccggccgccaccgccgcctccgcgtcagccatcgcgcactgcgtgcagaccttcatcaccgccatggacgccgtcaagctcaacatgcttgccaacgatcaggtccgccccctgctgcaggacgtcgccacatccatggccaggctcggttccttgctgccgcccgactttgaggggaaggtcaaggttaacgagtggcttgccaagctgcataaaatgggcgccgcggatgaactcaccgagcagcaggccaggcagctcaacttcgacctcgactcggcctacagtgcctttttggctgcgctgcccgccgctggtctgtaaccgggcgtggacctggcgaagggccgtcttcacaggtgggactttgagactgaagaggagtgggccaagtacaacgatcagaaagaagccatgccgaaggctgccttccagttcggggtgaagatgcaggacgacaggaaaaccaggaagcagaacaaggaccagaagctgacgaatgacctccacaagatcaacaagattctggctaggaagaagggcgagaaagatggggtggaagatggcggtcactacgatgatgatttacctagctcaaagaaacagcgtggctgaagctgtcatttttttgttttgtttctcctgctcgtactgtaggcaggcgaacattctatgaagagtcacagtgtcatgtttagttggcagttgtatcctgttgcgtttgtttaaggtgtcctggtaggaaatatgtttatgctgttgagccaaaaccatggaagaaatgtggttgtatatgtatatatatttttttcttagaaagaaaagccagatctttatgttacaattacagtgatgaacctgcaagtatttgatttgtcatattgggaggcttttgcaatgtggttagagctgagaatatccaggagtgtggctcagtgcttagccttggctatgac

SEQ ID NO: 32510 - DNA, 4302 bp, Zea Mays
atggtaaatcgttggagaactgggtagaggcaggattttctaaggtgcaattcagctattggatggaattgcaaaatacactactcctatatatgtggaagtgtctaattggtggtgcgcataggactggctggatttcaatcgtgataatactgatatacggagactcattgctgatccagtgagcctattcgcgccaacttgattacagcctttctcacacaagtatggcgccctctgctgccgtcccgggtggctctgaggttgaggggtcaccacgcatggccaagttcctctgcagctttggaggcagtatccttccccgaccactcgatggctgtcttaggtatgttggcggcgagacaaggattgtcatgttgccgcgtgacatatcatatgccgacctggctgcacggatgagagagctctataaggatgctgatatcatcaaataccagcaacctgatgaggatttagatgcgctggtctcggttgtgaacgacgacgatgtggtgaacatgatggaggagtatgacaaggtcattgcgacaggggaggcgttcactcggctcaggatcttcttattttctcagcatttggatgatgatgctgcatcagtggatgtgcattacaatgtagacgagcgggaaacagagagaaggtatgtagatgcgcttaacagccttggtgatgttaagtcaccttcctcccctgtgtctgtggagcagctttttggcattggaggcaatgattcaggaattcctgattttgctggcttgagacatttgaatgtccctcgtccaacacatagtcagaggtatggagagatggattctccttggagccctgcctatgtctcaccaggccagtacggggtacatgacccaagggattttccaatttcaccatcatctgcaaggtttcaagtaggagcggaggattttgatgagaggactcctgacgactttgtaaggcagtcaccaaaatatcgtcattatgaggcgcattcaccatcacatatggataatttagtctggcttccacctggtgctgtaattcagcaaaatgcaggctttcctggtaatttgagccggtccaacaatttcttggatgggagcaatggatgtgatcactgccgttcaccattccataaggttcaaggttcagtgaatgatcctatctatatgaaccctcgttggactcggccagtccaacaacattttgaccaaccaagcatgattaatgattatcccggtcaccatgctaattcttgtccagattactgccgccctggtgatcattatgtgggaggtcaagatgttagattggaaaatggtgtttatgttaaagagcaaaatggtggtcatcctcccatgttctataatgagtcacatcctcacgatagagtctggcatgtgcataccaagcaaagtcatcagcgatacgaggatccaaggctgcatcatcctgctaatggtagagtgatcgagccatacattatggatgccaacaaagtatatgaagttcattcagcatctcttgctcgttctagccatgagagtcctcactattatcacggtagcagtgaggtcataaatgacacgtatcacaaccaacaagttggaggcagtgggtcgtatgtgcagccagcagggtttgaagaatcccctagccaccattacaaccactcttcggcctatggtgcagattccttttaccaaatgcagcagaatttgccacccattcaatctctgagaaggagagcgaacagccctgttcacactgcctcaccatatgattccccacacctgccaatatcaaatgggaccattaacacaaacttcgtaagaaatacaggtgatgtcagtccgaggataccagggctacctggatatgatcgaatgccaaacacatggactcctcccaacggcagcataccatatagagttgttgggcatgatgttcatgctgcctccatggaaaacactagtgcctttggtcctaggtctaatccaactgctgctcagtatgttcagcatttcattgctcctgaatcaatccagcatcaacctggagctccattgagggaggttcatcctgaaagatcataccctgaacccatgccgtcgtcatatgttgatggcaaagtagctgtttctgcattgcctctcactgatcaattatccaggttggatacaaacacaataaagaaacctgaaggtccagatgatgttaactcaactcaaaatgtgaatgaaacaactcctttgcatgctgtggatgaaccaagtaccttaccccaccatgttgtagttgtacatgaagttgatactaagcaggggaagccaaccgaacatgaaagcaggcaaaagcaacatgaagctggggctacagcactgcaggaatgtggggatatttcagaggatagattgaatttccttcctgaattgattgcctctgttaaaaaggcagcactggaagatgctgctgagacacggatagcccaatcagatgctaatggtgctgtttcacctgttcctgatgatgatgatgataatgaaaagaagttggatgcagcagctgctggtactacagatgcaaatcaggaccctgatttgcaaggaagcattgatcggcagaagagctccaagattgagtctacaactgctgaagctgaagctttgtctaaaggactacagactataaaaaatgacgatttggaggaaattagagagctgggttcaggtacttatggggcagtttatcatggtaaatggagaggatgtgatgtcgctgttaaaagaataaaagcgagttgctttgtaggaagaccatctgagagagagcgtttgattgcggatttctggaaagaagctctgatcctaagctcactccatcatccaaatgtggtttcattttatggtgtagttcgtgatggtccagatggaagcttagcaactgttactgagtttatgatcaatggatctctaaaacagtttctgaggaaaaaagacaggacaattgatcgccggaagagagtaatattagccatggatgctgcatttggcatggagtatttgcatgggaagaatatagtccattttgacctgaaatgtgagaatctactggtgaacatgagggatccgcagcgaccaatttgcaagatcggtgatcttggactgtcaaaggttaaacagcatactttggtatctggtggtgttagaggaaccttaccatggatggcaccagagcttctgagtgggaaaagtaatatggtgtcagacaagattgatgtctattcgtttggaattgtcatgtgggagttgcttactggggaagagccatactctggcatgcgtgctgctgaaattattgggggcattgtaaacgattccctacgtcctcaaattccttcatggtgtgatcctgagtggaagggattgatggaaagctgttggtccagtgatccagctgagagaccgtccttcacggatatatctcaaaggttgaggaaaatggccgccgcaatgaatgtgaagtaaaggtccggaagccatatttgtcttcatcgcagttgatgaccctactccaagtgataatttaacaagtgctgacttcatgggagaaaatctatgtcatggagattccaaagcatgtttgatgttttcttttaatcctggagtaaaccggctaccatttgccttccgccgaaaacaagtatgctatatggcgcattgtcttgatgggagctgttgcactgtcatgtaaataagttttgacttgctggcccgtagtagatgtgcaaagtaataggcacgatcacacagttacttttttttttcccatataaattgtgttctaggataggtagaacgaacatgactggagcgatccttgttcagattgtaaagaaaaggacagacccagtgctgacggttcttatatgagtggggtctggttaaagaataaccaaaacaagtcttatacttttatcttgcagagaggttgcatcgaatctaggactttggctcggtagaaaggtttttcaccactgcgttaggcctatacttttttcagtttaaccactgtgctagacctgcccccttttttgagtttgtacttggtctaaaaataagagtatactgttttccatgtgtatatatcatcacttcctatttgaatgccccaaaaaacaagagtacactgtttgtcatgtatacaccatcacttccaaatacttgcaggcatataattttgcaggcatagtggagagtgatgggcagtgtgacgtatggctgtcgc

SEQ ID NO: 32511 - DNA, 1763 bp, Zea Mays
ggccggtttggttgtttccaaaagctcccggggccgggaccaggcggaattcagcgcacaatgccatgccgccggggcttcatactgctgtccctgcaagcgcacctgccgcagctgaagcccgcgccgtgcgacatgtcgtccacggacggcggctgcgagaaggcgagcggcttcaagtcgaccgtgttcttcctggcgctgtacctggtggcgctgggcagcggctgcctcaagcccaacatgatcgcgcacggcgcggaccagttcgacgccgccaccccgggcggcgccaacagcctgcccacctacttcaactcggcctacttcagcttctgcgcgggcgagctggtcgccctcacggcgctggtctgggtgcagacgcactccggcatggacgtcggcttcggcgtctccgcggtcgccatggcggcgggcctcgccagcctcgtcgccggcgccgccttctaccgcaataagcccccgcagggcagcatcttcgcgcccgttgcaagggttttcgtcgctgccttcaccaaaaggaagcaagtctgcccttccagctccaattctgtcaacgccggggcttgcgagccggcgcgcctcgccggcaacttccgccacaacaacaaattcaggttcctggacaaggcatgcgtcccggcagcgccgcaggggccgaacacgaagcccggagaagcgcgtggcggctgtgcacggtggccgaggtgcagcaggcaaagacgctcctcgccgtgacgcccatcttcgcgtgcaccatcgtcttcaacaccgtgctcgcgcagctgcagacgttctcggtgcagcagggcagcgccatggacacggcgctcccgccgggctcgggctcgttccgcatcccgcccgcgtcgctgcaggccatcccgtacgccctgctgctggcgctcgtcccggcctacgagctcctcctcgtcccgctcatgaagcgcctcacgggcacccggtccgggatcaccccgctccagcgcatcggcgtcggcctcgccaccctcgcgttctcgatggtcgcggcggccgacgtcgagcgcaggcgccgggacgccgccgcggagggccgccagatgtccgtcctgtggatcgtgccgcagttcctcgtcttcggcgtgtcggagatgttcaccgccgtggggctcatcgagttcttctacaagcaggcgtgcgccggcatgcaggccttcctcacggcgctcacgtactgttcctacgcgttcgggttctacctcagctcggtgctcgtctcgctggtcaacagggtcacggcgaggcacggtggcgctgggtggctcggagacaacaacctcaacaaggataggctggacctcttctactggatgctcgccgtgctcagcgtgctcaacttctgctgctacctgctctgtgccaggtggtacaatgctggcgcacagggttccgatgcagctgcctctggtctggtggcatctgaggttgatgatcgcaaggagatcatctgaacaactcaggaagagattgaaactgtatatgtctaattccatctatagactatagctgtatgtatacatgcatgcatgagaaatagtgaccagaaaatgagcactaggataaaattaagacctctcatttggatcaataggatgtatagtgttttaggcaacttttttaacggagaaaacctctttctattacgaattaagtagaggttcaacataatctccacgtcgattctcacgtcacgagacgag

SEQ ID NO: 32512 - DNA, 322 bp, Zea Mays
cttgatcatacaggcctacatacgcatccaatccttaattaacctaggtggagcatcacctgttcctagcccaagtctcgagttaagtacttccatccttaggattgttttgtgttcctaaggatgaaaagagcagtatagggaactttgcagtaagatcccaccatgctcccaatgaaaatattcttgcaagtagaagccatccttcgtcaggataacccatgagctaggcattattgcaaaacacaacctctatccataagatttaagcagggctaagcatttttgtaaacaatatttgatacttccaaagaagtatcta

SEQ ID NO: 32513 - DNA, 1908 bp, Zea Mays
gtcagatggaagttgctactgacattttaaactcagctagagatttaggaaactaaaggaggaagaatcaaggagaaaagaggttctggggcaagcagaacaatcagaacagtcaagttttgaatctagcgtcgtagatggagcacaaatttctgatgcgtcttctggagacaaaaatgatgaacaggtagtctctatttttgctacttggtatatggtaaatttcagcaggtaaagtctttttgactgatgataggtattaaacaggagcctcatgaaattggaccgatcgtagctaatagcaacggtggagttaaccatagtagaaatgaaaagactgagaatttttcatcagaaaaggaagcagctgacgatcattcctcggtaagcaaacctatgttaccggatgcccacaaattaacggaccaagacaatggaaacgatgcagtatagagagtggatgttagcgtagctagtcgttctgctgctttgatgcgttcactgaaaatcagtggctcagacgtgtctgcttcatcacgctgaggtatagctgtgaggcatagtgagcaatagtttcacgaacatctatcaagaatcacacgaagatgcagcaggaggcaaatttgtttcaaactagaaaccacgctctaggtctaagccctttttcttttcccccacgaatttgtgctgtactgtaggttatgtgatgcatataagagtagtaggtgaaaggattctgagatatcaaagggattctgtccataacgtgtaatgttgttcagttgggggtgggatggatgcaaaggtggcaattcgacattttactacttgtcgtgacaataattttggaatggatgatgatgcctgtcttgagaagcacgtgcaacctcaaactttgacgttgctgatgtaaaaaaaaaatcataaacaacctggatatgttcactggaaagtagttacacatacgaatggacgattagctttagctgtgtgtttacatacaaatatcaaaccgaggaaagcgaccatgttaaataaataaataaaatatcgcagagattttgcaacccctgcacgaaacgaaaccagtctccgctcctcagaaggaggcgaaggctcccgcggcgacagcggcggcggcgcagacgcgcgccgcggcgctggcgagtgcgacgggcgcgttgctggcggcggcgccgcccgcggttgcttcggcgccgggcggggcggggacgtcgtccctgggctcagtcatggtggccccgttgggcgcgccgacaggggcggcgtcctcgtcgtcgtcgacggcgtcctcgtcagaggccggcttgtcgccgtcgaaggaccccagcggggtatgcgccacgggggtcaggatggtgggcatggcgttggcgtcgtcggcggatgcgacagaggccagcgcagcgacgagcgcggcggcgaggagcagcagcagcagcgcccggtgcgaggccatggcggcacggacggagatcacgctcggcgcctttgcgtgggaacgggatgggtcgcaaaataagcaggttatcgtacgtctttgttcttattaggtctatatatgtatatagaaagaagaagaagcgaagcagctgcgagaggcggcaacaatggcgaatggtggaagcgtgttatatatccgagagcacgacgagcatggagggggcgtcaggcgtccgacgactccgacgggacacgccagagcgcggggttggcgggtacgtttgactccaaccgtggccatgcgttgggacactggctacgcgggtcccacggaggctgcccattttgggacccttgtcttcagacacgtgcatttttacagtatctcgttttagaactgaattctacattaactatcacagtgcaagtgtatatcaccctctg

SEQ ID NO: 32514 - DNA, 697 bp, Zea Mays
tcgcacccacttgtcagggtcttgtttgttgaagtgctcttaagtacctctggtcgaaataagctgctgcgggcagaccgtgaaccctgggcaacctgtgcgcaacttggtggagcggtggctgagggttggcccggcgcgcccgctgcacacggtgatcggctcctccgggggagattatgtgatggtgataagctatgggcggcccaagtccgcgtcctgttaaaaccatatcaccatcgacggcctggcgaggtcgattcctagttcgaacaagggttggtgccgccgccgctgccgccgccggggaagaggccgtcgacagataaactcaagcagcggtagcgggctgctctgccgcagcagctcgtcctctcaccggcgtgttctttaaggatctgttcgttcgttcgttgttgccatacatgcacatgtgatggaagtcgctgtaatttggtagtacttggtaggctgtgagtgagaactgacgtttaggttggaggcgagatcgttaacctgagcttaagtgttgggggcgatgagtccgccgtgtatgggagaggcgctgctggttcagttctttttcctccgttttttttttcacttcttgaagggaaaaacacacacaaatacataatgtactacctccgtttatttgtcctgaactaatatccagccgtgactgattcggatcgtt

SEQ ID NO: 32515 - DNA, 523 bp, Zea Mays
gggcctttgagaggcccaatactctgaagtgcctgaaattggctcagcccggtcattggtgatttctctgggtctgaaagatcattctcagggaacgctgaaggatattactgtagctgtgatgattgaatagctgatgagctgggcatggggttggctcgatggttggcatattcagccccatcgataaagatactgtttagcattgcgcaagaggagccatcgtttataccatgcactaaattctggtagttttgtagttggaccttctatctacttggattaacaaaaggtggttttaagctggtgtcaaaatttgagtgtcaactttcacgctaaacaaaaggcactgtacactggtaaagcacttctgaggcgaatcatgcttttcgaggacaatttcggctatccgtgctggggctgccactgtggagctctgtgcgtactcctttgccgtctaggactagctaggagagctactgtactcgccactcacatcacggctttagaccaactccagcaa

SEQ ID NO: 32516 - DNA, 1805 bp, Zea Mays
tgcaggcttaaatcgcagcaccactgcgaaacccgatcgctagtcgtctcgtcactgccgtttgatccctccacccgtttccagaagcttcgcggctccgtcatgcgtcccgccgtcgtcacggtgctcctcctagtagcagcggccgcctcgccggccgccgcactctactccgccggttcccccgtcctccagctcaatcccaacaacttcaaatcgaaggtgctgaactcgaacggcgtggtgctggttgaattcttcgcgccgtggtgtgggcactgcaagcagctggcgccggcttgggagaaggctgccggcgtgctcaagggcgttgccacggtcgcagcgcttgatgccgatgcgcaccaggcgctcgcgcaggaatatggaatcaagggatttcccactattaaggtgttttcccctggtaaacctccagttgattatcaaggagcaagagatgtaaagccgattgtagagtttgctctgtcacaggtcaagtcccttcttagagataggttgagtggtaaggcatcagcagggtcaaatggcaagacatctggaggctcaagtgagaaaagtgaaccaagtgcatcagtagaattaaattcacgcaactttgacgagcttgttgtcaaaagcaaggacctttggattgtggaattctttgcgccatggtgtgggcactgcaagaaattggcacctgaatggaaaaaggctgcaaagaacttgaagggccaagtgaagctagggcatgttgattgcgatgctgaaaagtccttgatgagcaagtacaaggtggaaggttttccaactattttggtatttggtgctgataaggagagcccattcccctaccagggggctagagttgcatctgccattgaatcctttgcattggagcagttggaagccaattctggcccggctgaagtttctgagttgactggcccggatgtcatggaagagaagtgcgcttctgctgccatttgttttgtatcattccttccagacatccttgattcaaaggcagaaggaagaaacaagtaccttgagctcctgctctctgtagctgagaagtttaaaaagagtccatacagttgtctggacagctgctggcaagcaagctaatctcgagaaccaggttggtgtgggcggctacggctatcccgccatggtagctctcaacgtgaagaaaggtgcatacgctccactccgtagtgccttccagcgcgacgaaatcatcgagttcgtgaaggaggcagggcgtggtggaaagggaaaccttcctctgaacgatgcacctacagtagtcgcgtccgagccgtgggacggcaaagatggagaggtcattgaggaggatgaattctccctcgacgagctcatgggcgacagctcctcagcaaacgatgagttgtgattctgatggttcttggactgatctgcgtgtcggttagccagactgtaaatctgaggaactctgttttgaaaaatcattccttgagtggcataattttccaggttatggatgctagaatggattaagattaaggagaactgatgtgatagaccttttctttaacgtttttttttatccctgaagtaaagtcagtttggacgtatatgttgaacaagtggtctacgctttagaacatgctcttctgctcacattggaatattggatagacagaccccaacttccagtcctacccccagaggacagaagacgaaacatactggagtagtggagcactgcaggcttttggatgaggttgacatccgcatatctcatctagaggttagag

SEQ ID NO: 32517 - DNA, 6857 bp, Zea Mays
cggcggcaccagtttttctcctcatcaagggagtcgcggccaccgccaacgagacaagctgtcggcgatgtcgtctatcgcatcgcagctgaaggccatcaagtcggcgctcggcgctgcgccggagccggctcggcggcccgtcacccggccgtctgtgctcttcgacgccaaagaggccgccgacatcgacctccgggccatcctgcccattgccctctctgggttggagcaccttaccagcgtagacgagagatttgcaaaatacagcaacactctgttcagggagactagccttgaggtgaaccgcgaacagttgactcccaaggagaacgacaaactcaacaagtctatctccacctaccttcgccttctagctggctatttgcatcttccctctgccctcaagacccttgaataccttatccgcagatacctggtgcatgtatacaattcggatgagttgctgctgagcgcactgccataccatgatacacatgcgtttgttcggatcgtgcagttggtcaacttagggaatagtaactgggcatttcttggcggtgtcaagtcctcaggtgcaccgccacccaggagtgttctagtgcaacagtgcatccgtgataaggctgtgctggagaccctatgcaactatgctacaccaacaaaggaattcagtcactcgaagacagtcgtctgcttttgcactgctgtgattgttgagtgtttgggtgctgtccctaagcttgacacagatgtagtgcagagggtgttgggatttgtgtttgactctcttaatcctgcagtgacgcgagaccaggaatataaggctggcgctcttatgattgttggagtacttggaacccgtgcgactctagcgcctaaacttgttcaaaatttgattcttttcgttgcaaggactgcacaacatgatgcattcgagtcagttgacttgccatggcttcgtgtttcagtgatggctcttataagtcttgttcagtcccaatctgtccatgttttccctaagaagccactgatggttttgaaagacatcagggatttttctggtatactttctgtattatccagtgaatacaacatcgagaaattcattaggctttatgttgaatcattaattgactacagtattgtcgatggtacctgccacacacacctgattgaaactattgagagtctgccaatgaagaatttcattgaaagtgtcgtgtgcaaaattcttggaaactgtatcaaggtatctcgggccacaggaatcccagatattaatcacacagaattatgggctaagaaaatttttaaggcaattgaaagaaaatatcccctggagctacgtgatgctattcataaatttcttgagaactctgaaactaattcaccgggaggggattctttggctgaggtttttgggatattgtttgatgaaaacaagaatttgccaactgaaatatctgactcaaacatttggttcagtctcgatcatccaaaggctacggttcgtcaatctgctctctcaaaagttgctacatctggcatcttcaataacagaactctaaatcctcaggtggttcaaaggcattaaaagcttctgatgttgctgtttcttgcttggaaaagctggtaacggaataccaatcgcatcatatggaacatgccaaggatatagctacattagtgtttcgtctccttattgttcacccaaagacccttagggtgaacataaaggccttggagctagctaagaaaatacggtgggagttctacgcaagtagttctcttgtatatgatggggtcgattttgataaaatgaagaacatgagtgcagactccattgcttctattaacatgaacaacatcaaagcttttgctgaaactttcctagcagacccaaataagcatgtggagtggttagctaactctggaagtggaagtagattttctaaaactctgtttctgctcatagtattgcaaacacttgtttccacagaagctttggatgagcaggtgaatctttgtcatgcttgtttgccagtcctgaaggatgaatgtcatcacatacagcccaaagatagcgatgttggtgatgagatcagcattactaaccttgagatgtgcagtttagaattggtgaagcattttttcaacagagacacagaggcattgaatgttagaatccttgtatgtatattttggggtatagtaagggtgcagtcctcctgtattaagcagaatcccgtggttggcagtggtggaaacacaatgctggatgatttgtttctcttcttccttgtttcacctgccaaaaatatcttccagaagcacctacagtatcttgttaattgcattggagcaccttttcaatttatttcaaagtacttcctggatgaagatttatcagaaagagtccaagtggagagtcttcttgtgtttgcatctatttgttccaagtgcgcttcctctgacaataatagcttggatgaaagcatctgtgtgcagcttctactaggttttccttccattattctaccacttgctcatgtcaacaaggatataagggcatctgcaattaagtgtattgaggggttatctttggtgtggcagcgcttgagcacttctgtaccaagaaatggaaacaacaccaaattacctcaatgtttgtcatctccaacttttggtagtttccttgaattgttggttaaccaaaagaccatgatctgctcggacgcaaaatttcttcctgcatatatttcatctatgctgagcccatgtaaagatattctggttcccgagaatctccatgaaagatttgatccgcatacaaaggatactattcttactttcatcttgcgctctgctttgaggctccctccttacggaaagttcatggttctgtcagtcctgaaaggagtaggaagcatcttatttcatgcagaagatgtgaagtctctgttttttgatcttctggaccgtcgtgatcagtaccagaatcgacataattgcaagcagatcctatccacccatgaaatgcataccttgtgcttgcttttggaggttttattctcaacgccagatcatgtgaatattggttttaacatgtttgaacctttgatgaaagctttaaaggttgatgcttcgtctccaggtgattctgttgttgtgatgccatgtcttactgtcctgcagaatcttcaaccagggttctttgataatttgaagactgatactaaggaaaaagttgttggacgccttatttccttggttcgaactgagagtttcgtagttcgaaatgctgcacgggatgctttactgcgtattaatgttcattcttccactttagtaaaatttattgaattaatttcaacacttggtgatgcaagaggacattcaaaaaggataaagagaaatgaagatcgggaccttaatgtgttctgcaattttgcggagatatttggagaaaattctgtagcttctattcttgtttctcttctagatatcttgtttcttaagaaagatgtgaagcaaaggtcgcgtttattacaacctcttttccagattctatcgaagctcctttctgatcaatgggtctcagttattgttagtcagtataacgaccaacaagatacctcatctgaaatccctgatttatctagttttgtaaaagaagttcaacacttggtactgctggccctcaaagatattacagatacactacaatcgggtcaccatgatgcaatggtcagcagttccgatgtaggtcttcttattgattgtgtacggtccatccaggacataggaactcggaatcatggcttttccttgatagcttctttgggaaaggcttgcccgcaactggtctcagagagtattgttgatttgtttgtcgctattggggatgctattaaacaggacgatagccactcgcaacgtgttttggaggatttattatctgtcttagtcccatgttggttatcaaggaccacaagcatagaaaagcttcttcagatattcattaaagctttagcagatgtgcctgaacataggcgattgacgcttatggtttacctcttaaggaccatgggaaaagaaaataatttgagtactgtgatcatgcatctgttacactcggtggttgagcggatttcacactcgttttctgtacatcatggggacgattatagattggctatgtcacaggagtgggagtatggattggcagtaaatgtgcttgaccagttttcgtataaattgtggtttccttgtttgagtaagcttctaaaaaacatcagggtgcatgagaagcaagatctgcatcttatgctacatttggcaatgaggcttattctatttaagttgcaagatacagaacttaattttgaacttgaatctgaggaagctgctaattctatccagggttctcttggggcacttatggaggaagttatcttgtgtggtgtgtatgccagagataaaaaaagagatatttgtactgacattactaaagaagtcagagattttgcaaatacaatactcaaaactattacaggctggatgcgtgcttcgacatacttgatgggaattactctgctgttggatcattcagataatcatgtgaaaagaaagacacttcggattttgtctgaaacggccagaggaaacagtttggttcagaagaatcaaaggaaagcacgaaaactgaagcatatatctggtactactattaaagtagacaagagctctggtccttatttcagcaaattgtgcttaaagattctggagttgattgacagagttggtgattcggacactaaagtgaaagtagctgctatttcttcgcttgaaacactagcaaaagaatatccctctgataatcctgtttatagcaactgccttgcaacaatcattgatcaaattggctctgatgaggcagctgtgtcttctgcattaattcatactgtgggctctctggtaaatgtgatcggatcaaaagcattaccacaactcccattaatcatgaaaaacataatgctaatgtcacatcaaatttcatgttgccctagcggaaattatgctcatggttccactagaactgccgctgaactttctaaccaagacataactgtgttgctatctgcactgacaacaattgaggtgattgtggaaaagctgggtgaatttgttaatccatatttgaaagaaatacttgatctggtagtactgcatcctgaatgcagcactcaaatgcatgccaaattagatgcaaaagcagcacgtgttcgagagctattgactgtaaaagttccagtccggcttatcctctcacctttactgaatctgtactctcttactgcaaattgtggagatgcaagtcttacgttggcattcagcatgcttgctagtctagttggtacaatggaccggctggctgtaggaacttaccattcaaaaatatatgaacattgtttagcagctcttgatctccgtcgtcaacaccctgactctttgaagaatataaatatggtggaacaaagtattattcatgccataatctctcttaccatgaaacttacggagggcacttttaggccactttttcttcgtactttggaatgggctgaggctgaagttgatgaatcctcatcaaagaaaagtttggaccgtgcaattgttttctacaaattggttaacaaacttgctgaaaaacacaggtccttgttcacaccttacttcaaatatctactcgagggatctatacaatatctctctgaagacgatgctttgggtggttcgaagcataagaagaagaagaccaaacttgtagatgttcaagttgaacagaaggataaattattggggttaaaattgtggaatttaagagctctagttttgaaatccttacaccaatgtttcctctatgataatgaccagaagatccttgattcctctaatttccaggttcttttgaaacctattgtctcccagttcgttgtggaaccaccaaaatctgttgaatcagttcttgacgctccatcaattgaagaagtagatgaaactataattctgtgcttgggccaaatggcagtaactgcacggacagatgttctttggaagcctcttaaccatgaggtgctgatgcagactaggagtgatgaagttcgccccaaaatgctgggcctgaaggttatcaggtacatggtccaacatctgaaggaggagtatgtcgttctcgtaccagagaccataccgttcctaggcgaattgctcgaggatgtggagcttcctgtcaagaccctgtcgcaggagatcttgaaagagatggaaaccctcagtggcgaaagcctccagcagtacctatgaggcatcatctcctcgcggtagtaccgtttggctgatgaactgtagaacatctactcatttcctgtggattaccagttcaacagatcggcatacttgtcggatgtctggaaactgaaattacatgctgtccaattcatggaaggcaagtgcaattaacttaaccttcaaggaggcaaatgcagtttaaggaaaacttacacgttgaaagcacccatattatgttttcggatgagttcctatgtagctacgttgaaagagtacttttctacacaattgattgaggtgttctcgatttgatctctttttgagcttttggtgtcgttgggattttgcgctaaatattggaaattagaccaaggggctgtttgttcgttgtgaaggaattataatttacttaatatagtaggttatttggtttggaatttaatattccatcacatgttaaagtttagatataatcctatcctaaatttatagggtgagaatat

SEQ ID NO: 32518 - DNA, 645 bp, Zea Mays
cttgaccgcgtcagctcgccagacctacaactctatatacgccaccctctcgtatcgttgtcgagcccgtcgaacctcgttcttctctgctcgctctcgtcgaataccaaatcccggatattagataaaaataagcgaggcccctgtgtatcgcttatcaagtactcggttgaagacatcaatcgaagatcatcgttgtttggtgcgtcgtcaagaaatcccaagacgaagctagcagcgcgatttttcccaagcgctcgacaaattgcttggatcagaaaatcgctaccgatctcgcagattcgtgtcagctgtggaaacggaacgttaattaatcgcgtgatgcggagaaaaagacgacccaagtcgaccccaagcgcgggctaacccgcaggatgatgttgatggacagaaccgaagagggataatctggcgaatgtcaagacagaagatgatcgccaagtggtcgcctaacaaacactaacctagtgttactcaggcaagccccggtgcatgcaaccccttccttgtgtttttaaattatttttgcacactttaagtctagtgaaatgtgcattaggtttatagaagttgcttggaaacccttcgatgcattgcctaccttgaaatccatcccttttatag

SEQ ID NO: 32519 - DNA, 310 bp, Zea Mays
ccaccgatgtgtgggtgtgtgagccccgccgccacgccattagccaccgcagacgactcgagctggcgccctaattcttggtaaaacgtgtctgctgccgctcggggtacgggatcggacctaagagcttcgtgaagcttctcagatcatgaacgtcgcaattcctgggcggattgcactccgggccaccgggaattgctcgccggagcaattcctccgccgcgggaagaccccctagcgcggaccatctcctctgcgtcaccatactaggtacgaaccatccccattcgtttcgccctcgtgtccgcga

SEQ ID NO: 32520 - DNA, 1471 bp, Zea Mays
tttttcagaacatgttagaagccagggaagatcggtgaaatgcttgcattgatataataagtccaggctgaagttattgagctgacagcactaagatataatagtttgagaatctcaatgggttgcttttctacattttgcaagaaaagaagggcaacgcggcaaccaagttcccaccataatgaagacgtacctggctgttcaaatataacaaaatacacttacaaggagctagtaagggcgacaaataactttaacccattgaacaaaattggtgagggtggttttggttccgtttacaagggacagctcaggaatggtacagttattgctgtcaaggtcctttcgtcggagtcaagacaaggagtaagggagtttctgaatgaactcgtggcaatttccgacatctcacatgataatcttgtgaaactttatgggctccagccacagcaatatccagtttgattggaaaacacgagtaaatatttgccttggcattgcacggggattagcatacctccatcatggtgtcagtccccacattgttcatcgagacattaaagcaagcaatatacttcttgatagggaccttaccccaaaaatctctgattttggtctagcaaagcttcttccaccaaacgcaacacatgttagcacaagagttgcaggaacactgggttatttggctcctgagtatgctattcgaggacaggtgacacgcaaatcagatgtgtacagctttggcgtgctgcttctggaaattgtttgcgggagatcaaacagcgatacaagattagcatacggagatcagatactcctcgaaaagttcccagagatcaccaacggggctctcctcttgcagacatggatgcactacgagcaggggagtctggagaggatcatagacaggtccttgggcggcggcgacctggacgtggcgcaggcctgcaggttcctgaaggtcgggctgctgtgcacgcaggacgtgacgaggcaccggcccgacatgccgagggtcgtcgccatgctgacgggcgagtgggacgtcgagccggagacggtcagcaagcccgccataatcagcgacttcatggacctcaaggtcaggagcacgaggaaagcgagcgacaacgtggccacgccgcctacgtcctcctcgacgttcctgtcctccctcatggcgcactcctcgcccttgctgtcgaacgagtccacgcaggcctccatggcgttcaccggggtgtcggatcgcgagtgatccttgatcccttcgtcaaagactggtcaggctggctggtagtgacctgagttggttggaggtgtggaagacatgtgtagtgtaggcaggcaggcacagatggatttaattgcttcgtttgtaggcgcaacatcattgttgagtcaaaaggttcaagtacatgtgaggaaactgctttgtgtgcaattttggattgaagacgcgattcttttt

SEQ ID NO: 32521 - DNA, 2959 bp, Zea Mays
attgtattagggagttgctatgaactaaccctaatcacacacactcctaactcccatcccatcccatcccatcccagccgccacagctgctgctcgccctctccctgtctcctctctctttccagccacggtttccccttcccccatccgcgcgctagggcacgaggcaaatctgtggccctctcctagtctcctgaagtccgactcagccgtctcccagctcccgctcgctcgaactcgggttggggaggcacggagtcactgaccccttcgcgttaggcggtgcccttaccggctcttcgtctaaggtgtagtcaagctgccggccacgcccggcacccccctatccagtacaaggccttctccgagatccagtacaaggtcgtcgtctccaagatctgaccccgacgctagtgaggagggaagagtgggtggacgaagtgggggaggatgagcgaggagaggccggtgccgcggcgggagagcccgtggggtctgcctgagggcgacacgcggcagcccaaggctcaccgctgcaacgaccgcgccgaggacgtcgtccaggcttgctttgaagggaacccattcaagacagttccaggcccatttaagctcttctggcaatgcatgcgctcaaaacctgggtatgtgtaccttgttattatttatgcgcttaccttctggcatatctcatgattctcatctgatctgcaataagatacgagacaaatatttgatggttctgatgcattaagcactaggttgatgataaatagaaatagacgagctcttatcggggaaatctaaactagcatgtactgactagagtgaagttaattgtaaggagggccactttatcgtgtttatatctttgctatttatttactgaggaggatgtcaactagtaactgcagagatcgctcatgaaggttaatcttgcaagagataaggttttgctggtttcggaactatttactaaggagcaacgttgtgcaggatattgattagtaactacgcatggctttgctcaatttttattttccctgtaactgacatagttactgcattgtgtgcattagtttataatgtggattttggcattctcatagaagctatatgagttccctctccattgatctgaatcaccatagttcatggagtgactgcctgctagtttttggactgtctgtgccatctggtagttagtttctctcagaaaatggccttttgggttgcaagctttcacatgtgatgcattgacgttgcatcttttgtgaaagttgttcttttagttatattgttgggaaggattcttttatgcatagggtagatgtgaaacctgacatatgattagtcagaatatgatatgcatctcagcctggttagtcaataggcaaagttgggtgtactgaggcaacctgtctggcagcttccagttgaagcaagctaatgtgagaacagcttataagcaagtaattgctactgaactgaaatgaacaagtatggttttctgctatgacacaacttgaaaagggtgtgaaaacctctaatgtcatgacattttttatatcgaacataaacttattcctataagattaaaagttgaatacttcagaaaactggtgtacagaagacaccaacttgaggacttcattcaagcttgctgcatgcagccagatgatccaactaggataatggtttgacttgtttaggcaagcatctggttcacaacttaggcatggcccatggcattgtgacaggtggcccttagccttaggtgtgccaactttctaagttacggtgaccttttttcgctgccacaagctagacaaaaaaaagtgtgggaacaccaggttttctaagccgaatgatccaaaaagactgctggattcttcttcgtgcttatttcaatattgaaaattttgcattgtgtattatcaccctgaagatttattcccctttttcattgtcatcagaggtatttcacgaatggacctgtggttttcagggaggaaccaaccgagccctatacctacctgcagctagatcctccgagaagggtggaagtgaatctggagcaaacaggaagtgaaccttgaacgagcatgcctagtttagcatctcgtgcctatttgtcttcacctttcgagcagactttttcctcctagggatcacatcatcttccactatgggtctaagcagcagtatttcggtccagaaaaccttgtatgaggttttatctgtgagcgaagacgctacgtatgatgaaattcgtgcagcatacagaaagcatgggaaatcctacgccatcctacatctagagcagactacgataagcagctgcagtcatccagacagaacatcgagatcatcgcatctgaagtccaagtcggggatatgatcattgagagcactgccgatgccgatactgtagagctgtcgtacccatgcaggtgcggtgattacttttccatcacttcgtgcgagcttagcgggatgggaatttccgtcagtggagatggagatggagaggtagagctgcaggcgtccgattctccgtcggcttccgttgttctgggctgcggctcttgttctctcaaaatacggttggttttatagatggaactccatgatatatattgtgtgcggctcagcaatgctcactttaaactttagcagccaccacatgtttctcaaacactatgcctcctggtctgccgaaatcaaaatagtgcagcttaaccttgcctgttcctatttccgggagagatgtcgagtttgtaacctgatggtggttgcgttgtgataaatgacgttttttgaccgttgttatcagctaaccaccgctgtcgaatccagctgctgggaaatccaaagttgttccggtggtggttattcggtagatgagatcttcagttaatgttgttttacaggcccgatttaatggtcccatctgcca

SEQ ID NO: 32522 - DNA, 2669 bp, Zea Mays
aaaggccaccgaggcagcccaaatcaacccgttcgttcctcccttctcccccctctccccacatcgggcagcctcccccctctctctcaccgctcaggtcaggccaggcccggcgggagagagatccggcgagagacgcggcctcttgctcccctcaacccccttaaagaagcgcatagaagcttcggaaggtgcccctccgcggctcgaaggaggggaggggacgccgcggacaatgacggcgatggaagccgccgtcgacgctatgctcgccgccgcgagccgtgccttcacgagcacctttgccatcgccatccagatccaggggtgcatgatctgtttagtccttgctctcgggtgggcggctgcttcaattgtcagaaaaggggttataaagaacatgaggcgcaacattgtagatggaaatagttttgcatttctttgtgacaacatagatgagcttgagcactctgttcaggagaatttacctagagtctctgtagtcatgcctttgaagggctttggcgaacataatttgcaaaattggcgaactcaggtatgatcaaactgcactatgttataatgattgtagtttatttcttggattgttatgtgcccttataatccgtaaaagtacagattacatcactttatggtgggccactggaattcttgtttatcgtcgagagcaaagatgatcctgcttatcatgctgtttcccgtttgatcacagagtacaaggacaatctggaggcaaaggtggtcgttgctgggttgtcaacaacctgtagccagaaaattcacaatcaattggtttgtaaatgactttgtttccatcctcgatgtctatttcatggtctgttcatgacactgaatgctcattttggcttatgcttgtagatgttcctagtgtgtggaatggagatgttgaatgtgcatgcattcaaatattccatcctatttccaatatattttttttgccgtttgcatatcattcatcttccccttttatagaaactaaagtgtcttgaacggtggtaagttgtaagtgctacatttgttaccttgcaagcatgaggatagtcacattggatatgaaaaaatgccacaaattttgactgttactgtggttactatatgttcatctcttggccttgttttattttttaccaaagaaggccagtaaattgactcgttactcatgtttatcaaactgaaacagatcggtgttgaaaagatgcacaaggataccaagtatgtattgtttcttgatgatgatgtgaggctgcatcctgggactatcggagctctcacaaaagaaatggagaagaatcctgagatatttatacaaactggatatccccttgacttaccttctggcagtttgggcagctattgcatatatgaataccacatgccttgttcgatgggatttgcaactggtgggaagactttcttcttgtggggtggctgtatgatgatgcatgctgatgattttaggcaagaccggtacggcattgtcagtggattaagagatggcggttactcagatgatatgacactcgctgcaatagcaggacagcacaaaaggctcatattttcaccacctgttgctgtgtttccacacccccttgccagtgatcttagcttctccagatactggaattacctcaggaaacaaacttttgttctcgagtcatatgtatcgaatgtaaactggatgatgaaccgtgcattatttacaagccattgctatctgtcatgggggtttgtctggccatacattatggctttggtccatgttttagctgctcttcgggcaccgtacagcaaagttgtaaaggaagcatccgattcatcttggggtttgttcctggtgggcctcttgttcacatgcactctgatcgagctcgtttcaatgtggaatttgactaaggtggaaattcaactgtgcaatatgctgtctcctgaaggaccgaaagtatctcttgattcatacaactgggggctcgtgttcatcgctgtgttggtagacaacttcctctatccagtatccgcaatccggtcgcatttctcccaatcaatcaactggtctggcatccggtactacttgagggacgggaaaataagcaagatcgagagagagaacagttcgaagtacactgatcttggagggaagcatctatacggcaagaggacataccctcctaacaaatcgttgctcggttacctgtcaagaactctagtgcaatggcatcagccaaagaaatatgacgtataggaaggtcgaccgggggagattcagccctcgattgtgtggggggcttcttgttgtacacctcttttggtttcaactttctttcatgcctctctctctctctctctcctctctgattgtttagtggttattaggttcattcatattaaattttgtggtgttcaatcggcgccaccactttgaaagggttgcattgcacctcatagttctttgtaacactagagatatgtaacgatttggctgaagaagtgaaatgttccatgttggtgagacggtctctttggttcatttgctgattcatcgactctttaagagttgacatctactcactattgtatcataggatcacatgccttgatatagcaagattctgctctttcttttttttggg

SEQ ID NO: 32523 - DNA, 2166 bp, Zea Mays
actcgcgtcgcacggatctctccttccctccaggctccagctccaaagcctcgtcgtcttcttcgccccgccacccgtcctgcacactcacaactagacatcgtaccacccaggttttgctttatgctggttcatttgtctacggacaatggactagttgctgcactgtttctgtgattcaccatgggaagcagtggagcagatacaccgtctaaggagcagcagccacctgctacctcaggtgctgcaataccacctgtttatccagattggtctagcttccaggcatatcccccaatcccaccacatggattcttcccctcacctgtggcatcaagtccacagggtcatcctttcatgtggggagctcaagctatgattccaccttatggaacaccgccaccatatgtcatgtacccccctggagtatatgcccacccatctatgcccccgggtgcacatccatttactccttatgccattacttctccaaatggcaatgctgatgctactctggtaatactgatggcaagccctctgaaggcaaagataaaagtccaacaaagcgatccaaaggaagtttgggcagcttgaacatgcttactggaaagaatcccagtgaacatggtaagtcctcaggtgcatcgggtaatggagtcacttctcaaagtggcgaaagtggcagtgacagttcaagcgaagggagtgaaggaaattctcacaatgattcacatcacaaggaaagtggacaggaacacgatggggatgttcgaagttcccggaatggtgtatcacgtttgcaatctgagggaaaattgaaccaagctatggcaatcttgcccataccatcaagtggcccagcaactgatccaactacaaacctaaatattgggatggactattgggccaacacagcaagctctgctcctgcaattcatggcaaagcgacgtcaacaacagttccaggggctgtggtcccagcagagcagtggacacaggatgaacatgaactcaaaaagcaaagaagaaagcagtccaatagggagtctgcacgtagatctaggttacgtaaacaggctgaatgtgaggaattggctcaacgtgctgatgttttaaagcaggaaaatgcttcacttagagatgaagtaaaccgtatcagaaaagagtacgaggaacttctatcaaggaataactcactaaaggaaaaacttgaaggcaaacaacacaaaactgatgaggcaggacttaacaacaagctgcaacattctggtgatgacagccagaaaaaaggaaactaatgctatcatgcaatgcttgcctacattggtcctaactagattattgggaggtgcaattgtagtatgcacattaactccttactttattgcagttaattgttaccaggttgtgataatgttgatgccaaccttttgtgtgggtgtttcctgtttcagatctatcttggcttatcttttagaagccaagatgtgactgaagctataggctgtgacccaattcactatatctgttagaaatagtggataaagtcaaactttcaaatttgaagtgctgactaatattgttatgtatacctggcaaaagactggtttccttttaattcagtctggttgaacattttgctgggctttcactactgcctagtttatgtacattgttgttcatatcggttgttcctagttattttttgtaataattaacaaatagatgagggacactgtctcaacctctgcaccaatatatatatggacacacacacacacacacacctcttttttgcgtctattttctgttttacttcaaagtttgcaggtttgtttcagccctgtttgattgtgagccttggcgctggcggtattttttttaagtttaaatgatccacctgctgtaggtaagtttggttaaaagacattcctatttttctgtttagtgacactgatattagtaatccttttttttcatccatctatttaagtgtcagcagaatcgtttgttaaacttgctttcctgaacttgctcttgattctggtaagtttttgggctcctggcactttacttttatgatcttattttgatttgctttttacaggaaaatggttctggactatgtcttagatgggaagcatagttcattagtatgtctgcctt

SEQ ID NO: 32524 - DNA, 3084 bp, Zea Mays
gccatcgcgcgctcgcctccctccccgcgcccgcagtccccgccgcaatccccgcgtccgcgcccgcagtccccgccgccgagcagtcccgccgcgccccctctccctgcaaaccccgccacgacgcagcaactgatccaccatcgacgcgcgcgccgcgcgccccgacgcggaacgctggatcccgcgcagcagaaggcggccaaccagtcgccgtcgcccccggcccccaccccgcctgctgcagcaagcggcgtccgctaccgcatgccctcgtccccggacctcctcctccccgccgacgctaccaagatgcgccgctactccgcgctgcccaacggcggccgccaggagacgttggccgaccgcgtgcaccgctaccagggcgtcatgctcgtcatcctcgcctcgctcgcgctcgtctctctcgtcctcctcctcatgccacgctcacccgctggcaccatgggcggcgcccggggcagacagcgagatcgagctcttcgtccaggtacgcactcccccgcccggtgacccgttgccggacttggagtcacgctgcctagactcgcccgctgggtggattcgtcgcgttggaggtcggattgtgaccacgccgtccagttaggatgtcgtcgtctccagatccaggggatggggttgctcggcatggcggccaagggcccctcgcccacgcgtcgcctcctatcgcagccgcacttggccatctcctcgctggtggcctccgtggctctgatccactgcttcctcaacacccggagatggttgacgtcgccttcgccgtctcctcgccagtggcctccaccagccccgcagtccaagacaaagccgcgacatgagtcaacccaagtccggtcgcacctacaccgatgaccgtacccaacgtattcaatctctctattcggcaacaccttaaaaagtggattgcaggcttagataatttttggaacacaacattgctccaaaaaagtttttctgaagaaaaggtatcaatctgcagtttggtaagtgagtctgaatctgcagcaccaaggacttcaataattagtttgaacctgcacttacagttctatgggtcttctcaattcttaataatattatatttttaatgaataattgaatatatattgagtctgtgtcatagattcagtcgccttaacaccctttgttgttttcccacttaagttagttaatgagatgaatggatggaaattacgtagtgaatgtatgataagtccaggctacatgttaaaagacacacttggctacttgagctctgtatttccatgaagaaatcttattgacgggtgctttcatctgctatttggatccgttgctgatggatcttacaaagaagaagttgagctttaagaggaacgtggtgtcattgtcatctgagctcaagggtgtgaggagcaagcttgcttcctaggagcagttgtttgtaagggaatctcaaactagaaagcttgcggagacaaaaacaaggagcatggaagaggaagtaatcaagctgcagaaatgcttataggacaaggatgaacaactgcattcattcacaagtagcacagaacagtaccatcatgagttggatgatcttagaacacatctgtcatttactcaagctacaggagaagcaggaacccaactgaaccttcaacttgcttgttctgggagatctgtgagcaagcgagttgtcctataacagttggctcctcacaatgggtattcgacatgagccccatccctgccacagacttgggaaaggcacagtgatttttatggtgacatgaagacattcctcttcaaattatatctttaagcaaccaattttcgccctactggtgcaaacaagaatttgcaatggataggttactggctgcacttgtttgtgaatacttggagtgaccacaactaagtcacacaatgaaactttactttccagagtgtaacctgccggacttctaatagaatgaactgaaagacttctctaacaaaagtggagctgaggggagcaagagtgctaaaagtggtccaatgtttttagatgttctcgaatgttatctgaaatatgaggtttatctcttgcttgatcaacaatagaagcaaaaaatcatccttttgtttatttatgtttcccaatataaaggaaaaaggggaaatattttggtgcagtgtgcccaattcttttgtccctagaaaactgtgtagccgcctataacaggcgctatagtcagttttagctattttagacaccactactatttgtacacacatttctattatcctattttagcctgctatatccatgtatgagccttatgggaactctgcaactactatggatcctcttatacattatgttcgacatgcagacaaggtattatattgagttggaccaataatccttcatatttattgatgtgaattatgttgtactggtgtcctgtccttttgtttgtgctttataatttgtaattcctagctgctgatatggtatgatggatgggaggtggctgaaatcgttcggataagtgtcaatttgttgttttctatttttatgaatggttttctatttcagctgatgaaccttttatagttcttttattatatactgccactgattgctaatagggtgcatgtctcctatttctaggtatggtgcataaaaaagtaggaaccacaatgagattgtgatgctgcacatggcacatcaaggtgcgcaagatatgtaccatagaaattatcgtaaagtgcacacagctgtatgtatagatgtttagaagtgaccgaagttaggcttgctcaaccggggcaatgatttacttagcctgctgaaatgtactataggtagcattcaagtttgtgaccatcatgcaagtacatgtgggtttgttgaaattgtgtggtcatcggagatgtagcaaaatgttccctatcgagagctcgtgtactatatttgttttatgaacttaattttgttgatgtaggactattacaaagttctagagacaacttaatttttattacaacataatatgtggtcatacatatgttaatgtt

SEQ ID NO: 32525 - DNA, 943 bp, Zea Mays
gctgtcaagattcaaaaactgaaacaatgacaaacaacacagttccattttctgaatcttaataattacactgtttgcgctccccttggatctactcgtattcctttacatgattagttactactaattcatttctctcctagaaatttatgcacacttttgcaacaagacctttcttcccagcccttttctacagttttgttaggaagtggttgctgcctgaccctagtcgtgtattgcagccatcgcacggcaaattggccagcggcggcggcaggtggtggtgtgagcctgcgaggcttcctacctgcgctggaagtttaggtgcttgatggcgaggaagaagagaaagacgaagaggccaatgatggcaagatggaggcaggtcaccagcacaaagtagcgatcctgcaggcccaggtacccctctaggaactcacgcaccgtctgctccccgagccccggcaccaggatctgctccgtcctgtctgcgagctgtgagaacattagcccataaaccgtccatgccgccggatccgcccagtacacccaccgccaccacacaggcatcatctgcagcaaatttactcaactcgtcagccgattcagatggggggttacctctctcacgattatgaagccagagaagacgttccaaaagataaagatgaggaacgacagccccatggcgatctcgatgttgggggtcagggccaccgtcatcatcccgtatagagtgtagtacatgaagctcatcacctggtataggaagaaccagaagaatttgctcgctgtcacctggaacccaatcattgggtacacgattgatgagaagatcatcacttgcaccaacatgtaaggacaggttgattgttgatgtgttatgttacctgagcgatagcgtatgccatggtggagtacatgcctgccgccttttcacggt

SEQ ID NO: 32526 - DNA, 250 bp, Zea Mays
ggatcatcctgtgcaagggcaacccgcacttgatgtgcgacgcgcgcgtgctcgtgaagccctacaaggagaagggcaaggtccccgacaggaagctgcagcacccgcacctcggcgacttcgccggctgcacgtcgcccaccggattgctggattccagggaccccttcgatctgcagcagccacagatcgcatttcttctgctcaatctgccattgatgcagattaacaagctggtttgtttgtttgg

SEQ ID NO: 32527 - DNA, 726 bp, Zea Mays
cggcgaatgaaccatccttatgtctagacagagcgaaatggacgaggctgttcctgctttggctaccggccaagcttcaaccgacgccgtgacagagcagcctgtgaatgtgtacatatgggacatggatgagacactcattttgctcaagtcacttctggatggctcatatgctggggcttttgatggcctcaaggatcatgagaaaagtactgaaataggaaagcgatgggagaacctcattcttgaactctgtgatgagcacttcttttatgaggagattgagaactacaatgaaccctatctcaatgccttgaatgaatatgacgatgggagagacttgacctcatatgattttgaggctgactgttttagttcaccatatgatgatgcgaacaaaaagaagcttgcttacaggcatcgtgctattggagagaaatatgcaaagttacatgacagaagggcaggcctggtatagtggtgttgagtcaccaggtcacgggtttaaagcagcctctccgcatttgtggggggaaggcttgcctcggtttatcgctttcatagacctcacttatgtgggagccttcggcactaggtctgccatttttttatggaaagttagattacaaccttgcaacaggaactctatgaatgtattcaagaacgaaccttgtaaatttatagcaggatgcggtgctcagatcactgttgtagtgaactactgta

SEQ ID NO: 32528 - DNA, 2589 bp, Zea Mays
ccttatatctctcccctgctttcgctctcctcacaccacaccagttcgtcgcaaaacccaaacccgttccaaccgcaaggagactccgctctgcgaagaacgggacggatctagctcgaccctctagaccggcagacaaaggagacgccttcgtgcggcacgctcttgggggtaatggcgccggcgtgggagcgcgccaggcgcgcgctcgccaccaggttctgcatgcgctttgcggcgaggcgcgtggtcgtcgaggatgcgccacgtgggatggacgacatagaggcagaggaggaggaggagcaggagcagcagcagcaccaagaggagccggccgaggatgagagggagatgtcgctggccgcggagtccgaggacctggcgtcgtcgtggtctgggagccggagttcagagacatgtgcaatttgcctcagcggcatgaggtccggccgcggccaagcgctattcactgctgaatgctcccacaagttccatttcaactgcatctcctcaaacgtgcagcacggcaacaagatctgcccaatctgccgtgctgtgtggaaggagctgcctttccaggggcatgtggctacatctgctgctgctcatgtggtttggccccagatgagcatgcagtcagtgagtccgctggatgagctcccggtctttggctatcaggatacagcagttatgaacgacgatgagcagatacagcctactgaaacagcagttggtgatgaggctcctcctcctcctcctcctctgcttgagatcacgacgtacactgaattcccagccgtccaggagtccgtggcacacgaggaattcgccatcgtcatccatctcaaggctccgtcgtgggtgagcacccgagcgccactggatctggtgactgtgctcgacgtgagcgggagcatgtcgggccccaagcttgcactcgtcaagcgcgccatgaggttcgtgatcgagaaccttgaccccagcgaccggctctccgtcgtcgccttctcctcggcggcttggaggctgttcccgctccggaggatgaccgcctccggacagcagcagtcgctgcaggctgtcaactgcctcgtcgccgacggcggcaccaacatcgccgacgggctgcggaaggctaccagggtggtgcaggacaggcatgccaggaacccggtctgtagcatcatgctcctctctgacggcgtcgactcccacgtcctcccgccgcggcgcggctcggcgccggactacggccggctcgtcccgcgctccgccctccttcccgggagcgagcaccacgtgccgatccatgcctttggcttcggcatcgaccacgactccagggcgttgcacgccgtggcccagatgtccggcggcaccttctccttcatcgacgtggtggggtcgatccaggacgccttcgcgcagtgcatcggcgggctcctcagcgtcgtggcgcaggagacgacgctcagcgtcgagtgcgccgaccagggcgtgctcctcacgtccatcaagtctggcagctacgccagcggagcggacggtgacggccgcggcgggttcgtcgacgtcggccgcctctacgccgacgaggagagggacttcctcgtcaccgtgcgcgtcccgccgtcacgcgggaccatcgcgctcgtccggccgagctgcacctaccgcgacgcggtcaccacggagatggtgcgggtggggggcgacccggtgacgctgctccgcgcggcgagcccggtgagcgcggcgatgtccctgcaggtggagcgcgagtggcaccgcgtccacgccaccgaggacatggccgcggcgcaggccgccgcagaggagcacgactacgcccgcgcggcttcgatcctcgaggcccgccgccggctgctggagtcgtgcgcgtcgctgtcctcggaccagcagacgcaggcgctggtggccgagctgcgggagatgcaggagcgcgtgctgaacccgcggctgtaccaggggtttggccgcgcctacatcctgtccgggctcagctcccactcgtggcagcgtgccacggcgcgcggtgactccacggagctcacgggcctcgtccacacctaccagacgccgtccatggtcaacatgctcaaccggtcgcaggcgctccagccagaggtagcggaggcgctgacccggtccccgacgatcgcgccgttgcgcagcccagcccccgcctccggctcgcgggggacgcgacgcgggccccggtcgttcaggccggcaaagtccttcactgggcggtcatcgtgagcggaggttcgctgacaatgcatgcgaaccggcagtatctaggaggaagaagaaaaaccattaccatttgattcgtttcttcgatactcttttgtcgtagagtcttttgctttttatactgttatttggtcgtgggctaatcgtgagatatgtatgttttggttcatctactaaactagtgggaactaatcatcgatttggtgtttttgttctaagtgttgtcttgtttttttttcctggacgggatacgggagctagctgttttgcgtctgctagctggttggagcgcacaccgttgcacat

SEQ ID NO: 32529 - DNA, 1772 bp, Zea Mays
cgcagccccccgcacctctctcgtccccactccccacaccctgctgcctgcatctcatcgatctcctcctctccgacgacgaccatggctgagacgaccctgctgacgaggaggtccaagcgcatcgctctgcgcgtttcccttgccggagccaaacccagctggcgtgactgggccggcctagcgccgctggcggtggagaagatcgccgaccgcctccgggacgaggacgtggcggacttcatgcggttccgcctggtgtgcaagctgtggatggacggcagcggcatcaggaagcctcgtgagctgggcgcacgcgttatcgaccacagcttccaccctcgccggtggatcctgctgacggatgagaagaaggaggctgatgaggcgacgcccacgcgccgcatgctgctcaacctcaccacccggaagaccatccaggtggatctgccggagctcgccgggcactccgtggtccccggacccgccgcggcgccggagggcatgctggtggtgcgcgacgagaggagtctcgtcgtgcgcctcctcaacccgctcacccgccacgtcgtcgacctcccgacgctgctgacgctgcggcctggaaaccgccgcaggggccccgttcccagctcgttcgccgaggaccacgaggtgacggcggccggcttcgccgacgcgtcgaccatcgtcgtgtacttgggcaacgccaaccagttggtcgtggccaggcccggagacgcgcgctggacgctggtaggtggcctcgaccccgagttcccgctgagatccacggccaccttccagagccgcttctactgcgtggatcgctgccagctcctggtggtggacatggagcgaggaccacgggcgcagctggtggtcgccgccaacctggagcggcggtaccgcacggtgggcatggtcgacgacggcggcaggctcatggcggtgtgcagccgggaccaggtcgtgcgtgccgatgcccgttggatgagctcgctggagacgcgcgtggagctattccatgtggatctgcaggaggagaagctgtcgcggatcgaggacctaggtgagcgggcggttttcgcagggttacgaggcgcggtgcttctgccgagtaccaagtactacttctcggtggaccgtggtacggtgttcttccgcttcggaagctcccaaaggcatttcggtgcgttccatgttcgtcgccgtcacacgtgctatatagcttcagtgtggggtaagcttccgcagcgtgtagcttcctatgtcaccaccctccgttatctctactagtccgatcctctccgcgcggccggccggtgctagctaaactgttgttgcagcatgcatcataataatttggtttcatatagccagggaataattcttcgacatatatcgcatgctgctgagtttcagtttgtattttcggttgctcaactagtttcttattaccttggactcagcataactaatgttattgcaacttcattcttgaaatggttatttcttttcaaatgcttactttgttccaactatatatcacacatatatatgtttttatcttgttctccagttatttcttaattaattctcactgtatgttttgaggtatggatcgtcattgtgtctttaccaccctagatttcggagtggttgcatttttagtcaaagccttggatcggaacggttggagaaggaaagagccaaaatgttatgggagttgtaattatgttggatttttaacgggactgttaagggcttaa

SEQ ID NO: 32530 - DNA, 2130 bp, Zea Mays
tcacagtcactgttcacacaacagctgctagtagccgtagcccgtaggcgagccagaggcggcccaattcgagagcggttccggcggcgtgggcggcgccgtgcctgagatcggagccccgtggcgcggtgctggcaactggcggcgcgatgtgggcggtccacgggagggagtccacggccgctgcgcttcgcctgctgctgatcgcgatcgcctgcggcctcgtcttcgcgctcctccacctccccctcccggatgaccgtgcgcgaaccgccgaccccggtgggcagcgcggcgctgctgggggcggcggggcccgcctgtcggtgcagcaggggagggttcgagaggccagaaggctgagtgtcgtcaccgaagagacagatgggcaaactgacgaaacggcggcggaagaagatgaaaggatatctaaatctcccccagacaccaaagagaagatctggatgatgcaagatcagctaattttggccaaggcgtacttgcatttcgcttctccccaaggtagtgtacatttagttcgagagctgaaattgaagataaaagagatcgaaagggcaataagccactcaagtggaggtacccatgtacctgggagtgtgttgcaaaaaataaaggcgatggagctgaccctttcaaaggctcagaggacctacccgcattgctctcagatgacgtcaaagctacgtgcaatgatgcataatagtgaagaattggtcagagcacaccaaagtgaatcttcattccttgagcaggttgctgtgaggacattacccaaaggccatcactgcctagcaatgcagcttaccgcagaatacttttcgttagatcccactaaacgtgaattccctaaaagagacaacattcagttgggtggttattatcattatgcgatgttctctgacaatgtgcttgcaagtgctgtggttgtcaactctacaattgctgcatcaaagttccagattcaagctgaagggggttcgggatccgagatacacttctgcactcaaccacttgcgtttttatttgccagaagtgtttccatctttgagcaaggttctactcttggaccatgatgtggtagtacagaatgacttgtctggattatgggacctagatatgaagggtaaggtaaccggtgctgtcgacacatgcacctcaagtgaaggtttccgccaattggatagccttattgatttttccaatccaagcgtcttcaacgaacttgacccaaaggcttgtgcatttgcatttgggatgaacatatttgacctgaacgaatggcgcaaacagggtttgagtacaacctatcatagatggtttcaactgggcaaaagtgagaagttgtggaaggcaggaagcctgccactgggtcaggtcgtcttctacaaccggacgctgcctctggaccaccggtggcatgttctagggctcggtcatgactccagcatcggaagagatgaactcgagagtgcctctgtcatccactacagtgggaaactcaaaccctggttggagatttctatcccaaagtacagaggctactggaacaggtaccttaactacgataacccgcacttgcagcagtgcaacattcacggatagaggcgatggcgggtgaggtgattcgcaaggtagaactgggatatacgcaacttcgctgtagtaacttattaggagagcaagttgttgtttttttgtttctgttgctagatgccctatttgcaattttgtttgctagtagtcacaatcggtacaaaagcaaaaaaggaagaacaaaatcgagtacacgagctacagtttcactagtgatacactgaaggtttgacagaagtcaagccactagctaacattatcaataactagtgttgcctcggacctggggaagagtgcgaattccacggagctcagttagcgtgcgttggacaagatagatgtaaagttttcgcgataatatcgttctctcttacaaagaaaggggttttactactgccatttaaaattatgccgcagtgctggcgttgccatcgctttgttttattttcctttttttaatgatatatttgcaatgtaaactatatggctctccgttgtggacatctcagcagggtg

SEQ ID NO: 32531 - DNA, 3371 bp, Zea Mays
  misc_feature (1)..(1): n is a, c, g, or t
nagcgttccagcggtatgacatgatcccacagaacgctttgagagtagcagaggaaggaggaacgaggaagggtttatagtttggattatatgattggatgatcggatggttagtagtttggattggaagattggatcacatcgcgtagtccacctctcctctccagtttccacgagaaaaaaagtggatcctctttcccaccaagtcaaggtttgtgaattcgggagtgctagaatcttgatcttccacaagagaatgtctccagaagcaatggataggcttctagaaaaagataaagtgccaaacccatgctatagagtatagactgagtttcaacattggaaggctcaactaaatataccagttccggatacacactacaggacaaaggtgcacagcacccgatagcgcgctgccttttttagtgtagaactagaaaaccaacgcacaacacaaaccagagagttctccatggacgtcggtggcggcgccaccggcacacgctgccgagaccccaccgctgacccctcgtcccagttcttcgttgacgctggccatccatacgcagtcgctgcagccactgcgctcacctcccaccgcaccaagtccaagtggtcccacctctcttcggtccccgtcccctcccccttcctggcctccgccgccgccggcgtgctcctcctcctccgccaccgaccgcacaccgcgctccgcttccatgccttcgccatccgccgcctccttccctcccgctcccctccccctctcgtcttctctgccgccgcagcccacgtcgcggcggcctcccgccttcggggccctgccctctccatccttgcctctgcctcccgccactgctcaccggcccagatcttcaatgccctcgctgccacctaccgctgctttgcctccgccccattcatcttcgacctcctcctcctcgcctaccttcgctcccgccgcgacgtcctcgctgcggcctccgtcgcccgccgcatcctcgctgccggcgcacggccgctcccctccactgcggcagctcttcttcgttcactcccttccgccaccgcggccctcgacatgtatcatcaaatctacacgcatccaagtccacggagcaatcacctcctcctgccgactgttcacaccttcaattccctcctccttgctttccaccgcgaaggcaagtgtgatgaattcaagattgtgctccaggaaatggacaaatattcctgcaagcacaacgtgtgcacctacagcatcaggatgtctgggtactgcaatggcgggcatgtggataaggcgcgaacactatgggatgagatgattcaggaagggatccagcctgatataactgcgtacaacacaatgattagtgggtattgccattctggggaggtaggggtggcagaggagatgtttaaaaatatgttgatgggtgggattgattcaagtgccacgacgttcgaatggttggtcagagggcattgtatggcacgggatgtcgaggcagcaatgcttgtgcgtgcagacatgaaaaggaaggggtttgggttggcgccagaggttgttgaggaattgctggatggattatgtcaaaatgggagggttgaggatggcttgagtgttttgcgagaggagatgaagagggaagaatttgtgccaacccggaggagttacgaggtgttgattatggggttttgtgatggagggaaggtggaggtggcaatcagactccaagcagagatggctggaaaaggattcactgctggcagcgaggtgtactatgcatttattagtgcttatgagaagtctgaaaattatgagatggtcgagaagttgaggaaggaaatgtcggcgatgggcacttagagcatgtctagcagctcaccaataattcatccctaataaaatggtattggtggtcaccaatagtgctttttttggaatattggggagactctatagtagattaccaataatctttcccaatacatgggacccacatgtcagaatagaggatgtgggaggaagaagatgacgacagttgttgtggtcccaacacctatagagggagatgcaactccccttttatttgaggggagatgggagatttgttttggtgaccaccaaaaaaagggagagctattggggagctgttggagcaatggaattgcctcatctcccccaatatgacagttttatggggatgagggatggtattggagagctactggatgctctatcggatctgatatttggcttggatattgcacagtgatgcatggatatcaacctcacctaattgcagttgagaactatggtaaatcacttatctttacatcactcctcttcctttgattaagttgcttagttttaaaaccagccatttgttctctcttgaatctgtttcttcttgtagtttgttatttgttctgcatggcatgttataaccatttatttcagaaaattttgatgtctagtattgaaacttgaaacttcaaataatccaaaattggtgctaacttgttctctaggtgagaggtgtgtaaagcttgtttgcttcaaaccgatggtaacaactggtatggaaacatcatgttagagcaggcattagttccatattccactcagtcacattcatctaaatgtaagcgtctattgtagttatgtagttggcatgaatatttatacctgtaaattatgattcatagatgatgaacaatcacttaaacaatataagtctggtgccaaatgctatttcagatgatacctaaatgttacagcacatagttttgatacatgcagggtatccttagaaaagcaagtaaattatgtaatagttgaaagataattctcaatatcatatgtcagatgttctttctggttcacttctctatctggttcacaattcattccagagtggtgcaacaaattctgaattggttgaaggagttctctcctagcactatcctggagacggatgttggagaaatatgactgctggatctgcaataggataatgtcttttagtcgatcccttttgtgcttgtttggtgaacttgtgtccccaatctgttgaactctgtaaacatttgctttccataaaagcagagatattctccttaaaaactcagtccagaatggtgatatatgaatgatccctgagagtttataaggtacaaccgtacaagtccaggtgctagagacttctcaatttgctggaaaatgctgtagtattttgtgttgacttgctgtttgatatatgctcagtacctcactgtaaaatgtggttctcttgtttgcctcttaacaaaatcctgagaaatgacatgagaacaaattgagaattagtagatcagtacttaac

SEQ ID NO: 32532 - DNA, 1809 bp, Zea Mays
cgtccctaccctctcctgtcctgtcgttctcgtgcaagctcacggtcccccacgcccacgagcgcctccgctgcgacgaagagaatcatcaggcagagcgggggtggggcggggcgcagatggatctagagaggtcaccgccagcgtcgtcggcggaggcgcccggggacggcggcgggggcggggccgcggcctgctcaatctgcctggatgcggtgctcgcccgcagcgctggtcgctccgtcgccaagctacaatgcggacacgagttccacctagattgtattgggtctgcattcaatgcaaaaggagcgatgcaatgccctaactgtcggaagattgagaaaggtcgctggctttatgcaagcggacatcgcgcctctgttgatattgatatgggtggctgggtgaccagtgacaactatgatatcacctccgagcttccttttggatttcaatggtgcccctttagtggattcacccggctagcatccatgtttgaggagcgtgaagctgagcttacttatcacacaactggagatcgctcaagtgctgcaagcagttcacttgtttgcccatatcttgccctgcgtggttttctgcatcctgttcatgtgccttctacatctaatcctggtgctgaaagcacttcatttcgtcggcatgcaactggcttggaaggccatgccactcttgatttgaataatgctcaacttttccatgcgattgagtcaataaatcatgacagtgagcacagacatttgagtaatcttcctgtatcaggaattcctgagtattctatgactccatttggtataggactaccaagatatgacagtggcagccaacagagattcagatcatatgcacatcatcatcccctaatccataggccagcacctcgcagtgggagcaatttggtggcaccaccattggggtcggttccagctgtggtggcggcggcggagaccgcaagaggcagccacatgtaccaacgctcgtccgtgcatggcagcccgttccctcctaccaccactagaagggtgaggccgagagccttgacgatcacatcgttcatcgcagcgacgtcctcagaaccatgcgcatggaggctttagcagaaggcctgctggggagcggatgccgccgcagagccaaagccacccggagaacagctatcaggctgtgccgccgtcacagaggatgccgccgttcttgtgattcgacaaggctgttcctacgtccgatcgctgtgtataaaatgaagtattcggttcggggcctgagagagcacattgagcgaagatcgactgcactgcagtctccagcgttgggacctgtgtgatgtttatgccgctggtatttcagcgcttttctttttccctccggtccagcagcactctggtttcattgagcgctgtagactgtctgtcctaactgatgttgtgttgcgttgaggaggacgatttggaaacgtgagccgaagctgaactgcatctctggtctccgggactaaaaaatgccgtttgctgctatgaaagttgtatcgatttgcgaccgcaggtcgcctgcaaatttgttagaacaggtgaaatttagtgaacacaaatgttggagacctgcggcgtttacattttttttgttggttaccgagattgtatttaaaggtcgtgatgcgccatcaagcgattgtgatggatcaatttatctccctattgtagcaatgggttttttttgaaaccgatggatgtatatgtcactagaagtaaataccagacaaatatagttgtatccatgctaatttgacca

SEQ ID NO: 32533 - DNA, 1439 bp, Zea Mays
acgcagggtggctaggagttgagtcgtgcagaagagacaaaggtcctcacttggctaagctagacacgtacgagtgcaggaaacaagataagtcgcggtttgcgacggcgagaagcgccggatgagtgtccactgtccacaagtccagattccaattccagtccgatcgtgagctcagctcagctccgctagtcctctccccgcacgcaccaccaccagcagcagtccagcaccatgggcggcgccctgctcctcacgctgctcctcgcggccgtgcccctctccttgggcggcggcggcggcgcgcacccgggctactccgacgacgacgagagcgcctgcacggtggacgcgggcgcggagctgctgcggcggatggaggagcgcgggcccgacaggcgcatcatcgacatcacgcacgcggtcgtgccggacctgccggcgttcgccacgggggcggtcgcggggcccatgctgcgcctcagggagtccatggcggacgggtccgagtacaacctgtcggagctgcggatggagtgccacaccggcacgcacgtcgacgcgcctggccacatcaaccaggcccacttcgccgccggcctcgacgtcgacacgctcgacctccacgtcctcaacggacctgcattgctagttgatgtgccaagaaacacaaatataacagcgatggaattcctaaacatcccgagaggggttcgccgagttctgttcagaacactgaacactgacaggaagttgatgtggaggaagggaggtgacatgagctacgttgggtttacagaggatggcgcgcagtggttagtcgacaacaccgacataaagctagttggagttgacggtctgtcagtggcatcatttgatcacctgatctctgcccacgtggtctttttcaaaaccccggatataatccctgttgagagcctgaatctggacgacatcgaggcggggatatacatgctgcactgtctacctctcaggctggtcggagccgagggtgcaccgaccagatgcatcctcatcaagtgatcgttcctcggccggcctgctcttgctgccttgctggaggtggcgacactggaccatgccagctgagctggtgctccgtcgtgggtcgcgtggccaatatttggctcgcatgcagtcgtcgatctatatggaacagaacactgcatgcctatgtagatacgcttgtatggacaataaaggaaccgcagtacttctgtcgatgaaatacttttgggtgagccggtaatctaaaacaccaggcctacaggttaagctggaggccctggaaggctgaggctagcggctggggatggatccagatttttattcgaatgctatttttttggtcatatttctttgattgtaaacaaataacatatatgattttctatatctctactactctatatgagtcc

SEQ ID NO: 32534 - DNA, 2544 bp, Zea Mays
ttttcttgctttgttgcaacagaagggtgttgttgttgccgttgacgttttgcctccatatttggcatcgttacagagaaaagactttccagctcagagatatcaatctctggggtcctgataaagatgtgcatggattagtatatatcccccccccaaaaaaaaaatcaactagaaagaattccataaaagaatgttattatacctagatatttcatcagacttctgtgtttcagcccacaaacttccctgtgttgctcttgaaactttcacccagtgcaatggcttcagcggggtccttttagatgcctggttggcacgtaaacttctaggactttttgagcgggctgtgctacgatcctttgcaccaaatgaaaatgctggatgtgggggagggttagaattggcaacacttcccttcgtaagcttatgaagggggccgggtggaggtggaggtggtcggattgttggtgacttctgtgaagtgttattggccacggctagcttaggaggaggtaatgggggtgaaggtggtactgatggtgcagaagtaacacgggatgacagtggtgctggaggcggaggtggatgaggggctgccacacgatttcttctacttaaggatgggaaactttgtgaagagggaggtggtggaggtggagtaggtggtgtttgagaagaatgtggtggtggaggcggaacaggtggtgttcgaggaggtggaggtggaacaggcggtgttcgagatggaggaggtggtggaggtggaacatgcagtgtttgcacccgtgtaacgctttgtgaaaatgtaggtgtcaaagacggggtgtctggatattccattgttgcactgtccttgttatctagaaactgcggttgagacaatgagacttcaggtgatgatcgtgaccgtagagaggaaaatggtggttttgccaaccctgggggtgggggcaggggcgggggcggtggagaccgagctctcttttgtggagctagaattacagatacagcatctggatttgagcttgaaaatgacgctgctgctgctggtggatgcggaggctgatgtggtacgactttttctatagtgatttttacctcttcaccatgtgtcaaaggaaacagcgtcatgcctgattttgacggaggcggtggtggtggtggtggcggcggcggcatagtttcagatcttgtcgcttgaattgcaaagggcctagtgtctggattttgaggtactgctggcaaatctgtcgggagagatgctcttgcgttgctcaattcctcatccagtgaagatgaagcggctggtgacagtatgaaatcattggaacctgtagtactatcagtttgtaatttcccacgagtttcataggaaggttcttgtgatttacccagctcttcggttctcaaaagatctttaggagggactgatggttctgaaggtggagaggaacgcacggttgctctaagggaaatgttgatggtacttgtgctagtatttatgggtaacttagtgggaacagggagtaaagagacagtgggtggagggggaggaagaggaggaggtgtgcacaaaggtaacagagatgctgttggtgctggattgttttccatcagagaggaaggttcatgttcaactggagtttgtgaacaagacatctcacctgatgctgattctgttatctctgataaaaattttactgcagagtcagacatcactcgccgaggctgaaccggcgaagatgattgttgtggcatgattgtacttgaagacagttccattggtgaagcactggtctttgaaaccttaaccttagaaggtgataacaatgctgtgcgccgcattcgcgaaggagactgcactgtagtttgtgatttggattgaacattagctgaacttgaatcttggggaatatgtctcggtttagtgctgacaagcatatccaattcatttccgaccttcagaacaacactagaagaataaatttcaccagaagaactttcagattcaagttcttcacgagtatcaaagaaagtctcaggttcatcggtaatcgctgagatctttagctgggttgtgtgaggtacggtgtcttttttcccatccaaccagtccaaatggttaaagatatctagcaccttagcaaactcttcaaccccaagtccttgtttctcttgatgaataacaggctctgttgtgacatgtgaagtaactatgtccatatcggaaaagataacctaccatcaacaaaagttgcatgtaaaaatccatgcactacagtaatagtctagttcgccacttggcataaacacttacctcaaaccgaaaatctttagggaattggtcttttgcattccataacatgtctatgtgatcacggttaagcatcaagatgtttgaccggatgaatgctgtattgaacatgattcggaaaaccatctcttcacgatccagatcctcatacagatggatacactctaggacaatatcaccttggacatgacattgaaggtctattttcaccagttcatctgcctaag

SEQ ID NO: 32535 - DNA, 3287 bp, Zea Mays
atgggaaagtgcctagacaaggcacttaggtgccaagtgagctggactcaaggattattatattttcccattaccgagaaagtgtcaatgaaatatattgctcactacaggatattgatgataaacttgtcagacctgttgaattcattggtcaaagctcagcaggtaaccaactgaaggggcaaagccaaaaaactcaacaagctattttgaagaaattccgatctggggtatataatgttttggtggcaacatcaattggcgaggaaggacttgatattattgaggttgatctcgtgatctgtttcgatgccaatgtctcaccattaaggatgattcaacggatgggaagaaccgggagaaagaatgaaggtcaggaattgcaggggtacagaaagaaacaaggagattgtcgaaccatgaggaagctattgcataacagtgagagatttgaataccatgctagtcctaggatggttccacatgtctataaaccagaagttaagtatgttaagttgacaatagacaagtatattcctcacgcaaagaaaatgagggttgccgcaaaagaagcctcgccaattccatggaagatgtcggaggcagacggtcaaatgattactaggtactttagtgtgtgcaaagaagaagtttggaggccgtcccttgtggcatttcctagatttcagctttatccaagtgtcgttcacaaagttccacattcatttcggacaacagatatgctaactgatgctatgaagcaacttcaagacccatctcttttcaggacaaagtgtgaaatccctttgcaagaacctgctaatgtttctgctgtggaggagggtctggaacatgaaggtctctatgctgctaatggaaatgaggaaatgcctcaggaatgtgacggtttagaagcttcatcgagtgtagtgtggaatgaaaatgtttctgtgccaggttctccagttaagaagtatccggttcacactttcttcagtggtgattatgtaactgtggatagaagaggcagcgttttgattacttatgtacctgtcctgcctcaaaaaattgcattcagtaaggacataaaaagtgcagtttggaataacaaagatcagaacaaagccaaaccttacagatcagcagcaggcgtctgtaggacaacagttgaatttgtccttggtaccaatacagacaaacatttgtttgtggataatttatcaactgtagccatgcattcccctgagtgctcttggcatggtgacaatgttgatgacaatcatgtgcttactactgtaccatccaaaacactgacaagcccaagggagaaaatggacacaccctgcaatgttaaactgccagagtccacctattcatatcaggaagacatggagcttaattcaaggctaacagtatatatggaagaaggaattgttcctgagtctccagtggttgaagttagccacctacgtctagagatggatgaagctgcagactttggagctgtgccaaagcgtggttctccaaagtcacgtgatgagagggctcatgccaatgtagctggaagtcacaaaggacctttgaactttgagaaaaacgatcaattgctttgtggggaaaacgagtttgatggatcatcaaggttgtatatgctagatcagactcgagccaaaacagaagagccaatgcatccttcaaatgtgaagatggctactactacaagacatactcctgggaatatgctgtgtgatagtttctcaggtgattatcagcttaggtcagggggggatgcatcgggatcagtccagcaagcacctaagtacagaagactatgcaaatatggtgacaagatcaaaagagtctcttccatatctttggatggctgtgatgataggtttgaagaatgcaatattgctaataaagataggccaaaccaaataaaacatgctatggggacaaaaaggaagaccaagaggcgtctagatgcctatattgacgaggaagtcggggtgtctgaagatgcatatgtttcagaggatgaggatgataatcagagtgaagataaatacgaagatagcttcattgatgatcaggcaactccaactgaatttacacaaactgaacaaggtgatcgacacaatggtgacatgatgggtttctacaggcaatcgttgtttactcagtccccagtagttctaccctcaaggtaccttgatgtttcttacaattctgcttctcggaccggaaattcaagctattcttcagaggctaggcacaattacactgagactcccaaagagattcaaacacaacatcataccataaacccaagcccatcgtacagttttgtacaggatcgatgtgaaagagggatcgccaattgtgaatcatcgactaagctggattgcagaaagagaaggctaagcttccagcaacctctggcgatccctgttataaaccttgaaccagaaccagcaccagaaccatctccacacgtcgccagcagagtcgctgatcacctatattttgatgatggtttctttgagaaccttgatcttgatgcaattgaagctcaagcaaccgaacagtggagacagaagaccacacaatcgacgcagaaaccagtggaaattaagaatgcatcagacatgagttttgcacctccgtcattcgatttaggtctctgatagtggtggtaaagttagcatccattcatgatgtcatctagctgcagtacctagccatctcagagcatgctgagaactgcacaagcaatgaggttttctgcagaaggcccgaacctgcatcacatgacaatgccgcaggatctggcatgtctgccgctgtgatatttatcggcgccctggagctggaagatgcgctggcggcagattttgtagagtatttatctcagtacaggctcaatacaccatgtatattctcctgtaaatactgttcgatgtataagggtcttattgtatgcagacatttcagagacttgatgtgttaaacccagtggcaaaggtgacgtcagtgtcggtttttgttgcgcaggattatcctcgctctcgatgctgaaccgactggttttgcatagacgaggcatccgtgcagcatgatggcaacgtggagtttggtcaataggacgagtggttggtacatgatgcctggttgctttccgaaaacaggcaatgttttgtgcagtcttgtcgatttctgtacatctcaattaacgtacgcgttttcgtacattggcgcgacaatgtgagcacagagattctgaggac

SEQ ID NO: 32536 - DNA, 5060 bp, Zea Mays
tcccggggcgaaagattagtttcatttccctccgaaacagagatccgcatttgatttttctctcgccctctcctgacctagtgacttctcgagatttcccattccggtgccgcgcgcgcagctcgagcaagaacaatccccaatctccaatcccaaatcctaacgattccacacccgtctcccctctgcatcccgctgtttcactgcccgctatggcctcacctgccacggacaacgacatcggcgacgagcacctgttcgacggcgtccgcttcatgctggtcggattcaacacctatgacgcgtcccagtaccggtcggagatggtgcggcgcggcggcaccgacgccgggccgtcgggcaacgggtgcacacacgtggtcgtgtggaaccgcatctacgatgacccgacgtgcgtggccgagcgggcgcaagggaagaaggtcgtcagcgggctgtgggtggaggacagcttggatcgcggggtgcttgctgatgccgatagggttttgtattggccgatgagacatttgaagggaataccgggtgctcaatcgttgcttatatgcttgacgggttaccaaaaacgctatcgcgaagacatgatgaaaatggtttctttgatgggagcacggttctcaaaacctttgatagcaaatgcagtcactcaccttgtttgttataaattcgaaggtgagaagtatgaggttgcaaaaaaggtgaacatcaaacttgttaatcaccagtggttggaagactgcttaaaggcatggaaaattctcccagtcagtgattatagcaaaagtagttgggagctagaattaatggatacacatgccattgactctgaacatgaagcagaagcatcagaaccaaggtcattgaacaataggcccagtgtcagtggtaacagagaggtggtggtaggaaggaattcgaacactcctgttcatatcgtaaatacagaagatgacaacagcaagacacatggcattagaggccgaatcagtgctaactctacggttgcagtttctgctaatgttgatgtgtttggacccattcaaagtccttctgttcatatcatgaatatagaagatgcagacatcaatacccatgatattacaggccaagacaatcctgactctagtttgttgccaatttctgccaaggttgatatactcgctcccattcaatcttctggtgaaaagagagacactgtaagaaccacaaatagcccaaatctgcaggaagttaaagaaaaatatgttggtgcaaggacacaggaccttgcaagtggtgttctaggtcctcaaagcacaagcaaaatgcctgtttttagaaatcatgtagataccttaaatgggaccctggacgttctaaaaggccatacagatcatgtttctcgaaaatattctgccagccatgatcagactgatgttgctgaagtcttattgaccagtcctttgagaggaaatcagtctgtggacgagctcgattcatcaaaagttgacagatggcaacatcaggagaaggatagaccctcaggtagtcatatcacagcagctggttacttaaatgccgatgccaagctcaacaatcatgagttcaatccgaagcctcgtagtgattccatgtctaactacatcaagaacacaaataactataaaaagacctctcggaattcatttttacaggaagggtattcagttaaccatatggtatcacctcagagggctgaagaaagcacactgagaggttactccaatctttctacattagaaacaagacagcaaaaggttattcaacctgctgatgttcagagcattgcaggcaatgaaaatcctaagcgtgaggatggactagatggtgcatgtgctcagaaaaggaagagcttggtctccccagctagcataaatttgcaaacggaagatttggcgtcagaaactggtcctttagattctccatttgtgagtagagtgagtgatgcatctgaaaggataataaatctagttgaagctaatgctgttaatttgggaaaggaacgctctagcttttctacaagcagacaagcaagatctaggaagacttctctcaagcatggtggtcccatcaatggaatcaaactttctgaatattcttcaagtgataagaatgtaaaatctttacagaaaggaaggatgtcattcaaagcaatgacagaaagtaaatgtgccatgagttcttcagccactgttcaagatggaaaaacaagtgcaggtttcccgtttcaggataaggatggggaaagtacacacagtagtggtaatgcagcaaatcaagattgcttgaatgagataggaaatgccttcacaaaggatccggcacatgacaaatctgtgcacagttcaaataattcacaagttgtgccctcttatagaaatgccagcagtaggatagaagatccagtcaaagttaatggtaatgaaatggcagtggcatcaaattctgaacttgagaaggtggtgtctgatgccactgtgaaagaaagcacaaaacaatttcaagacacttcaaggaatgtccaggctgaaacgagttattcaaagaaagcaccaactactataagaaggaatgcaggtgtcaagaggcaccggagcgctgatatcgaggctgaagggtcagttatcaacagtgctaagaaagttgttcctgaatcctggcctgccaaagggtcagttatcaacagtgctaagaaagttgttcctgaatcctggcctgccaaagtgattcatggtgagcatgctgacccagcctctaaaaatggctacagcacatcatgtgcagctgaactcaaaacaaatcgtccaaagaaagcattgatctgtagagtgacaaatactgttgcaaagaggacacggggtgcttgcgccaagaaagatgatgcacgggtaagttctagtttggagttcagtaaagtgacgtctcaagaaaattttgagataatctctcccaaaaaacttgacactgcaaatgctgatgaacaacgaagaaattcacctaagaaaatacagaacaccagagtaaggaatagagccacgaagaggtcatggaaatctgacaccaacatgagcaatgatacagtaatggacaaagctgagacagtggctgctggtgcattgtctgatgacttgcttcccacagacaatgttgaagactggcctaaaaagctttccagtcatggaagtgttagtgactgtgaaacactttctccaaaaaccatatcaaaggccagaattaggaatgcagcttccaacaggaaaataagaactgtagaccacaagtccggcgacaagtttggcaaaattggtagtgccgttaagtctgaaacaaaagctttttcatcaaacagaaccgaagggatttcatgcaatatcagcaaagtaattgctgatccagactccgagaagtccaacaaggatgtggtaagagaggtgtcggggctgttttgccaagattcttgcacgatagacaagcaaggatcatacaattctaagttgagaagcagcacaaggaacaaagctccgactccagatcatgaaaaggagaacagactaggctctagtgatctcaactctaaaccaaacagaactggcagtctgcgttccaaatctgatgcaaaatcgatcaagaaaaacacgcgtgtgctcagtaagcaccaaaggggaaatagaagtgaaccttgcaccttgatcacgagcaaacctgcattgtttatcttaagtggaaatagtgagcagagaaggggttatcgctcgatacttagacggctgaaggggcgagtttgtagggattcacatcactggtcataccaagcaacgcatttcatcgctccagaccctctgaggagaaccgagaagttctttgcagcggctgcagctggcaggtggatactgaagagagagtacttgaccgcgtgcattgaggccggcaagttcgtggacgaagaaccgtttgaatggttcggcacaggcttcaacgatggacgaacaatcagtttcgacgctcccaggaaatggcgaaacataaggcagcagatgggccatggcgccttctacggaatgcagatcgttgcctacggacagttcatattaccaactctggacacagtaaagcgtgcagtaaaggccggcgatggcgccgttttagcaacatcgccgccatacacccggttcctagactctggagtcgacttcgccgtggtatcagagagcatatcacgaacagacgcgtgggtccaggaattcatcagccacggcattccctgtgtcagcgccgattacctggtcgagtacgtgtgcaagccgggccagcccctggaccggcacgttctcttcgagacgaactgcgtggccagcaagtccctggagaaactcacgaagaagcaggtagagatggcaacggcggagaagtcggaaccgtcggaagacgacgatccggaggacctgagctgctcggcgtgcggccgcagggaccggggagacgtgatgctgatctgcggcgacgaggccggcgaggccggctgcgggatcggcatgcacatcgactgctgcgaccctcccctggacgccgtccccgacgacgactggatgtgccccaggtgcgccgtgccggagcccgagaccgagacgaagcatgctagaggcaccgaacgcaggggcagagggtccaggcgaaggtgatctttctgtacgctgtgtggtggtctttccatggtgtgtggattacacgcgcttacttaattgaacaaaaataaatgtactacacgaatagttggaggcattgtatgtttttagaaagaaaaaccttgtagaatgccgcacgcttctgctgtccgttctcgctacctccagcagcttactcccaatatgtacacgatctgttggccctaagatacggctttttttaaagacaacatatctggtgcacatggaacattggtgcacatggtgcacatattaaatcaacaccactcattttagatctaacgtttctagttgtttggtacattttactaaggacac

SEQ ID NO: 32537 - DNA, 2067 bp, Zea Mays
ctgtcatacgttcaaacttcaggtttgtcgaggctgcaaatagatacaagaatgtgagtataaaattcataaatatcccatgtggcatgttttgtcaacccaaaagaatttgatacggttcatttgtgcaagttgtattcgagctgtatcccttacactgacgctaatttggttagaaggcctgaatcgcctagtattttgattcgcaacttccttttaagcatatttatcacaaatttatttattatctatatttctattatcaaatcagaaggcctactaaacctgttacttttgtccttcctcccaaaaaagaactataaccatccaaagcacaagatccatgtaatccatacggtagagcttatctcctcacaaaatcaaaacaaggtctatagctctacgcttgtaatagtcctaaagaagtacacacaacttcatcagaaacaaaataagttttcgtacagattgctacttcaaaaattgaatctaccacaaattcagtgaagggaaaaccagactaaacaattatccatgccatattcaaattcagtgaagggtttcataaattattcagcacaattgatacttcaaaaattgaatctaccacaaaactggttagtgcgagacgtacagaacaacaaaacaatgatcataccaaacacatagagaggctaaacataattcagtgaagttgttttatgttgtagcacaagttaccattcttagaggtcttcaactctatatctttgtatttttcacatagtaatgttcatgacaaacttcttcggtgtgagatcacatctacatccttctgtacaagtttatgagcctattactaacactccagctttagggaaagtgcataaactcttttgaaagaatagcgcaaaaccttcacctagacatcatggtctgaattcctaaatgtgaggaccaatgaggaacaatttgacaaaaaaatatcagcccaactcctacaacatcagatggatctagttattttattttaaaaataacataaatgttgcttagaaatactaacagaacgacacgaattggacagacctgaatcagggggcataaacaaatttccaaggaatttcctcaatgatggcaacagttttattttaaaaataacagaaatgttgcttagaaatactaacaggacgacacgaattggacagacctaaatcaaggggcataaacaaatttccaaagaatttcctcaatgatggcaacagaatgcaccagttggtaaagtctgataacgacatagacttctctgagaccccttcaacatccaaagaatagactgatgttaattatttagagaccaaaaatataaatgtttccttttttccttgtatctgcttgccttgtgggaacaaatatgaaagttagttgtttgacatgctttagatgctagccgagtagccatacttcttttactccatcatattcttcccgatgcttttatatgctaggtttcgattgaatacaatattagtaatagtcattgttgtaaggtctaagcttatgggttcccatgttacatctattcaggtgatgtgtgtagaacaaaaatactaacttggtctgcatttttatcagatgttaacacaataatggcccgtgctttcgaaacagaaacctggaaaagggtcaattatttgagatcttaatatggaatgagatgaaatcaaagaccactgtgtattacatggaacaaggataacaataatttatgaatattataccttcctcaagtctgctagaattagaggagcgtcactcctacatattacagatgttcccatgaagccaacttctagctttgctatgtccatctccatctcttacttgttcgtttcagctagaacaacagctacaccaccactgatactcttgtttgctagctgcttcagaagagagccctgtgaatctccatgtggtgatggtgttggtcgacccactgcggcgtcgatgggtcaccacagaagaacatcgtcgcctccctcatctgcctacaccacacgccgacgcccccaccgaccacggagataa

SEQ ID NO: 32538 - DNA, 2913 bp, Zea Mays
cccaccgccccattccatccatgacggtcgcccctaacccacggtgtcgactgctccaccgtaagcgcctgtttcaccgccaccgccgacttcggttggtcctcacccgcgcgtggatggcgcacgcgcctctctcctccaagtgcgccgtcgacaccaagctcccctgcctcaccgcgcgatctccagccccgccgcgctcgcaagtcttgagatcgagcagatccaccatcctgcgccctcgccccatcacgcactcaccttggccccgcatccctgcgccgccataccctcggcctcgccctcgcctcatcctcccctgcccccgcaccgcatccaacgcgtagatccagcgtcgtcgccgcgatacctgcccatgccaccgcgtgcgcaccccccgtgccgtcggcaaaccctagcgtgatccccaccctgcccccgtcctcctcacatcatcggctcccccgtcatccatatcccagtggacatctctggcgacgagaggatgacgtcgtccggggtggtggccgcccggacaacccgttgctcgccaggccgagtctcctgagacccttgagcttgctcagtgacggagggatgcttccatggaaggaattgaaatacagatcaagaaactctaggctctagcactactccagctcttctggcatctgaccggagaatttgttctcggatagcgctagctgagcaaggctggtgaggctggagacgtcaggttggctacagtgtcggggatgaacccactcagcgcgttactactcagatcaagctccactagctgggcgaggtcgccgatggaggatgggattggccccgtcaaccggttcccctgcaacgccaacttcgtgaggttcttcatgttcccaatccctgttgggatggtgccgttgaggaggttggattcgaggcccaacgtcgtgagcccgatgaggtcgtcgctggccggtggaatagacccggagatgctgttttcccctatgttcagtgcttgaatctccctcgggaggcgggcaatggagcctggcaactagccaccgagcttgttgttgtcaagggcgaggacctgcaggctgccgcagttggtaagatggtccaggaactcccagccttactcgtcgctcgccgtcagctggttgcccgacatgtacaacgactgtgggcagagcatgccgatgactcactgctcctttttttgaagaacagagatggcgagcaatctgccattgcagctgtaggttcgctaaaaagtatggatccaaatcggatcattctgaagaaaattgttctgaccatgtatccacagagtctcgaatctgaaatcgatcgtgttgtatatgttccacgatcccaacgacgtaaaatggttcaagcctattgagcggtggacaaaacatggtcgtcgtggccgcatcatggagaccgttggtactcatggtgccatgaaatgtttattcaacagcagcatgatactgtgtgcatgagcttgtacaaacacgtgtacctaaaatggccttaacaactctaccacgtataaggttgcctgacgtttcgctagatctgtaccagcaggctatccaaacgacgagaatgaaataaccttggagctagcgtggtgtgtagcctatctaaatatttttaggattagaaaattgttttgtattggtccatcttatacttttctttaacattacaccctcattcttcttggtcttagacgactcttttcagtatcaaatccaaattcatgtttaattgcgtgttgagataatgccaacttattccatgttggcatatgtactacccagtacccacaatcatcggagggtcttataagaaacattagggggtaactctacctacatctatcttatacttgaacatcacacccccattctccttggatcaaatttaaaccaacaacaaattcacttgtatgtggaggcatctattttactacttacaggtatgcatcttgactagctcgctgagggggatggcctggtggatctgttgttggtttgcttgtatcctcggcgtctggtggagctgcgccgcctccacgccactgtcaagcgcttcctcggcgtctgcttcggccactagctgccaatcccatacccgtccagatataagcaagctataatgtgcttttgaaatacaagcgaatattgctatagcatgctgcttgagcttagcattcctctttctttcttttgcagcataagaaacactcttacgaagctcttaccaaatctaacggttacaagattcagttcatacttgggttttgctcattgtattgtcttcaagcagggtatgaggaatagtatagatggaacaatttcttctctgttagtggcacattgtcaatggtgtgtctgacaacattctcaaccacatcatcctagagaacaatgagaacaagcctgtcacaaacagtcgtgacactcaggagatatgccttgaacaaggccttcatatcctcaagatattcgaggattatcatgtcagcaaaacatccatcctgaacgaccttgcctcagcaatgggaaacactccaaacccatacgagcaagccatgtccacttgtgtgaatgaccaagcgatgatgctatcgcatatggtgtggcatgagtctacaatttcactgtagttatgaaaactgatcagtcaatgatgatgaatcatacgaaccttttttacttcagcacgttctttaataggggacgaatttgcatgaggtgttatgaactgcaggtggaggtgagcagtgggagcgtttgcgtattaaagtgcattgcactacaatacttgtttgtggatgttgagtgtttactttagcttaatcaatcttatagttttttaattaattaatgttatctttgttgtcca

SEQ ID NO: 32539 - DNA, 1973 bp, Zea Mays
tgtaattattggctatactagtactactgtactagtagtacttcatcagtattcacctctcgtcatctcgtttcttgtttgttcccccatctcgttgttgatcccctctgccgctcagcggctatatatacgtccaatctaatccccatcccattccgtctccgtcgcctgatcaaaccagaggtaggagaaataaaaggagcaagttttctggctcttcttcttgtcccgtagtccgtactattcttagcgctgttcttcaccaagatcgcctcgccggcacggcggcacccatgttgggcttctgcgccccctcggcctgttcacctcccgacgaggctacgccagagccgttccgttcgctgcagatcgccaccacggtcgccgccgccgccgccactacaaagaagaagcgccggcccgccggcacaccagacccagacgcggaggtggtgtcgctgtcgccgcggacgctgctggagtcggaccggtacgtgtgcgagatctgcgggcaggggttccagcgcgaccagaacctgcagatgcatcggcggcggcacaaggtgccgtggaagctgttgaagcgggaggccggggaggcggcgcggaagcgggtcttcgtgtgcccggagcccagctgcctgcaccaccacccctcccacgcgctgggcgacctcgtcggcatcaagaagcacttccgccgcaagcacagcggccagcgccagtgggcctgcgcccgctgctccaaggcctacgccgtccactccgactacaaggcccacctcaagacctgcggcacccgcggccactcctgcgactgcggccgcgtcttctcacgtgtggagagcttcatagagcaccaggatagctgcaacgccgggcaggcacgggcgggcgccggtgtggctgctgctagtgccgggtcgcagcagcaggcgccgccggccatgtcactgtcgaggaccgcgtcgagcaccagcccgtccagcgacattgccatcagcccggtggccgcctggcccgccggtccggcaccggcgattccaagccctgcatcgaccgccgcgttccactggttcgaacaagtcccgtcgccgcggacaccaccgccatcggtccaccaccgcggcgggcacaacctcgagctgcagctcatgccgccgtcctgcagcggcgcgggcggtgacgcgccaccacgtactccggcggctccgtcacagagccacgccgccgccatggccatgcagctgcagctgtccatcggcgtctgcggggacgcgggcgacgaggtgctggccgcagcgagggaggaggaggcgcgggagcagctgcggcaagctgtggcggagaaggcggcggcggacgaagcccgcgcgcaggcgaagcggcaagcggagctggccgagcgggagctggcgagcgccaagcggatgcggcggcaggcgcaggtggagctgagccgcgcccacgcggtccgggaccacgccttgcgccaggtgaacgcgacgcttctccagatcacctgcctcggctgccgccacaagttccacgcgcgcccgcagctggacgccgttccggcgaggtggcctgcagctgctgctacatgtcctccatcgtgagagaggacgtcctctagcttcttattcgctagctaaatcaatacttgctttttttgccaacgggacgccggccgcggggcttgcatgaattggcgcgtgcgttatgaggtgtgatagaatcagatgctgatgcctgatggtccagtgtgtggacagtggaagatcgctagctggatcgatccagtagtgctgcctagtgtttgagctagccctgtgactgtgaggaggagcaggataggagaggcagtagccgttaggcaaatcgaagacgacgggatagctgctagagctttacttactgtgacgtgcatggaatctttcggtgtttgcttcccattggatcttgttggaaaa

SEQ ID NO: 32540 - DNA, 1593 bp, Zea Mays
gccaatcgaaccgcaacgtcatccgctgcccaccggccaccgccatcatcaccactttcgggtttggtatttcccgcacgcacgcaacgcacgtacgcgggccacgagtgggagtggtggtggtggaggtggaggtggacacccgaagccaagcaaagcaagcggggaagaaacaacaagggacacttcacaaaagctgggctgagatcgatccatcgatcgatccccttccacaccagcctcctaccgcgtcgcttagtgctcactactgctcaccactactccgtcccgcgtcgcgccccgcgccccgcgccggcgaatgctccggctctcctcgccgcaggttctccagcgtgtagaagcaggcaagatgccaagagaacagttgatcctgctaaagtttataccaacgataaagtaggagctagtaactggagctcatccagaaataaatcaaatgtgtctccattgaatgtggcgttagaaaaggagatgtccaaggaattggaatcaaagaagaagtcaccaagtgtggttgccagattgatgggacttgaagaagatctacctggtcaagagccagcattaccttccactaaaagaaatttgaagaaaagacacctaaatggcaacttggtcaaaacaaacaatctccatcgacatcaagagcagtaccattccagtatgacaacatgcgacaaacacataggacccaaagaaacagttgaatttaaggatgtttatgaagtcagtgaagaaccattgagaacataccattttcaggaccaaacttttcctagggaaatgtcttccaggagcaagagagacataaggatggaaattgttcgtcagaagttcatggaagcaaagcgtcttgctacagatgagaaactcctgcattcaaaggagtttcaagaagctcttgaggttctaagttctaacagagatttgttccttaagtttcttgaggaaccaaactctactttctcaaagcagctagctggacttcacagaagcccatcaccacctcagacaaagcgtattactgtgttgaaaccaactaaatttgttgagagcgattgcagaagggaaatcagaacacacagaataaatgaaggaaatgaacacgtgatgcggaggacacactggagatctcattcagcagaagataccttatcccagccaactaggatagtggtcctgaagcctagtcctggcaagcctagcagaacaatggctaggctaacaaccgaagcagccccagctcagttcgctgagcagataggtttttatggaggtttagaaggtcacaattacccatcagatgctctacatcggcgggatgagtctttattatcttctgtatactcaaatggctatggtggagatgaaagttctttcggcagatcagaagttgactacattgatgaagaagatagtaacctaagtgactcggagatcgttagcccagtaccgccgctgcattcatgggatcacttcaaaagatacagcagtcctcactcaggttcaacttttagcagaacatctcggtcgcccgagtcatctgtgatcacggaaagctaaaaaacggct

SEQ ID NO: 32541 - DNA, 4435 bp, Zea Mays
ctgcaggcagacaagctaggttttactgcttcattgagcacaaagatccgctgacctcttgctcttggcattctcttttttgccgtaccatggatgcaccggatgttcaacagagcatgggatataaggagtccaggggtggtatgcctaagtttttccatgcccttggaccagcactcctgatttcaatgggttacattgatctcgggaagtgggtggcagccgttgaagctggttcttgttttggattcgacctggtgttgctggctctccttttcaatttcactgccattgtatgtcagtaccttgctgcttgcattggcactgtcacagggaagaatcttgcagagatatgccaccaagagtacaaccagccaacatgtatattccttggtgttcaagctggattgtctttgttgacgtcagagctgactatgatttttggcatagcactcggattcaacctcctgtttgaatatgatgatctcatcacagggatatgctttgcaacagtggtacctaatctgctaccatatgctatatcccacctgggaaagaagatggaagggacaataaatgcctgcatagcaggatttgcacttcttagttatgtgcttggcttattggttagccagccacaaattcctctcacgatgaatgtaatattccccaagatcagtggtgagagtgcttactctctgatggcgcttcttggtgcaaacataatggcacacaacttctacattcattcatcagttgtccagggtcagaaaaagtcatctgcagttggtcttggagccttatttcacgaccaccttttttcaatattgttcatttttactggaatctttatggtgaactatgttctaatgaactctgcagcagcggaatctactaatactcttctcattaccttccaagatgttgtagagctaatgaatcagatatttgtaaaccctctggcaccaactatatttttagtggttcttctcttctccagccacatcatctcgctgacatctgctatcggtagccaagtgatttcacaccatttattcggtataaaccttcctctttctggacatcgtctcctactgaaggtttttgccatagttcctactctgtactgggcgaaagttgcaggagctgaagggatataccaattattaattatatgccagattattcaagccatgcttcttccatcttcagtcgtcccactttttcgtgttgcttcatcaagatcaataatgggagcccatagagtgtctttgcatctggagatactggtttttcttgcatttctccttatgctattttcaaatatcatatttgtggcagaaatgctatttggcgacagtgggtggatgaacaatctgaaaggatatactggaagccctgtggtgctcccatataccgttttagttttagttgcacttatatctgtggctttttcactgtacctggctgttacaccattgagatctggaagtcatgaagctgaatcccatgaatggtctgtgcattctcagagagaactcttgaatacttctcaagaaagggaagatgttaaggtggacaatgttacatatgaggaagatcaaagatcagatgttgtcccttctcccagggatgtgcctgacagccatccggaactggccttggactatattgatacttctgacactgctgtagaatctgatcacgactctcaacaatctactgcttatgcatccactgctcctgaaacctgctcctccccgtcgtttactcgcgaggagtcaaaatcagttgttgcagtcaactggccggagcctttggagaaggttcctacttctactgtgatggaggaaagcacagtagaaaatgtggtctctaggatcacgactgaaagagatgttttagtagaaacagatgttgtctcgggcaaggataaggaagatatccgtactttggagtctgagaagtcaattgttgatagcaccccatatgtgtctgatgacggtccgccatcccttactttcagcaggggaaagggctcagatgcaggaaatggcagtggtagtctctcaaggttatctggtttgggccgtgcagcaaggagacagctagctgctactcttgatgagttctgggggcatctgtttgattaccatggtaagctcactcaagaagctagcaccaaaaagtttggtatcttgcttgggatagaccttagaacacctagcacatctgtaagaacggataaacaagctgctgaaatacttaagagcccactggtgagagactcaatgcggggggcagcttttttgtcaagctcagtggacatgatgtcccctaagaatgaaacgtcgaatttggaacttgcatatgggcttcagaggggacctggcatgggattgtcaagctggtctcagggtatgcagctaccaaatacacagctgcagagctcaagcaatagcctacttgagcagagtgcaagattaaactcaaattttagttcatcttattcagacaacaatcagttctaccaacctgcaacaattcatggataccagctcacatcttacctgaaacagatgaatgccagcccaagcctttactctagcatgccgctggacccacaacggcttccaaaatcatctgtgtctgctgtgccaaactatgctgattccatgatgcatgctcgtaatcataacctgcttgcttcactgggtggtactactacacagcttcctgcaacatcccgcgtaggctcaatgatgcctgaaagatcgtattatgatccttccagcgttgatgggaatgaaaacgctggttcacctgcttactcaaaaaagtaccacagctcacctgatatgtctggaataatcgctgcaagtagagctgcactcttgaatgaagcaaagttgggtgctgccattggaccacagtcatacctcagcaggctggcggcagaaagatctcaatatgcaagctcaacagccaggcccgcggctccattagcatttgacgagctttcacctcctaagctccagagtgatatcttctcggcgcagtcaagcatgagaccaagtgctagatccctttgggctaagcaaccatttgagcaattgttcggcatgtcaagtgcagagctcagtaaaggtgacttcaatcttccaggcagatcaggtggcgtggccaaggatgatttctcttataaggaatctgagacgaagcttcttcagtccctcaggctctgcatcatgaagctccttaagctagagggatcagggtggctgttcaagcaaaatggtggttgtgatgaagatctaatcgaccgagtcgctgcagccgagaagctattgatgcaagggactgccgagaatcaactgctgcttcatggtggtgatctccagcaacattcttccgaccaggccggcatccagtacatgcgcacgcttcccaactgcggggaggactgtgtttggcgcgcgtcactcgtcgttagtttcggtgtctggtgtgtccgccgagtgctggacatgtctctggtggaaagcaggccagaactttggggcaagtatacctatgtccttaaccgtcttcaggggatcttggaccctgcgttctccaagcctcggggtgctctgacaatatgcacctgccttcagaaagacaccagagtgcgcaatagcccaccccacagtgggctaacagccatgggcccggtccccacaccgatccggggcgccttcacgaccgcaggcgtggttctggagatgatcaaggacgtggaggctgcggtctcaggccgcaagggcaggagcggcacggcggcgggcgacgtcgccttccccaaggggaaggagaacctggcctccgtgctgaagcggtacaagcggcggctcgccagcaagggccagtagcgcgcgggtgtcagacaggcaggcgatcgcaagcaatgttaggaggagcctgactattgttctccaggggggctgccactggcgccggcctccctgagccctggattttttcgttgcacgacgttcctagggaccggtggttgcccgatggtcgtcttggtcccttccagcaggttttttttttccttccctctttctgttggtttctttttgttggctttgtgatgttttgtaaggggcaactagggtatgtgctcagaaggactcaagatgtacacgcgaagatgtactagtctgctgatgcagcgttgtaaagtccacactctgcaggttaaccctttttggggccgtcaagtgttagtgcgtgccctatgtatgttaatcacccctgcagagaggttgcgaatactgaactactcacagacctgcacctgtcgagatcgtttgtaatatccgacgtcttgttcagaattgttctcactcttttttgcccgttgtgtaatttaccctgaagggacttcaag

SEQ ID NO: 32542 - DNA, 4212 bp, Zea Mays
aaagcggtcagtgggtggaggcagccaagagtcaccctgtcgccgttgccgtcgccgaggcaggcagagtctccctgtcgccgttgccgtcgccggcctcctcctcctctgccacttcctcccaactcccagccgcaggggccgacggcgacgggagggaagaggcggcagaggtactccgaggggcgcggagagaggctgtgccaggccacgccgtccagtgcctccgggtccgtcgccgcagcttccggccgcgtcggagaggtagcccccggagctcttcgcggaggctcgggaatgcactgggttagcgacagtgatggcagtgataacttcgaatgggacagtgatggtaacggggagcagacagtgagcttcaacgctgctggtgctggttcatcagctctggcagcgacgaacactgatgctcctggcccatcgacacgggttgctaatggcaatgggaaggctgggcgatctgcctctttggttcagaagtatgtggacatgggtttctcagaagagattgttctgaaggccatgaaggacaatggggataatggagcagattcattagttgagctccttcttacttaccaggaactaggcaatgacctcaaagtggataatgactttgcttctagttgtgcccccaaaactgctgacgatagtgatgatgatgacacactggaaatctgggatgatgaggatgctggagggagaagcaccagggttgctaactctgttgatgattctgatgacgaggatttcttacatgagatgtcacggaaggacgaaaaagttgattccttagttaaaatggggtttcctgaagacgaggctgcactggctattaccagatgcgggccggatgcatctatttctgttctggtggattcaatctatgcttcacagaccgcaggagatggttactgtggcaatctgtctgactatgaggataattcctatggagggagaagcacagggaacaagaaaaagagaaaaagatatggaggccaagcacagggaagtagaggcccattagatggtagctgtgatgaacccatgcctctcccacatccaatggttggatttaacttgccagaccagtggtcaagacgagtggacagatcgttgcctgcacaagctattggtccgccgtacttctactacgagaacgttgctcttgctccaaaaggtgtctggactaccatatcaagattcttgtatgatattcaaccagagtttgtggactcaaagtacttctgtgctgctgccaggaaaaggggttacatacacaacctgccacttgagaacaggtcacctctcctccccatacccccaaagacgatatcggaagcatttcctcggaccaagaggtggtggccttcatgggacccaagacgacagttcaattgcctccagacttgcgtgtctagtgcaaaattgttagagaggattcgcgtagccctcacaaacagttcagacccacctcctccaagagttcagaagtatgtgttggaggagtgtaggaaatggaacctggcatgggttggcttaaacaaggttgctcctctagagcctgacgagatggagtttctactcggctttccgaaggatcacacgagaggtatcagcaggacagagaggtatcgatctctaggaaattcatttcaggtcgatactgttgcttaccatctctcagttctgaaggatctgttcccacaaggcatgaatgtgctgtctttattctctggtattggaggagcagaggtggctctccacaggcttggcatacagatgaacacggttatttcagtggagaagtccgaggtcaaccggacgattctgaagagttggtgggatcagacgcagacgggtactctgattgagatcactgatgtgcagacactgtcatctgagaggatcgaggcgtatattagaagaattgggggcttcgatcttgtgattggtggaagtccctgtaacaacctcactgggagcaaccgtcaccacagagatggtttggagggcgagcattctgcattgttccatcattattttaggatcttacacgccgtcaagtccatcatggagcgtttgtagttcttagaatctttactgttgttttggttctagtagaatactttgtgaccgaacttgtaaatggtttgcaggttgactggtttagttctcttgccactctaatttaggctagttttttttttatttaatcttctttggtgatcttggtgcagttctgtggcactgttgggtattcaaatgcagattgatccgagaggctgccctgttgcattttctttttaaaatttgtatttgtcaatgagagatcaggtattctggttgccaaaaaaaaatctgaagttgtggagctgagaaaaggacggtgctaagctacaaccacccactgccacaccatgcgcacccccaacccaaaagatcctgcttttgctcacgcttatcaccactcccatctccatccaaaaccataaaaaaaaccagtgcgagctgaagcatccaggctctggaatcatcgtcgggatgtctgtgccagcatcagcccaggtgcctcacaccatacgatctgctgggagctgctgcttcaggtcgtcgcatcaactatctgcgcagaatctgggccgacgtgagttcccgatctcagctttgagtggccttctttttgaaagtgagcacaggttcttccaaagcccgttgtgttcgtgtagatcgcaggtggcgggggaccggaaagaagaagatcctttccacccgtggcgtgcttgagtccagaaacggcgcacatcctggtggccttatgaagagaagcgcacgccttgcaggaaggtcgtggagcacatcatcctgctcagagccaagcccaacatctcagacgctgaagagaaagacatgctggactacctatacacatcgcagtaccagatgcgagggatactcgcggtctcgctaggccgcatcgaggaccccaacagcgacaacttcacgcacgctgtgttcatgcgtttccagcagaagcaagacatcgcggagttccagagtaacgcgtactactccaaagttgtcgacgagcacgtaaagcccgtttcctatatttcgagtccgaggtggaagacgacattatacctctctttcgcaggggagagactgcgtctagagaggcaacggaggacgcattagcgtctcttgacaagttgatcagccaatgcagcgcttctattgtgcaggcaacatgtggctgctgtttggatcgtccggataacgggtacagtcatgctgcagtaatccgtttcccatcatctgatgagttgaagctgttcagggagagcgaggagtacaaggatatgtgggcgtccaagttccgcccgatcgtggagagatccctgcacctgcacttcaccgttgaccccgtggggaaccagctgatgtagaccaaccgagtggtcatccctatacatgggaccaagagcatctgtactgtacagtgtaaaacagagagatggggtaatatagaggataccgatagggtcaacaagtgccagtgctcggttacattacatcacggcaaaaaaaaaacaaaaaaaacaagagaaaatagcctcccttgtcgctcaggagctcagatagatagatagacagatagatgctgagcaccgaccgagttgaggtccctcttgagagttcagttgtgcagcgggtttgacccctgcggcacccttctcttagcctcggacagatcctgcacctgcacgactcgcctccagccaagtttctgttgaccgtgctgcctgaaagacgacgtcccctcggcgtcggattccggaacccgtcggccgtggcagaagaggcctctctgctctgctcccaggagcgagactgtgagcactactactaccatgagcctgaccaagctttgttgcggcaatcccatgctttttcaggcagggtttcaacagcacaagttggagatggcaagggacggtagtttgtaatacatcacgcacaagcaacggaataaagattttatatacgcagacaacaagggcggcacagaaagtaaatccagctcggccatctggagacccgtggcggtgataccagacaccggggcaggcgtgcgcttgcctcaccaattttggtttggtgcggcggacagcgatgcatgcattttcatca

SEQ ID NO: 32543 - DNA, 3063 bp, Zea Mays
gttgtgacatgggatcctctctctctctctctctccatgtctagaatagctagtataaaaaggagaagccttgggtgctgtcgccggacaggaaagggagggggagctcaagcatcaagaagagcccacgcgcacgccgccatggacatggagctggagcacggagggaatgaagacgacagggggagtgagtcctcctcctcctcctccaagcggagcttcggcgcctcgtcggacgcaaccgtcagcagcacgccaagcaagctacaggctctgaggtttgcggaagatctctccctcccatcggtacgcgctctccctttcttcctcatcattgccagcaagctgatcagcgccaagaaatgagaactccgcaatggcttgcatgtcgttgggttcttgaaacccagctgcgactatcaatcactctgctagcgactctgtctttctgccggagcaggactctgtgctctctccttcctgcctcgttgaggatatgatgctagcctttgctgttcaggcttcagtggtagtgtcgtagcacagtaaagtcactccatccttcaccgcatttcgacagacagtctccatctccacacgttcagtgtccgttgttccactgcacacatcgagggagaagaggaagagagagatgctggagcctggctgctggtttgatctccttggattctcaaaagggacccggtcgctttttgccctcccagtccggcttttagcgtaaaggtgagaagtccagcccctgttactgttagtggcttagtgccaatccgccaaacaactccagtgcagggagcaagtttgcttccctgtctgtctgtctgtctctctttctttctactgtagtatcttttaacttgctctgatgatcctggagatgagaatctgtgagctacacattattgttcttgtccacatgcaaatcaatggcagtaacttgttggcaagaccaagagactgaatctgctggtagcagacaccgggcacgcatgcagcgcctgtagcctgtttcttgcgccgctctatgcaatgcaatgcaatgctatgctattgcagccacttgtttgttgcgccgttctcggccacagctgatgagctgttattagctgttggctgttgccgggagagagctcgagctgcttgtctggcggccaggagcccataacgaaggtgaaagtgaaaccgtctgtctttgaccggtgagcatgccaggcagtagacgaataggctaaggcacgagcaggttcactgtacaggcagccgccatgcctgatgaatgctcctcgtttataaccccctcaccaactacgcttgcacacgcttcctttgacctgataataataaattaattaagcgcacacgcttctccttctcatcccaacatcatatgatatactggcgggcgttcctgcctgcatgtgcagtgtgtgtttttgaccattatatttgactcagtcatttacagtatttcaccatcatcagttagctagctgctatgaccgaacattatatttcttaatctctagaattcctcctgcacgagtttaatctgtatgggaatgggactagatctccggaggagtctttgcattggcctgttgcctgatcagagaagatcgcaacggtaagatgccatgcgatgcgactagtattcatctactatatataatataatgcaagtggcttgcgtagctgatagattagcacgcacggcatatgctgctatatactactacctccgttatcgttcttgttccttgttcgttagtttatttttaaactaaaacgtgacaaataaaaaagaacgaatggagtatatataataccgctagctgcctagctggtggctgcctgtggctgtgtaggattagattattagaacaatctgcattagggttcaagagtggcagcagctagccatgtgacttttggagaggaacatatgcatctcttccctcctagcttccctgtgctacgtacgaatatattcccctcaactatatacaatgaactctagccgtacgtacgtcctgatcgatcagtggaaggtgggattaatatactctttactttttactctatttatctgtctataaagattaaactctatatataacatttcattcgaacagactcttaaacatgtaagttagtttaactggcgagagttgctagccaaatttagctagtgagagggtcaatttaaagagccggatagcttggcaagttaaacggatagtctgttgaagagctattttgctattaaatagctaaaatttaacttgacaagccatttatccagtctcttggagatgctcttaattaactagctttttattaattacgtataggctagttttgttttgttttgtttttttagaaaacggaacgtgtgttttatttcgagagaagcaacattttcttttattcattacgcgcgtagaggcaatgcggatgcgaatgaatgaatgatgcgtcgctggaaccatgcatgcgcaggtgcaggtggtggtgatgagcgccaacatgggttgctcgcactgccggcagcgggtcgccgacgtcgtctccaagatgaacgggctgctggactacatggtggacttcgggaagaaggaggtgacggtgcgcgggaaggtggcgcacaccaagaacaagaggaagcacaggaaggcactgctgggtgctccagcaggttgggacgacgccagatcggcggcggccgcgtcgtcgtcttcgcccggcggccatgccaggacgacgctgtcatggtttttgggatgctacggctcatgaccaccacaccatagtccatagctagtatatataagtctccgcatagatatagtatcatcatatatactgctgtatgtatgtatgtgcttgttatgttcatatataactagtagcagctgcatatatagtttgtaatgatagtaataatctattgatttccattgctttctttctttttcattccgaataatgtatcgttcatgcatgttatgtatgcagcaaccagccatgcccatacatacatatata

SEQ ID NO: 32544 - DNA, 2133 bp, Zea Mays
aaaaaatacatctccctcgcaccgccggcgttcatcttccgctctctcccttactcgcgctcggcagtcggcacaggcgacggcggcggcgctcgggctctcagcgacggcggcagcggcttcccctctcgcctcgcgccctcgcctccggtcctccgcacaccggtcggtgaccctgtgtgcgtgcctctctctctcctcccccctctagtggatcgtcaacggcttccggccccggaggcttcgccgcgcgcggactgagggcagcgggagccagcagccgctgctccaccaaggcgatcgcgccgctttgagagctcatgccccaaagcgaagcgttacccatccttttagcgcttcagcaggctcaagggtgcgcttagtgctgccttttggaattatcgttcctggccaatttgtcatcagatcaccatacatgacaagggtcatccatgactccggagatggcatgcagaaggaggcacttgatttggtctcatctgatgttaactttcccaagggctgtttcccagactataggattggaccaaacaaccaaatcattgatccagaggaaacgcatgaggccgtacctctcaaggaggttgttgcaaaggaaacagcgcagctgctagagcagcacaggcgcctttctgtgcgtgatctcaaggagaagtttgagaagggtctatctagcgcttccaagctttctgaagaggctaagcgtcgagaagctgcttcattagacaggcaggttcttttgaagaagctcagagatgttttagacacactgaaaggtcgtgtggctggtcgaaataaagacgatgctgaggaagctatctcactggtggaggcactagctgtccagctgacacaacgagaaggggagttaatttatgagaaggctgaagtaaaaaaattggctaacttccttaagcaggctactgtagatgcacgcaaagtagctgaagaggaaagggctcttgcacttgctgaaattgaaaaggctagagctgcaatcgaaaaagtcgagaaagcatttcatgtgcatgattctacgaaaagcagcagagaggaggaaatagaagaacttaggaaagaggtccgagaggctaggaggataaaaatgctacaccagccaatcaaggtcatggacatggagtttgagcttcaggcactgcggactctcatctcacagaagactcagctatgcaatcagctaaataaagagttttgtattattcctcgagttgatggtgctccaaacattgcgaactgtccaattcagtggtatcgtgtaatttctggtggcagtagaggactcatatcgggagcaacaaaatttacgtatgccccagaaccgtttgatgttggtcgattattacaagcagagattattttgaatgcagataaaatcatagttcagacggatggccctatagataatgctgcaggacttgaacattatgtggactcactcatgaaacggacggatattgagttcaacgtagtagtaacccaaatgaatgggaaggattactcgtcgaattctgtccatgtttttcatattggaaagctgagaataaaacttcaaaaaggatggtctacaaaagcaagagagttatattccaccacgatgaagttatgtgggagccgtggtggtggtaatgctgcagctagggcagttttctggcaagctaggaaaggcctgtcctacactctagcattcgaaacagacagggacaggaatgctgcaattatgattgctcgcaaatttgcttcgaattgcaatatcgctctcgctggcccaggtgaccaagacacctgatgaagtgatcatgcgtgttttgacagagacactgtacataatcaggtgtagattggctgatttttttgggagtctatttgtgtgcttgtgagggtagaggttgtacaccgcgtgacggtaatccccccttccatatatcttatggaggcattgtttttgtttgcctgtttgcagcattagcgacgttctcgaaacgtgatgtacaaattgatcactgttcttgtgcgtcacatctgtaataatatcactgttcttatcgcttctttttgtaagtcaaatatatatatttttaaatttgttcctat

SEQ ID NO: 32545 - DNA, 3110 bp, Zea Mays
caaaaatctaagtacaagattcaacattcagaaaaaaaaacctcatgctcagtcactccccgtctcacaaaacgccgcccttggatgagccaatcttcctctcgcacggcccactccttacccccgtctcacaaaacgccgccgccgccgtcgacagccaactccccgcgcccccaccgcctccgcgcaccgccccacacctgattgcgcgtccagaggtattcagagctctctgctgtgggagcaacgagggcagggatgagggaggtggtgacggtgcaggtcggcggtttcgcgaacttcgtcggctcccacttttggaacttccaggatgagctgctcgggctcgccgacgaccccggcgccgacccggtattcaggaccgccgcgctcgacatggacgtcctgtaccgcgccggcgagacacaccagtatagtggtgatttaattctgagtgatgagagagcacaaatccgtaacagtgtgataggatcatggaatcttgtgataactggtctcagttgttgcaggtctggaaaggtaacaaaatcagtagcaaaacctcatgagcgaaacttgttcctacaaagtttatctgaagaagaacagaacccaagctctagcgatggccaaaacaatgctagtgttgaagataaggacctggtcgcaaatctggagaatggagtcaaattttggactgattattcaaaagttcagtatcaccctcagagcttatatgagttgtatggatcatggacagactttgacaggtttgataactatggaactgcaaaggaggtggtttcagaatggtcccaaatggaggaaatgaatgagaggctaaggttctttgttgaagaatgtgaccatatccagggtatccagtttcttgtggatgattctggaggctttgccagtgtagctgcacagtttttggagagtattgttgatgattacacaaatacccctgtaatgctgtattgtgtgcggaatccagactcctatgggtcttccagaaatcagtgtgaaaccatcataagatctttgcatgatgctgtatcgttgtcgaaactttcatactactgcaatctgatggtaccaataggactgccttctttaagtatgcttctgattgcttataatcttttacgtagactgccatataacatgtgattctcttatccattctccattgtagcatgttcgtatgtgcagatccttataattctactgaatgtacagtaaactcataattggacttgtgattctttttagtaatttgaggcttcttatagcagtgcttggaccttagttttgcaaatgtttcatttcctgatctttgatcataagctaaataaacattcagatgttgcattcttcacctcaaataactcacacacctactgttggcgaatgcaatgctcattctattataacccagccctatggttacttgtcacctttgctttctataaaagatgagaagcacttccactccagtgccatttgtgcagcagcaatgcattcattatctattccattcaggctacaacacgtgggcccggcctcagattcagcgcattcatctggtaagcttgatattggtgagcttgtgcacatattatctgatcaagggaggcagaacatgatcactgcgctggatgtagcaatgcctgccccttctttgacagatagaacagatttgaggaacatacagaggagcttgcattctctgacacctgaaatcagcgacgaggatgaagatccttacgctgttgaatccatggtggttcatggagtcctagatgcaggcgggaaaagggcttccatatctcaggtgaaggaatccatctgttcagcactggaaggcagggcgacgaaacccaagttctcccacctctcggtatcgcggtgccccctcccaatcccgctcccgttcccgtcaatcttcagcagcagtgttggccagcagggcgagatcctcggcaccagccacgcaggagcccggccaaagggtccgcttgccgtcggctcggtgccgatggcagcgcgcctgaggtcgagcagcgccatagcgccattcatcgagaggaggtcggcgagcctccagaggctcggtgtcgccaggggcacgctgggctcgcaggtcctccacgactggggcttcgggagggaggaggtcgaggacatggctgagcacctggcgaagatgttgcgcccgttttacccggaaatggacctgacgtcggattctgatgattaggtttcactgtcattgtgtctcgtattaccggatggtaagcagctgggttttagtctgtgggaactagaaattgtgatgcagatgcagctggcgtgagacgccgtgctgcgatgcattcctctggtctgtgttgaagggatgcagagtactggaaacgagatctgagagagcctgggcgtgtgaccgtgtcattcagcgctccgcatgtgatgcacatgcatttgggcgacgacgcggacgtccgccgccatgggcagttgttgttgtggtaacattgtgcaatgatccagccctgatgcagatgtccagatctgtgctgtacttacctgcaaaccacacagctaatgaaactaaagaacagtctttctggtctgagatgttttctttgttcgttttaacttcgcgagcaccagaactgtaaacctggcattttttctagtatgaaaaaatagcattatttggctcgacaaaccgcattgttcagttggatcttcatatcatcacagccagaacaagagggcaaatgcagcattcttgcatgtgttggggttccctgaaattttgtatggtagtgtcaccgtaattgatctctggaatatgtaatgtaaccccctctgttgtcgtgtgcatgaatttcttcagtctgtgcatcgctcgcacgcatgcacatggtcgcaactcgcaacattctgcgatctgatgttccagacaagctcaagatccagatcagatacccaaccaggccaccttttccaatttatttcctggggacaaaaagagaaaaggcttgtactgtatcactgttcttctcatatagtacaatgtatcggtatggtctcaatggacg

SEQ ID NO: 32546 - DNA, 1389 bp, Zea Mays
cggaaaaatgccaagagagcgcaaacgtaacagaacacccgcgacaaccactgagccgagcgggggtggatatggcagcggtcgccgcccaccaccacctccacccctcctccgtcgctgcccgaactccaacacttggccgacgccaccgtttctcgtcgcttcctctcgccgcgcggccgtcctcccaaggccgtttcagcttccgagccgcgacccgcgtcctcacgcgcgccggaagcactggcgccagcagcgccgcctcgcccgccgcgacgacggcgtcgtcgttgtcgctggaggagctgcgcgggggctgcaccacctggacgtggcgagggatgcgcgtgaactacctcgccagaggacaggggccgcccgtactgctcgtccacggcttcggcgcctccgtcgcgcactggcgcaggaggcccacggtgcttgtcgggaactcggttggaagcctcgcgtgcgtcattgctgcatcagagtccagcagagaagccgtccgggggcttgtcctgctgaactgcgccggtggcatgaacaacaaggcgatcgtcgatgactggcggatcaagctgctcctgccactgctctggctgatcgacttcctgctgaaacagcggccgatagcatcagcgctctttaaccgcgtgaaaaacaggcatgccgatctgaacactcctcctctgacctggcctcgctgacgctgttctgtgacggtttggatgcaacagggacaatctgaaggacatcttgctctctgtttatgggaacaaagatgctgtggacgatgaattggttgagatcatacgcggaccggctgacacggagggcgccctggacgcgttcgtgtcgacggtgaccggcccgccggggccaagcccgatagccctgatgccgcggctggccgacctgcccgtgctggtgctgtggggtgaccgggaccccttcaccccgatcgacgggcccgtggggaagttcttctcgaagctgccgtcggagctcccgaacgtgacgctctacatgctggagggcgtggggcactgcccgcacgacgaccggccggacctcgtccacgacaggctgctgccgtggcttgaagcgctcctgccgcccgccgccggcgcggtgactacgacgacgacgacggttgtctaaggctaataataatacgccttattgctgactggatctttgaagtctagttggactcttcatttttaactctctagttatctctttataaaaaataaattctataaatcttatagattttgtttagaaccaactcagtttttaaaaaattggcttttattttttagctagcagtggccaacttcttagtttctaagagcatctctaatctaacatagttcctatttc

SEQ ID NO: 32547 - DNA, 125 bp, Zea Mays
cctggaataaacactacgttagtgtttgttagacgatgtccacttgacgatcaacttttgttctgatacttgtttcgtctgtccaccttcagttccgttcatcagcaccatcttgtggagaagct

SEQ ID NO: 32548 - DNA, 1192 bp, Zea Mays
gctgtgttcccccaccctccaggctgcctgactcggggtctcgggcaggttccgccgcatcgtgtcgtttcttccctttcccgtttcccccgttcagttcagcttcggttggctcgccgtactcgggttgttcctcgcctcgcttcgcttccttcctccgcagtcctcgtctcgaattcgctcgcggtgggagaaatcggggcgcgaggatgaccgtgatcgacatcctcacccgggtggacgcgatctgccagaagtacgacaagtacgacgtcgacaagctcaacggcgccaacgtcgccggcgacgacccgttcgcccgcctctacgcgtccgtcgacgcggacatcaaccaatgcgtcgatgtgagatcccgtcctctcgctctgcgtcagcggcccggagccctggatctgaatctgacgacggtctgtttggcgtttggaacagaaagcggaaacggcgaagcaagagaagaaccgggccgcggtggtggcgcttaacgccgagatccggcgcaccaaggccaagctcctcgaggaggaccttcccaagctgcagcgcctcgccgttaagaaggtgaaagggctgacaagagaagaaattgcgacccgtagtgatctggttgccgctttacctgacagaatacaatcaatcccagatggtagttctactgccacaaagaaaaatggaagttggggagcctcaggatctcgcactggaggagccataaagttcgactctactgctgatggaaactttgatgatgagtactttaaggggacagaagaatctaatcagttccgtcgggaatatgagatgcgcagaatgaaacaggatgaaggtttggacgttattggtgaaggactggaaactttgaaaaacatggcatctgatatgaatgaggaattggacagacaagtccctctgatggacgaaatggatgataaggtggatagagccaatgcagatttgaagaataccaacgtgagactgaaggagactgttcttcaacttagatcaagtcgcaacttttgcatcgacatcatccttctgtgtgtcattcttggtattgcggcctacctttacaatgttctaaaaaagtgaggtggagtcttcttgccttggaaccgctcatgtcgtggtccctttgtcaccatggttctacccagttctttgagcgatttgtggc

SEQ ID NO: 32549 - DNA, 2135 bp, Zea Mays
aagccctaaatccatggaccatggctcgcgaagcgacgaacgcgtggcctcggccgtcaccgtcagcgcggaaacgaagcaagggcaaacgagccgttctctcccccgcgccgccgacgcaagcagccgccacggagatggaggccgaggcgtccgtccccgccacggactacgtctacgacgcgctcccgggcctgcacctggccttctcaccggaggagacgctcgatgacgccgccgcggggcaggacgaggacgatgcgaccgcgacatacgccgtcttccgcaacgagataacggaggctggagatgtgctcgcggacatccctgctgcggacttcttctcactcgacgtctccacctctgcctccgtcgagcccgagcccgagcccgagccgccatccccggcgcccacagctgccgcggcaacgccctctatctcccgtgctttggaggaccagccgccgcagggctcggagcgcgcgtggttcaggggagggaggcggttcaggagccccatgcttcagctacacaaggagatcctggacttctgtgattttatctcaccttctactgaagagcaatcttcacgagcagctgctgtgcaagatgtctctgatgttgtcaaacatatatggccacagtgcaaggtggaagtttttggatctttcaggacaggtctctatctaccaacaagtgatatagatgttgtgatatttgaatccagagttaagactcctcaagttggtctatatgctcttgcaaaagcattatcccagaaaggtgttgctaaaaaaatacaggtaatagcaaaggcacgtgtgccaattgtgaagtttgtggaaagaaagagtggaatagcttttgacatcagctttgatatagatggtggcccacaggcagcagatttcatcaaggatgctgtgaagaagttgcctgctttaagacctttatgtatgattctgaaagtttttctgcatcagagagagctcaacgagttggtctggggaggaaaagatattctcgggtatcatcggtccaaggagcacaatctgggaattcttttggtcaggttttttgatttttatggacgcaagttgaacaactgggatgtcggagtatcatgcaattcttcaaggacctttttcttgaagagtgataaagactttatgaatcatgaccggccacatcttttagcgattcaggatcctatggcaccagataatgatatcggaaagaattcctttaactactttaaggtgaaatcagcattttccaaggcgtactctgtgttaactgatgcaaacttgtttattagtttgggacataataggagcattctgggtaccattgtgagaccagattcagttctccttgaccggaaaggctggaacaatgaagatatgttagcggaaccctgggagccgatcacccaacagtttgacaccgagaatgatgcagtatacaattggcatgtgatagacgaggatgaaccattgcccagaaatagtcaatccacatccgaggacactagttcgtcaccatctaaaaaacggaagtccccaaaatcaagacggaaatcgcgaaagaagtcgaaggctactgcctcaggcagtagtgatgttgcaaatgggttcagaaaggatagatcatccaagcgggaagcgggaagcagcaaacggaggaaagggccaaaggagtacgacagattcacgaatacactcccaaagtacacacatgttagcaagtggtaacttatagcatttatagtctggtcgcaaaggtccagcaatttgacagtgagaagagtatcatgtcacattatggcatgcgatgtgaatgacggaagtcatcagcagcaccagaagcgccatcgcatggtttgcttgttggtctgtttaattgctgtactttacgtaacagagatcacactagattaaatgatgttttggttattttatttatgctgcagcagttttggcgactagcttgtattctttttgtaacggtatgggttggtgacgatgagattatgtacgttcaaacatatttaattgatggtctgatggccttaatcactgaacaatgtgttcaaaacattatttttcaatcaaaaatgtagaactctgaaaaat

SEQ ID NO: 32550 - DNA, 2005 bp, Zea Mays
agttggtgtgaattgagttatacattttcgctactcaagcacaagcttaaggcccctatgattctatagggtatcgcatacagagcgaccggaaagtccctatctgcagtgtgcatccaatggaacaagcaactattcagtgcctcggttgtctcaagtcaaaaatacctgttgctaagagctaccactgttcagccaaatgcttctctgatgcatggcagcaccacaaagttttgcatgaacgagctagtagtgctctaaatgaaaatggggctgaagaagaggagttatttggcagatttggcagtggtggttctggggttctaagtactgctggatctggttctttgtcaaattttggacaaagccctggtgttaataatggacctgtgcctttctatccctcaggtaccgataaaaattctggagaaacttggtttgaagttggacgctcacgaacatatacaccaactgctgatgatattggacatgcactaaagtttgagtgcgtagctgtggattcagaaaaaaagtctccaattggaccctcaacctcaatcatgacatcacgtctactgcccaacatgggcacttacctggaattatagaagacaaaatttgctgcgtgaaattattggttatcatgctgatatcatctgtctacaggaggtacaagtaaaccatttcgaagattttttttcacctgagcttgacaaacatggatatcaggcgctttacaagaaaaggacaacagaggtgtattctggaaatcctatggccatagatggatgtgctactttttttcgtagagacaagttttcacatgttaaaaaatacgaggttgagttcaataaggctgcacagtctttaacagatgctattattcctgctgcccagaaaagagtggctttaagtcgattgattaaagacaacattgcactaattgcggttttagaagccaaatttggtaatcatggagctgaaaatcctggtaaaagacagctcctttgtgtggcaaatacacatataaatgtccatcaagacctaaaagatgtgaagctatgggaggttcataccctcctaaaaggattggagaagatagctgtcagtgcagacattcctatgttggtctgtggagatttcaactcaacccctgggagttctccacatgcgcttctggcaatgggcaaagttgatcagcatcatccagatctggcaatagacccccttggaattttacgccctccaagcaagttgaatcaccagcttcctttggtcagtgcatactctgcatttgcaagaatggtaggtgttggctatgatttggagcatcagcggaggacagaccctgcaacaaatgaaccactcttcacaaattgcacaagagattttactggaactattgattacatattttacacagcggactcattgacagtggattcattattggaacttttggatgaagaaagcttaagaaaagacacagctctcccatcccctgaatggtcatcagatcacatagcactcttagctgagttccggtgcaagccaagaatcagacgttgacacattaggtcttgtagaaaaggtcattgtcatcatccttggtggtggaacaccgttccatgtgggaacttgaggcagggcgggaacgcgggctctcggggaagcaaacaaccaagcagcctcaggaaggggaagaggcttgtaacatttgatttttaccctcctacatttgagctcatgatacttaagatgcccctgtgtaccattactttctatagaagaaaaatacttgagagaaatatttgaagggttataaggcccgtttttcttttttgttcactgcggtcgcgttcgattccttttggctgtgtccatgctcgctgcctacaatacgcagccacgcaggagtcctcgacttctgtaaattctgtaccaatgtaataccagttccagtttttgttttccacaatgttgctggcgctggctcaggcactca

SEQ ID NO: 32551 - DNA, 2415 bp, Zea Mays
ttttacaacacggccacaccaacgccacgacatggacgccgccgccgccgcctcactgttgccccgcgccgccgcctcctcactgttgccccgacgcgttctctctcctctccatgtttcccgaagcggcctccttccccgtcaaagctccttcctcgctgctcgctgtgcccactcccgtgcccctcctccacatccgcctctgccgcgcgccgactgcgatgatgctgccgccaaggcgcacccgcgcctccgtctccgcctgcttgcggaggagttccgcgcactcccatctgacgcagatcgcgcgcgccggctcctctcactcgcggccgcgctgccgcggctcccggagcccgaccgcgcccagggcaaccgcgtcatgggctgcgtcgcgcgggtgtggctcgtcgctcgctgcaacgcgtcaacgggctggcggatgtggttctcggcggactccgactctgacctctcgcgtgggtactgcgcctgcctcgtcgccgcgctggacggggccaaacctgaggacgtcctcgccgtcgaccccgccgatcccgacctcgcgccgctcggggcggggacaacggcggcctggtcgcgggccagcacgtggcataatgtgcttgtcggcatgcagaagcgggcgcgcacggccatcgcggcgcgcgagggtaggcaccccgggaagccgtttccgtcgctcgtcatcgcgcgcgacggcgccgtcagcgcgcagggcagctatgccgaggcccaggcgatgtttttatcccctgatgagtccaaggtttcaggccttgtgaatacccttaaagagaaaaaaatcgggattgttgcacacttttatatggatcctgaggtgcaaggcatactgactgctgcaaagaagcagtggccccacatccaaatatctgattccttgattatggcagatagcgctgttaaaatggctgaagcaggatgtgactatattacagttttaggtgttgacttcatgtcagaaaatgttcgggcagtacttgatcaagcaggatttaataaggttgtcgtttatagaatgtccagtgaaccgattggttgttcattagcagatgctgcttcaagttgtgaatatactcattttttgagggaagcttcgagatgttatccatctttgcatgttatttacattaatacttcgctggaaacaaaagctcatgctcatgaacttgttcctacaataacttgcacctcttctaatgttgttccaactatactacagcagatttatttcagagaatggctacaatgtcagatgaagaaattgcaaaaattcatccagaccacaacagaaaatctttgagttcattactgccacgtctacactattatcagagtggtaactgtatggtacatgacatgtttggccatgaggttgtggagaaaataaaggaacaatattgtgatgcatttctaacagcacactttgaggtccctggagaaatgttctctttggcaatggaagcaaaacaaagaggaatgggagttgttggatccactcagaatatcttggatttcattaaggatcatgtgatgggagctctggacaaaaatgtagatgaacaccttcagtttgtgttaggaacagaatcagggatgatcacttcaattgttgctgctgttcaggaattacttcatttttattcttctcaagagagagcaaacatcaaagtagaaattgtgtttccggtatcttcggatgcaatttctaagacatcgaatggttctcatcatgttggttcttcaatggctactgatttggataatcttactattgttcctggtgtgagttctggcgaaggctgctccattcatggtggttgtgcctcgtgtccctacatgaagatgaataccctggggtcgctaattaaaatttgccatcagcttcctgataaaaacaacaaattatctgtataccaagctaacagaattaatgtcaggacacctctcggaaaatcagttgcagaggttgggtgtgagcctattctgcatatgcggcatttccagaaaacaaggaggttacccaacaagcttgttcaccaggttgtccatggtaatggtgacaaacccttgcaatagctgttcatcaatacttgtatttattttatcaaggcggctggatgatggagtatatctcaagtgaatgccatgtttagctggcataccgaagaaatctccgggacaagattatttgccctgtacggtagacatctggacttgccctgtacgttagacatgttgacatctgcatgcgaattaatgttgaacaaatggggttggtctaattgtaaaaaataattattctgaataaatcttaattgctttgagcgaaactgataaatcttaaactgaataaatcttaattgcttttag

SEQ ID NO: 32552 - DNA, 1277 bp, Zea Mays
gataaatatattaatttaattaattttatctaaattataattattagaatgaaattcgatttcaacaaaacaaactgaccgtagtggttttataaacatcgtggaagggagtaatttgcttcgtccaaaaaaaaaaaatctccaactcgtcacttcgcttccccacttctccattccattgcggttctgcgagcccctacctccctgtggtgcttggccatggcggactaccacttcgtgtataaggacgtggagggggcgagcacagagtgggacgacatccagcgccgcctcgggaacttgcccccgaagccggagcccttcaagccgccgcccttcgccccgaaggttgacgccgacgagcagcccaagtccaaggaatggcttgacgtgcgcgagcccgaagagctcgaggaactagaggacgatctggatgacgaccgcttcctcgagaagtacaggaagatgaggctcgcagagctgagggaagccgcaaaagccgcgcgatttggtactatacttcccatcactggctccgacttcgtgcgggaggtatcgcaggcacaatcagatgtttgggttgtggtcttcctctacaaggatggaattgtttggaagaattggctactaggtatccagcgacgaagtttgttaaaattatctccacagactgcatccccaactacccagataggaatgttcctacaatactggtgtataacaacagtgctgtcaaagggacttatgttggtttgcagaagtttggtggaaagagatgcacacctgaatctgttgcgttagccctttgccagtcagacccggtactgaatgatgggcatggtggcagcgattcatctcggggcaatgtcttcgaaggtgttcgcaggaagttcatagagaaggttgtggcccagcatgaagagcgggaagaagaggacagtgactaagctaatacttgtgtttgttttccgcagctggcggatccaatttggttccaatgtttactgatcttatgtgatttttgtgggtgaaatttgccagagttttctgatacctggctgtgcggctgaagtttttgaaagttcacgggtcttattgcctacctttcagctgtaacacagctccattattatattgttaagagatcagagatgattagtgcacttgtataattgcatgagaaaaaatccagccaaactttgaatccacagtatttcactatcttgaacatttctcaacacaaaacatcatgagtcatgactaatttgtgtatatgc

SEQ ID NO: 32553 - DNA, 1487 bp, Zea Mays
aaagcagtagcaacagaatgctcattgaactttcttagcgtcaaaggtccagaactgataaacatgtatgttggagaatcagagaaaaatggtcgggatatttttgagaaggtctgcacgcccatgtgtcattttctttgatgagcttgattccctcgctcctgcacgaggatcctcagcagattctggcggtgtcatggacagggttgtttcccagttacttgtggagatcgatgggttgagtgacaacagccaggaccttttcattattggggctaccaataggcctgaccttcttgattctgcccttcttcgccttggtcggttcgacaagcttctttatgtcggtgtaaatactgaggcatcatacagggaaaggatccttaaagcacagacgcgcaagtataagctgcacaagaacgtttctctcttgtcagttgcacaagaatggtttcatgcagcaaagcgatcagtgagtatttctgccgacccgttacgccatatgttgggctcttcctagctttgctccgttgatcttgcgtgtggtattttttaggttgaaacattcgaaaccgatccttcaagaagtaatgacgccagtgccgaagaagtcatcgtcgagatcgacgattttatcacagtgttaggagatatcgcaccgtcgctctctctggacgagctacaaaactacgaacagttgaggcagaaggtcgaaggaccttctagatgaagttgggtttccactccctgctgacattcttaaactgctaacacaccaaaacattccctgtcttacattttcgtttgtacacaagttttcctccctgaaaacttgggcacttctatatccattcctgatttatacaatcacatccttgtagcagcatctgtattgacatcagaatgacattttctctgaagagaaacatcctgtcattctttgttagcagctctgcaactattctgaagcctttttttttttgcagatgatgcgaatcaactttgtatagttagtttcgtcgatgtacgcttgtaccatgttgtagtaaatgataaagagaataggagtccttggatcatctgctcgtttgaaccattcagttatcagccatcgaaaatagctgtctgctatattttttttcgtcagcgacgatctgtcaggatcagggacttttcattgcaacgagtgctaggtcattttttttgccaaactcaatttatgatatcccttgcttacgtgttatccaacttggtgattttagaaatgcttatcagtatggtagaaacacctcggctgcgcagattataggagtgagtatcaagttggctggacgagcgggagcgaaggggcgccgtgctgccgctcggctcacaggtgaggcagggaacaatcacttcttagattgatcaatgcttccaattgattacagacgcctggactttatagtccaactctaaacagactccttaatcttaggaactctaac

SEQ ID NO: 32554 - DNA, 4524 bp, Zea Mays
caacaggacgaggcgcgctttcctgccccatttcctgtccccgcgcgcgctccccgctcccctggcttcctcttttccgccgccacgacttccgcgcgcgcagcatcgccgccgccgttctcgcgcacaacggatcagagattttcccggccgtgcgcccctctcggtgagaggcgtctccctcctcctactccacctccccgccctctactgtctcgggggagagtcggtttcgttccgagatttcccttttctctctccgctcaattcgtttggattggtgcgctgcgcccaatccagttgggcgaagacatctgtggttcgattgagtcattttcgtcttcctccgaggatttctgggggttcagttgaatccccatccgccacactaagcccggccctacctgtgttgcgatgcgcggcgaggctggcaatgacggcggtggcggggatacccaactcctggacggcgccacacctcggttctccttcgagtgatgacgacggaacacagagtgaggcgtatgattgggcgctgtacgacgaaacacagcctctggatggtgctgagacccagtttgtagaccaggtggaggaggagggtgtggctggcgattggacggagacacagttggagagtggcgacgaggatggtggcagtggcaatgaggatggcggcgatgacagtgaccaagtgaagacacaacaacaggtggaagatggggaacggggcaatgatggtggtggtggggatgataatgctggcaattggactaagacccagttggatgaagtatgcgaggtgtatggagcgaacaactttgttggagacatggttgaggcccagttggttgaggaatctgaggaggaggatgatgacaaggatggattaactgatgatggtgagcatgatcttggtgagtgggggaagacccagttggttgaagactctgatgaagacataggtgacgatgagttgagtgatggcactgttgtcctaagtgacaatgagagcttgtcagaagatgagaggggcacaaagtcaggaacggataaaagggatgcaaagttgggaatggaaggaagcatcgaggggttaaatggtgggattaagaagcatgatgataacaataattcggtagattctgatgcatcaacagatgaggagggtgacacaagttcaggtcaccttcagatgaaattaccttctgttcatgttgcatcagtaaggacatgtggaatttctgaacctcggaactctctgtctgtgaactgtatgaagcaatggaaacagaaggcctgggtcaacacaatacatcccctgccgaaaattgtagatgaatctacttcgtgtagcacctccgttggttgggttgataacgactcccatggttatgtacagaaccatgatcaagacggagcaaaaagcagagacaagtgctcaacagctaaaaaactttttgccgacacaacagtggaggatggtgaaaacaacagcagatgtattgctggattaagctatgtgggatcacaagagcctggtgatctgtcacaagcaaatgcttttgatgttgtggacagattgatttcaatcaatggtggattatcatctcaagaaacgaccccaaataaattggaaatagcaaagccatgtgtttcaagtaagaggggaactttaatgttggctgagaaggtcgaccttggtagaagttccaatgggaaagcagaaatatttaaatttgtggatagccttgaggatgagggaggaggtgactttttcagtaaaaacaaagacatcttgttgctgaaaccaattggtagaggaaaaccaaggagtcattttacaggagcaaagaaatcttccccaaaactttcacggggagaaaataaaacaggggaagcgttgaacaaaagaaattccaaactacctgggaggttggaaaactattcctttaacatattcaagactattcaaaagtgatgtagagagtaagcggccttctgaaaacaggactaagaaaaaccttttgaaggtcttagatgatctatcaaatgacaaatcattggaagaacaggaaaaggctgatgtagttttgaatgatgttggtccagatactcaaatggctgttgaagcaatggatgccctggtacaatgttcacctgctaaaagtttatcttctgaacatcaatctgtgctcaatagagatatgatagctgagaagtctagaatagctaaaagtcattcgaagaatggttctcctcagagagctagcaacatacaggaaggtgtcacaacacgttctaaaaaaggaaaagtaactgacttcagtgccaaacctcagaaagaaagactaagaggatctaagatgcaacaaagttctgagtctatagtaaaagtgaaacataagcaaacaaagtctgtgccagagaagagcaaagtttcaaagaaatttatcagtgaaaataagtaccatgagacacctgttgctcaccgaactaggcattgtggtaggaatgatccttctgcatttatcgagttatctaataaacacttgaggagaggtaagaaaatgacaggtgacaactccactattgggcaagtgcaaaataaccacattgcaaccgaatctggtttgagttattttgaaaaagaaagcacagagcagacttgtacaaataatgatcaagatcttcagcaacctaggtatggaagcacacaacggacaagtgtaaataatgttcgaaaccttgaagcacgcagagttgaatcaacaactgttgttacatgcagagattccccatcacatcccaaacggcaaagaacacctacaaaaatgatacagtcaactgctccagctgctgcaagtcatgaaataccatcagaattggcaagaccatgcaagaaaaggcggattttcataagaagtgtttctgacctgctaaagtatgcaaagagagaaccttcccatgggaaatcagcttctatgctatccagcatcatagaaaagtcattagctgcttatcctgtacttaattcttctataagagatgacaggaaaacttctgatgtcattagctctgcacagagactgaaggaatcctcccatattgagaatacaagcaaatcaccaaaaacgaatcctcaggttctggacagtgctatgaaaacaccgtcaaaagtggttaatgaattgtcacccacttttagtcctgtgaatccatcaaaaggctcaagtaggagcttgttaaaagcttctgttgcgagagaattgctgaagctagatcctgaaaatgtactatcaaatcagcagaaaaaagattccagaagagggaaggataaggccaatgccagtattttattcagccagcatttggatgacgatgttatcaagcgtcagaagaagatcttggcacgcttaggagtttgtgaagcattttcgatggccgatgcaacacactttgttgcagatagattttgccgcacaaagaatatgctacaagcaataactatgggcaagccagtagttacatcaatgtggcttgaaaattgtgcacaagcaggctgttttattgatgaaaggaaatatattatgagggacgaaaaaaaggaaaaggagataggtttcagcatgcttatatcactggcctcagcttgcaaacaccctcttcttctgggaaaaagagtctttgtaacatcaaatgttaaaccaagtcaagtagtgatgactagcttggttaagtcatcatcagggcagccgctagagagggtaggacgatccataatggagggaaagggagtgcctcctgacctgctggtaatctcgtgcgaagaagactacgaagcttgtgcgccactactcgagaaaggtgctagtgttttcagcgtggagcttctactgaacggcatagtcatccagaaactggagtacgagaggcaccgccttttcatggaccgagtcaaacagacccgctcgtcgcggtggttgaaggacaccgtgcaaggccggttcgtccctgtacccaagcgtccccgggcctaggcagctcaagaccaatgtatatgtaagccatgcgaagctgttcttgctcgccccttggcctctctccagctgtaggcctgtgtaaatgtatgtgccggccgcaggtgcatctgccctgctgccgctgtgctggttgcttgatgcgggcctgatctttctgtttctctcccctgtatgttgtgcattataggtgttcatatgtattgtagcctgtttcttttttctctctctctctctagctcttctgaacatacatatgtttacccgacacaactgaaccttagtggcgatgagattgtcacgacggtggtaactgaggattgatctccttgttaagccggatggcgggagacaacatgtacaggtttatgggccatgggtcgttataataagtgatagtgggctaattcctgtctggctatataatgccgattgctatataatgccgattgctgtaatgaactggatacgatgaatacagaag

SEQ ID NO: 32555 - DNA, 1640 bp, Zea Mays
tgccatcctctccactctctccctcgttttctgtcatgtgtggaatttcggccatatgctagcttgcaaaggtgcaattttcatctttaggcactgatctgcctctgcttttgacagtggaaagcttcgagctagacaaaaggaaaggattgcgcagcgacacattatcaagaactatgctgttgataatcttgaggagttcatgactccatatatctctattgctaatgaacctgctgaaaatcctttgataatcgtagaagacccaagttcttcacagctatgtggtgctaaatgtttcagtgaatcaactggagaaatgaggcaatcctccaagaaatcaaggagatattctgaaatccctcaagatctttatgccagaattcctgataacgctgcttcatccaaggacaactcaaaggccaccgatgtcttcaatccagggaccccaaatcacctgctacctgtacttggcctttgtgctccaaatgctgatcaggtgaactcatacaaaaactcaatttgtgcaccaagcataaaggagcataaaagggccagtggtgacgtagtcaacaaacaactgtcaactcccgctgaccattctaatgagcttagaaacgaagttcaatcagcttctgataaggtcatctttcctggtgcatctgaggaagctttgcgaaggataagtaacatgatcccagataattattttcccttcagtcatgtacgtcatctttcttagtttggcactcggaccatttaattgttcgtatagttactttctttatcattcttcttagggcatttgtttcgtaacaagtaaaaacttttaagatagtttctcactttcttatttgtttattatttacaacgtagctcaactgttgatatttgatttattggtagcattaacagagcaaataaatcattctcaaggggagcatacctaaatttttcttatcaagtaaagagcagtattgtcaagcaggaaaaataacactagttcttactgtgcagattcctcctatatcagggaaggcggttgatcctgttgaatatattggagcttcgaatgcatcatttcaagggaaactgggtcttccaaacttcagtctggaagacaacactccacttaagcatattaagcctatacctgatatatttccttacctgtcactgggtgctcataaggattatattcgtagttctgtcccagagttgccagatagttcattattaccaaacttcatggcagatattgctggtacttcaaagcaaaaatcattcatgtctggtccacttcctgggctgggtcttagcccaggacaaccaatccatttgactatgcctgataatcacaagaaagtcttggacaacataatgatgcgtgctcagtatgcctcaaacaaattcttgaagaagagatcaaaactagattattggtcagaggatgaacttgatgctctgtggataggagttcgtaggcatggaaggggaaattgggatgctatgcttagagatccaaagttaaagtttttgaacaaccgaactagtgaagagctggcctcgagatggattttggaggagcaaaagattatagatgaacctatgtctgcagccacaagacgttctaactcaac

SEQ ID NO: 32556 - DNA, 140 bp, Zea Mays
cctggtggatgtcgccggcgaaaggaccaacgaagacctcggcacctggcgtacggaggcggcggtagccccgtcgtcgcagactcgcagagagagagagagccagagaggtggggggcctggggggagacagcgcacgc

SEQ ID NO: 32557 - DNA, 2570 bp, Zea Mays
gctgtcaatcgcctccccactgcggcagatccgcaatccgctcctccaccaccgcgctcctcacccacgccagggacaagactgtctacctccacgcccgcctcaccaactccgcggccaccgccaccgccacgcccctcccccatggtcgtcgagtccgagtggtggaaccagcgacgcatgcgcgtcgagggcgacgtgaaataggtgctccaccgcgggcacaacgggcacagtggaggtggaacgagcaccatcgagttctggttccaccgaatccaccgctcgcacaccggatccatcgctcccacatgcccgcacaccggatccaccgctccctcccccgcgatggcctggttccaccgagacaactgcggggctagggtttggattcgtgggtggagcccaaggctagatccagcagggggagggaggtagaggaggggagggaactgctggtggtcggcagtgggcgaaggcgcgacaatccaggatatggattcctgagcgtcacccacccgcccatccacgtcgcgcggtgtagtcatcccctatccgcagccgcctcgctccctctcccacaacaaatccattctcctcctcccactcgacgaggatcgcgaggatgctggaggacgtcgtcgctgtcacgcttgacgttagggcctccgatgcttgacgttagggcctctcgcttgaagaggaacacaaacagagctcatgttttttattttgctctgcattatctactgcttctctgtgggggcgttatttacagtatgtggcctgtttgttgtgttgttcctgcggaagggcgggcgggccgaaggtgtttaagaaaatgttgttgtcaacatcaacctcctggaagggccagaacgcaggcagcgcctcaactcgtcaccccatcagcacgatgctacttcatgtggagctggtatgtaggatgattatcacgagtacttcaagcgctcattttaggaagacatcgctgcgcaagtgcctcaaggagtggaatgtaccggtttttggttgatggtgtctggaggtgtgatgagacaaaaccctttgtacgtgatgaatatggactgatcagcaatgaagtgcttgtggaaaacaatgtactacccgttgtgcagccagagccttctatcagaggaactaatatggataagggtaccattttgaaaacaatgcccctggagccatcatctcagaacccaagcatgcaaatagcagttatccgccatgtggtctctggaatattattacacaataccatatatgacgttgttcccctttctagcaagggtcttgctctggttcctttttgggatgaccgtcagggaaccataacaggcatgctcactgcatcagattttgttttaatcttgagaaagttgcagagaaacattcaagttattggcaacgaagagcccatttctgcttggaaagaagcaaagctacagttctatggtgggcctgatggtgctgtcatgcagagaacgccattaatccatacaggcaacattgatctcagggccaagaaagaagctcaactcggcatgcttcctgtttgaagcaagggcaacaaacttaccccaccagatctctgtcgccaaagcagggctagtgaataagctgtgtttcctcccggattgtcactgcttttatatttgtgcatttattttgagggaaacattttgcccaaaaaaggcctgcagtgcacgttttaaacaagtcatttgaaccaactcttatgctgaaaactgtatgtgatactgcagaaggcaacacactagcttgataggaaagttggttggcaagcataggtggactctggtgccttcatatatctatatatatattttaagttgacgatcttcgtgatgctgaaactgatgaagacctccgatgaaaaaagagacatgctgcacatgcacgagggtacttgcagatcgatgtcggctctatggacgaacactcgaccaagtcagatgaggagtatgagggcctagccatgcgcgacgtgatggctactggtccgacgatgagcagcaagctgtgagttaaagatgaactcacctgccctggagagtaacatccataggagtgaggcaaaatggctggtaccaccacaacatggacccgttcctgaagatgtccaaggaggtggtagccgacaccataatgtcttgtgtcattgtgtcaccggtcggcaacacactgcgctggtaccggcgggtgttgtgtttcttaggcgtctgcttctgtgctttgagttgtgctatagagtggttgtgccaactactgattttaaaagaaaaaggtgagctgagaatcattgttgaaaacaaacatgtaattgttcgttctcatcagttgtgccaactaccaagcatttcattgatcagaatttatcgttgctcatgagaaccaaaagtaagacacttctcaataacattggatgcaaatttctgctagcttatcttcactatcttttctcgtatcaatataacacacatttatacataatttttgtgttattatatgttttcgttgcaacgcac

SEQ ID NO: 32558 - DNA, 418 bp, Zea Mays
cttcatattcagctagagaaactcgttggggctttatgacttcttagtaacactaagcaagcacatacttaacaaagggcttcatgatttgttagtaatactaagcaaacacaagtgaagcaaagggcttgacataggaggtatttgaaaaggtaaaaaggaagtcgtaagatctcacccgttttatatgaatccatagttctctgaatctgtggtccttaagatgtccgttaagcagagcacatttatagctcataaaaaagttagtgataatctgagatcgtctcttgtttccaagaatgcaggagacctggtcctctttaaaataagaagaagaaaaaacagatttagttcttagttcttacaatgtgtaatccacctcgcgaagataatttcagtctcctcagcagtgcttttc

SEQ ID NO: 32559 - DNA, 1761 bp, Zea Mays
tataaaaacgggagcagtgcaagccccgcttttcatggcgtgagcgccggggcaaggcaagtagccgctgcgcggtgctgccacctgacctgactgccgtcccggtccccggtccatccgaacgccgttacggggccgcccaccgcgacggaacggaaaggggcagcttgtagtggctgtttcttttgcatatgcgctttctattgttgttgtcatttcaaaggaggccatagtctcctggattttgtatgccttgttatctggaattggtgaccatagatgtcatttcgtagcatagtccgtgatgttagggatggcttcggcagcttgtcaaggagaagctttgagcctggtcctcgagatggaaatacaatggtccagtgttttataaagaggaataagtcaaaatccacttaccatctctacctgtgccttagcaatgttgttacttcagaaagtgggaaattcctcttatcagctaaacgacaccgcaaaaccacatgcaccgagtacactatatcaatggattctggcaacatctcaagatcaaaaagaacctacattggaaaaataaggtctaacttccttggcacaagatttttaatttatgatacacaaccgccctataatggggctgtagttcctcctgccggaaggacaagcaggaggttcaactccacaaaagtctctccaaagctgccttcagtcagttacaacatcgcacaggtatcgtatgagttaaatgtccttggcacgagaggtcctaggcggatgcgttgcatcatgcactccatacctgcatcatcagtggagccaggtggcacagtgcctggacagccagagcagattgtacctcgagccctggaggattcattccgcagcacggcttccttctcgcagtcgttccgtagcactgcctcattctccaagtccatcatggactcatccatggatttcaatagcgctcgcttctctgacatcgctggcagcagcgctcgcttcacgggcgttcctggtagcagcgctcgcttcgcgggcgttcctggcagcagcgctcgcttctcgggcattgctggcgccagactggacaacgacgaggagagtgaaaccaaggagaggccactggtgcttcgtaataagccgcctaggtggcacgaacagctgcagtgttggtgcctcaacttccgtggccgtgtgacaattgcctcggtgaagaacttccagctgatcgccgcggctaccccgccaccggcaggtgcgccaaccccctctcagcctgccccgtcagatcccgacaaggtgattctccagtttggcaaagtggcaagggatatgttcacgatggactatcgctaccctctctcggctttccaggcctttgccatttgtctgagtagctttgatacaaagttagcctgtgaataaatggagaagaacaaaggtaaaggagaacatcaggttgcttgcattaggccatcagtgtacctctttccatctggctctcgtgttgccttggttgtatttgtgcttaatgtagccatgaatttggtggcccatatatggacgcatgtgttgttgttggccctctcccttagaagtgattaaaagttgcatttggaccacatgttacccgatctgtaatatacttgcagtggcatcgcatgccgcgtgataacaaagttcccgttcgtgattggacttgtatggtttcagaaaagcagcaaacaaagtttggtacggtgtgcattttttttgctcgtc

SEQ ID NO: 32560 - DNA, 8466 bp, Zea Mays
gacgaggccacggccgcggaacagaggggagagacgaaccgcctcctcacttcctcagtactcatttctttcacgagaagcaaaagatcatttaaaccccaccactctgatcacctatgcggctttccactgagcatcagtcgcactgccttcacttcacttgcagcaactcctcgagttcgacgcccctccatcccttccctgctactgtgaatatatgcggcctgctcgtccttgcgcgagcgggtgaacagtcttcgagcgcgatgagggaggagatggatttgggtgacatcgtgctctcctggtcggtgcaggagatcacgaacgacgacctctacaagacgaaggtggagaggatccctttcagctttggttctcttgatgactacttgcgatcatatatgacacctctgatcgaagaaacaagatcatgcctaaactcgtgccttgagctcattgcagaagcaccgtcttcgaaaatactttcctttaaagttgcagggaaatcaggattgcattctatggatgttgacttttgggacaatggtgctggtttttctaccgagacctacaccgctaggaacggtgacatatttgttttgtctaacatgaagcctgaagctgcagatgacttcaaccgctatggtttaacatattgcttggcaatggttactgaagtttctatgaatgatgaatatcagaagggcttcaaagtgaaagtttcaaatagtactggtttagaaggagactttagtaaacttgtgcatgcaacatttcttgataatataatggctaacatgcgtatatggaaagcactttgctttgactcaagcatgaataataattttacaataatcaagtcacttttagcccccagaaatatgggtgaagatgtctgttctgtctgtgctaaaaaggatgactgtttaatgtcttctgcagagctaccaccagttaatctaaatcagtcacaattggatgccattgaatctatcatctctgctgtaagatgtagacatttgaacctcacaaaacttatatggggcccaccaggtactggaaagaccaagactgttagtgctctattgtgggctttggcttgtttgaaatgccgaactcttacatgcactcccacaaatgttgctgttgttggtgtctgtactcgattccttcaaaatttgaaggaattcagcaagcagattgacatatgtggtctacctctttctcttggagatgttttgttattagggaacagggacaatatggacatttctgaggagatccaggaagttttcttggattatcgtgtggatgagcttacagagtgcttttcattattgtcaggatggaggcacataattgtttcaatgatatcattttttgaggaatgtggttctcgatacgatatgcttcttgaatgtgatggcggcagtgattctgtatgctttttggatttcctgaaaaagcagtttgatgttgcagcaaaagctgtaaagaaatgcatgatgactttgtgggttcaccttccaaagaagtgcttttcacatgaaaatgtcagcaatatatctatggtgttacgtttactagaaaaaattaatgccttcttatgtgatggagatttaactgatgagagtgcgaaaaggggatttgattttcgatcaactgagaactctatttatgagccaatatcttacattgagaaggaattaggtgatgcaaggtctctatgccttaaattgctgaaagatcttcagagttcacttaatttacctgttggtgtgaacaggaattggattcagaattattgcatgcgtaatgcaactctaattttctgtacagcctctagttcttatcggttgcataatgcagagattgctccgcttgatatgttgattgttgatgaagctgctcaagtgaaagaatgtgaattggtgattccactacgtttgtgttggttgaaacatgttgttttggtgggggatgactgccagttgaggccactggttagaagccaagtatgcaaggaagctggatttggaatcagtctttttgagagattagtcatactgaattttgaaaagcatttgctgaatatacagtatcgcatgagcccttgtatcagcttatttccaaatgctaaattttatgacaaaaagattttagatggtcccaatgtccattcttcctacaacaaggattgcactggccttctttttggtagctatgctttcataaatatcactgacgggagggaacaaaaggaaggtgcaggaaacagttggcagaacttggttgaagttgctgttgttatgcacttgatccgaaccatctttaaatcttggagaaagagagaccaagggattagcattggtgtagtttcaccttacagttctcaagttgccgctatcaaagatagacttgggaaaaagtatgatacatctgacaactttcatgtcagggtcaagtcaattgatggtttccaaggagaagaggatgacattatcatactatcaacagttagatccaacgagaggggcaatgttggatttcttgctgacatccaacgaacaaatgttgctcttacaagagcaaggcattgtctctggattcttgggaatgctaatacactgtataaaagtgggacagtctggacagaccttgtttctgatgcgcagagacgtaaatgtatttccaatgccactactgaccctgaattgtgtaagttgattttgcatgtaaagaatgaacttgatgaactcgatgatctactttgttccagctcagcagttttcagcaataccagatggaaggttgttctgagcgacaactttagaaggtctttcatgaaactaaaatctccactcctaaagaaggaggtactccaaaagcttgttaaacttggtggtggttggcggataccaataaagaatcttgatgtgactgatgctttccagcttgcaaaagcatacaggatcagagatctgtatcttgtttggagtattgatctagaaaaaaacgaaagatacttccagatgataagagtatgggaccttttgtcacagcagcatgtcgctagaactgttcaacatctggaaaatctcttctccatgtatacagatgaataccttgaccactgcagaagtgtgcagacagaagggaagctggagtttcctatagtttgggatgctgaacatgatattgttcggtataagaaggactgcaaagttgatgatcaagtagatcatgatcacttggacttctcatgtgccttggagaacacaaaagttagtgaaagcttcttgctgatgaaattttactctttatcatctggtgtagcacatcatttgctgacagctactgatgggactgaaattgagatcccctttgaactaactgatgaagaggaggcgataattcgatttccactcactagtttcattcttgggaggtcaggcactgggaaaaccactgttttgacaatgaaactgtatcaaattgagcaacactcctttattgcatctcaagggatagagttggaagttgatttatctgtggttgatccaaaagataggttggcaatggatacaagaaaaggagaaagttttgtaaaacaagtccttatcaccgtaagccctaagctttgttcagctataaaaaatcacatttgcagacttaaaaggttttgctctggtgatgtttctgaccagcccaaccctcttcatatgtatgatgtaattgacgaccccgaagagtttacagatgtacctgataattttagtgatctacagcatgagcactatcctcttacaataacataccgtaaattcttgatgatgcttgatggaacaatgaagagttcattttttgatatgttctatggagatttcaatcctagcattgagagaggtcattccaaaactcgagctatgcaagcttttattgaatcaaaagaagttacatttgagaagtttgctgctttctattggccccatttcaatggagaactaacgaagaaacttgatgcatccactgtcttcactgaaataatttctcacataaagggtggatacagagctaacatgccgtgcagtggcaagcttgaaaggcttgattatgtgatgctctctgataaaagattttcatctctaaacagtaaaatgagagagaaaatttatgatgttttccttgattatgagagtatgaagcgcactgctagggaatttgatttgtcggattttgtcaacagtcttcacagaagtctagtttctgagggctacaatggggctttagtggatttcatttacatagacgaggtgcaggatcttaccatgtcacaaatagcacttctcaagtatgtctgcagaaactttaaggagggctttgtttttgctggtgacacggcacaaactatagcaaggggtgttgatttcaggtttgaagatgttcgctcactgttttatacctcatttatatcagaaagtgaagcatgcaaccaagtgattaaacatggaaatcatgctcatctcacggatatgttccaactaagtcagaattttcgcacacattgtggtgttcttcgtatggctcagagtataatgagccttctgtactactttttcccatcatgtgttgacaagcttaatccagaaactgggcttgtatacggtgaagcgcctgttctcttggagtctggtaacgatgagaatgcaattatgactatttttggagaaagtagaggtgaacatgctgaccagcatggttttggtgctgagcaagtcatattggttcgtgatgttgcaacgaagaaacaaattgttaacctcgttggtaaacaagctcttgtcttgactattgtcgaatgcaagggccttgaattccaggacgtgctactctacaacttttttagttcatcgccattacggaataaatggagggtagtatatgactacatgaaaacaagagatgttacgtcatcatctgaagttatatctcatcctggtttcgatagaaacaagcattatctactatgttcagaactgaagcagctgtatgtcgctatcacacgaactaggcaaagactctggatatgtgaaaatgctgatgactactgtcaaccaatgtttgactattggaagaaattgtgcattgtagaggttaggctacttgattcctcactgattcaagcaatgcagacagggagcagtactgatgattggaggttaagaggtaccaagttgtttaatgaggggcaatttgagatggcaacaatgtgctttgaaaaggctggtgatgcatatagagagaactgggcaagagcagctggactacttgcaactgctgaccgtgtcatctccacaaatttagaaaggggccaagctaacttgcagaaagcatcagagatttatgagtctattggcatgcatgagaaagctgccacttgctacatcaaactaggtgactacaaaagagcaggaatgatatatatggaaaaatttggaactaaaaggcttgaagatgctggagactgttttgctattactgaatgctggtcactggcagcagaagtttacttcagagctaggtgttatacaaagtgtttctcctgctgctcaaaaggtaaagcattgagtctgggccttcaattcctgcgacagttagaaaaggaacagtgtgagaattttagttcggactttgttgctgttagaaagacatatctcgaaagctgtgctctgcattattttaaatgtggagacataaagcacatgatgccatatgtcaaggctttcaacaatgtggatcacattcgtgcattcttgagttctaggaatcttttggatgaattgttgagtatagagatggaaatgggtaattttcttgaagctgcaggtatagcacagcgtaaaggtgatgtcttattggaggtaaacatactagagaaagcagagtcatttgtaaatgctacacaccttctcctcctctatgtcacagcgaattccttgtggtctccacacagtagaggatggcctccagaaagttttgaaaagaaggaacaattgcttacaaaagttaaagaaatggcgaagaaagtatctgaagactttttctgccttgcttgctttgaagcagacttgttgtcagattcccatagatctcttgccagcttgacctgtagcttgcttgagggtagaaaatgtggaaacatgttagttgaacttatttctgctcgttacattattgatgttcatcttcagtctcaaacctctagatataaccttgagttagagccagtatctgatcagctgtgctataatatgatggcttgtgatcagatgtcgttggaaacactgtcctgtatttggaaccagtggaaattgattttagtcaaagtgcttgctcatcttaatccttctgaggatattaaatctaatgattctgcagctgtgtgtgaagacctttgtgctaaattattcgggttgagaaaagacagtgacaaccgatatgtggtacttaatgtggactctggttggcttactaacacaggcagaagttctttggaacaagatggcaacagatgttggctgcatactgtgcattgtcagtcatgtgctcggacttttatgggaatcagaatttgactcatggtcatcttggaagaatagccatgtttcttctttacacagcaaaatatggtgatatgctgaatttaacacttgaacaatacctgaatcgtgacgctgagtgggcacaattttttcaatctttgaagagttttcttgacactggtgttggaagatgctcattggtccagacctttaaagtggctcttgaatttactaccaatgtaaaatggtggattgagaaggattatatgtctccaatatgctatatgaatttaatggaatgtcttggtttttttgcaatgtcctgttttatggttaatggctgtgcgctttgcacaaaatctctgttggttaagatgctaaagtgccgtacaagcaaggctttcttaggtaattgcctggtttctggtctgggtgaccaggatatggatctggactgtatgacattctcaccaggggtattcatatgccagtcaattaggtctattttgacaaacaagcatgctattcaagagtggattcgggaaatagctccagcaattagatacgttccagtccttctgagactagtaatcatgctttatctgctgactttaactcttcagttgggggactgctatgaggtcacagattttcttgctaagcacagaatttttgaggatttacctcctgatttctccaagaagattgtacctactctgaaatttagaaatggtacagtagcacacttcacaagagtatttggtgatgcacttgctgcaattggagacaccatggtcattcttggtttgcccaaaggcccgctaattagctcaggcttaaaagcttatagatttagctatactgatttgagtgatattagcaaagtaatggcattactttgtccagaagagcagaaattttccatgcaaaaagatacaaaagcttggaatgatacttgtggaaatttgtctattgctagaatacaagataatgagatggtcagtagaattgaaacgcatttgagtgatgagagtattaccttttgggagaagtttgagtcgtttcaagtctttatgcatgaccagaaggactcaagggttattattctattccttgaaagtcttctttcttggcttgagcgtcgagaccttccagaaaatatggatgttcaattattcgtagagatcaggcacatatgcagtcaatttcaagagaagtatcttagggataagaaagtttatctaactgtcgaagacctttactcgacgtgggatgatggggagaacaagctgcagaagatcatcagtttcctgcggtatgagaaaacttcgggaaaagaatctgtcaaaaggaaggacaaagcacctgctgcccagttccccacgcacatggctgatgaatggagtggatgctctgataatgatgaacctgacacagcagggatggacgcggtggaaccagccaaggaagaagatgtaacgtcttgttcgactgcgactgcaactgcaacaaagagaacgcagaacaagaagggcaagaagaaatcaaggaagcggggcggcaagaagtgagcttgcttttagcccgtagccctgctcagctctagaagcatttgatatgagactttttttaatgtactgaagaactactttggcttgaactattactgcttgttctagtctgttttgtactactttggcttgaacagcggtttttagtttcaagtaaccgtgccaggtattcgttgcctcagctactagattttgtaggataaatggttaaccaacatatcttttagtgagcagtttctaaacctttttaatattgtgcgtaataagtcggcttgttgcacaagtttttc

SEQ ID NO: 32561 - DNA, 3497 bp, Zea Mays
gtgagcactactctatctctatgctgcgcgcctgcgacgagaggagaggaggatgggctgttgctgttctgtttgttttactactactatactactagtacaaccacccctgcctcccgtctcgttttccattccttgtcttccccgcaccgcacccgcatccgcatgcaccaatcgccaccagcgaccgccccgcggctgtgcctgtgggtgcgcgcgttcgttgtcccctccacgtccaccggaaagctacgcctcccccaccgcctcctctagcgtctcggcccgtctccctctcactctctctcgctctcgctctctctctccgtgggtgatgcgctcagccgacctcttctgaccggcggagtggctgcgctcgccggtcacccatggctatggcgggcgccggcgcggcggcggcggcggccaagaggtgcatgaacccggcctgcggcgcgctgccggcgtcatctgtggtggtcggggcgggaggggactggaggaagggctggccgctgcgatccggaggcttcgccctgctctgcgacaagtgtgggttggcatatgaacagttcgtgttttgtgatatatttcaccaaaaggaatcaggatggagagactgctcattttgtggcaagcgcctccattgtggatgtgttgcttcaaagaactcttatgatctacttgacagtggaggaattcaatgtgtcacttgcatgaaaaattcagcagctcagtctgcttctggacaagtggttccaaagctctttccatgtccaaacaatctgctgttttttggtaaaagcgacgagttattgtcaagcagaaaatttgaacaaccaccctctcttatgttggattccagaaatgatgatattgctattgtaaataagagtagtcacctgttcatggtaagcggcatagaggctggacagagcagtaacatcttgagacaaaaagagatagagaatggtccaaggcagattaaatgggaacaaccaacccttaatattggggacatgggaagacctttactaactaggtctcaaagtgcattagagtcacctcagtgtactcgaagagatgacaataaggatccaactacagatagcacaacaagtgaatcgtttccagaggcatgtctgagcatgaacctaggtattgcaaacaatggaaacaggatggaggctacttcaacagcggaaagacctatgctatcgccaacgacagccattgctgaaggaagagaacttaccactgcactgtccccctttcagcacgcacaaagggctcggcatttcctgaccagaccaccaagggttggtgagggtgcagcttttgatccaactagagacatgtttccgcatcttcgtgttgctaggccacctgctgaaggaaggggccgcaatcaattacttcctcggtattggccaagaataacagaccaagagctgcaacaaatatctggagattcaaattccacaatcgttccattgttcgagaaggtcctgagtgcgagtgatgcaggccgcatagggcgccttgttcttccaaaagcttgtgccgaggcatattttcccccaatttctcaaccagaaggacgccccttgacaattcaagatgcaagaggaaaagaatggcattttcagtttaggttttggccaaataataacagcagaatgtatgtcttggagggtgttacaccatgcatacaatcattgcaattacaagctggcgatacagtgacctttagtcgtatagatcctggagggaaacttgttatgggctttcggaaggccacaaatactgactcacagatttcagctattgcgaatggttcccttctcagtgagacactcttttctactgcaaatgaaagcataggagtattggaataaggcagataaatttggcagcaggccagatgaggggtctttgcaatttctacaaaaacgaagtcgcaatattggttccaaaagcaggaggttcttaatcgacgctgaagatgccatggaactaaagcttacctgggaagaagctcaagagttgttgcgccctgctcccactgcaaaaccaactgttgtgatgattgaggactatgaatttgaagaatatgatgaaccccctgtctttgcaaagagatcaatttttaccatccgtgcaacaggggaacaagaccagtggattcaatgtgacgagtgctcaaaatggcgccggttgcctcttaatgttattgttgcatccaaatggacatgcaccgacaactcatgggacccaaaatgctgctcctgctctgcgcctgaagagttgaccccaaaagagttgcaaagtgttatgcagcagtatgaagaaatgaggaggcgaaagggcagctatggtctgaagctgaatgtcgctgaaatggatgcatccagctttgacgccttggccacgggtgcagtattcggtgaagtcgggaaccaaggtacggcttcagtcgcgacgaccacaaggcaccccaggcatcgccccggctgcacatgcatcgtgtgcatccagccacccagtggcaagggcccgaagcacaaccctgcgtgcacctgcaacgtgtgcatgacggtgaggcgccggttcaagacactgatgatgaggaagaagcagcggcagtcggagcgagaggaggcggaggcaagcaagaagatcgcgtgggtgaacagagacgagcccgaggggagcagcctgtcgagatccccgcagacgctggacacgacccgagacagcagcgatgtcaccatgttcgacaaggtggccgccgacgtgaacaaggggcacatcgacctcaacttccaccctgcagcccctgccgtccgtggcgctggcgaccagggacagaatggcgcgcagcagccccgggcggtgagcatgatgggcctcctggaagtggcgagccggccccttgataactacatgaagcagaacggcctgacgagcctggcgggggagcaaggaggtggcagctccagcacggccacggtcccgccggctccagtggagagtgaggaccggacgtccgatgagggccgtgtcgcgtcagcagagcgggaagcagacgccatggccatcgacgaggccggcgagaaccagcaggacaagcctgccgactctgccgctgccgctgctacttgacggcgtgcgtctgttgtgaaagtgactgatgggtgttgtcagcgtgctttgatggtttcaaggtgttgctcctggaggctggagttacttacgtgtacgtatgaggctgtgcaaccaacccccaggttgtatgttgtagaagttctgtaaaccacgatgctcttgtgttggttgctgctgtaatctaaaaacgcttagacctttggattcaataactcaccacatacttgatctgtactgtacatctcatctaagacatcttttggaaaacaggaatttcacaggagtcacggacggactcagtgcttaagtttaaatatacatgcctttta

SEQ ID NO: 32562 - DNA, 615 bp, Zea Mays
cggatagcatcgcgagcgcatgccgaccacgtgggtaggagacacagtgagggagatcacggcatgagtgccaccgcgacaaaatttactggtcacggtggccgccggtgaggattccggttggactcggggaatggcgccacatacgagttatccatccccggcattatccgctcctcaccgggcacgaatcaggacggcggcggcacgaatcgcggcggggatcgtcggcggcgagttgagctggcgtcctaatcctttcagatactgtaccatggcgtccttcattcagttggcctgatagcccaagtttagggttaaatttctcttaattttctgtggcaacatacctagagttctgcagcaaagttgtagaccaaagattcagctataattttgccacaacaactatagccaaattcctactgcatcatgtttgaatttgtacccaaagtttctgtggttacactgtcagtctgaaattcagacttcaacagcttgtcaccccaactttgggtgagtttttcttccatttcttcataacaaccatgcttacactcttaagcaaagttgttctcctttgataggtctacaaatttgatgtggtgacctagg

SEQ ID NO: 32563 - DNA, 1946 bp, Zea Mays
atccagccgtccggcccataccgcgaatgtccacgaccgctgcaaaagtttcttcttcaggttcttaatcagtaatcacgcacggacgataaatccaagtaaggaaatccccgatgatctcctgcgcgtcgcagcgccagccactcgattagtggagtccaccaaccaagcacgcgtccctccccgtcccagatcccatcccgcggcagccggtcagtccgatccatctccagtacccagcccgtcacccgccttccccgttcgctctcgtcggcgcgcgatggagggtctcatcaaggggttggtccacgtggccatcgacgccgtggaggacgccgtgagggagagggaccacggccgcgccgacgacgacgaggtgccgaggaggagggcggcccaaagctccgatccagatgacgacggggaggaggaacgcgacgaacgatcgcggtcgacgtgggccgaggtcgtctccgagcagaagggcagcgatccggacgagcgccgggaccatcgaagctcggggcgggacaatcgccatgagaggagggatgacgagggttggaaaagggccgatggtcggaaccagcagcagcaccacgcaggccggcagaaccagtgcgagggggaggaaaggtgggatggcagtggcagccggcggcgtcagcaacagcagcaggcacaaggatacgggaatcagcatcaggaagaagaaaggataaacgatggaggctggcagaccgtcggtgagaaaaagcgccatggaagaccacagcagtctgaagcatggaatggatacagaaagccaccatcagaacaaaagtactctgaggatgtcggtcatatccaccaaggactcaatttcgagcccaccagggaggagctgaatagcttatcgaaagcgtgtagccgactttgggagctcgatatgaaccgtattgttcctggtaaggactacataatcgactgtggcaaggggaagaaagtttatcagaagggtgatatggcatctgaaagcttgttcagctggctaggcgacgatgtgctaagaaaacccacctactcacgtttctgcgcacttctggataactacaacccccaccaggggtacaaagaagttgttacccagcaggataagcacgaagaaatagctttcgttgaagagatcgctagaacagcgccaattaagtacttgcaccggtacttagtgcagaagggggctgtgcctcaggactacgaggacttcaagagaatgctgacatccctatggtttgatttgtatggaagaggtggcaactctagctgctcttctgcctttgagcatgtgtttgttggtgagatcaaaggacggggacaaggggagagtgaggtatcaggcttccataactggattcagttttacctggaagaagccaagggaaatgtggattaccaaggttatatatttccaaggcgccgtggtgaatcgcctgattcagagatacagctgctgactgttcagtttgagtggcatggcgtgctgaaatcggtatccagcacgttgattggcgtcagtcctgagtttgaggttgcactctacacgttgtgcttttttgttggaggggaagacaaccgcgtcgatattggcccgtatagtgtgaacgtcaagtgctaccgattggggaacaacaaaattggatcagcctttcccattgtagagaactgattatctggtaccatactgttcaatttgttgctgccatctgcaatagtattgctacttgcactgctaaaaagttgacgaccgagactgaagttacttttcatgattttgttgctgtggatgtggaagctttccgatgtatattttctgcctttgtcatgtttatttactgatatgctgtttgttgatgaaaattcagtacggtctgcaaagacaaagataatatggtaaccggagtctgcca

SEQ ID NO: 32564 - DNA, 1587 bp, Zea Mays
agaccacgtatatttccggcctaaaagatcttctgtgagcaaaggggccaatggaaggcaacaacccaatctcaggagttccttcgaacccttcaacgctactacaataacgcctacactgatcacgagaagcaggatgctataaacatgttcttaggtcatttccaacctcagcaagggaaacctgcattgtggaagctggactcagatcagcattacaacattgggaggcaaggaactttaaaagaagagattggaagatcattcataaagaggtcactatcagatggtaacatactgttggagagcagcttgcctgtaactatctgtaacaatgaaacagacaacacagaattgctcccagtgcaacagctggatgatattagagaagcttctgattctgcgccagagatctccatatgcgaacctaacctgtgctccagtatgaactatggcacagtgcctggaagacactccatgtcagaagagcggcagagttatttgaaaagattaggttaccctgaattgcactcttcaaatttctttgaccttgatttgttgtcatcttcaggaaattcgtttgacgaggaagtttttgagaggtcattactgatcaattcacctatggatgtgatcagtcctgaatcatctatgtcatacagtgaacaaggacacactgatgagggaagagatgacacggatctttcccgttctagcagccagctctcagacattcgggactactctgaccactttgcgcagtgggtcgtgaatggagacacgctttgctactaggccctggacttttgtcttggtgacagctcagtagatgtgacacggcaggaaatggaagtctgacggatagagcagatgaaatggctgacgactagccgggctaggtgccgtgcatctacctgcagaggcggcgtagcagaagaggtggtggacatgggagaagtctcgcatcggcatgcttgtggtcactggaaggcttgaacgatgaacgctgatattcgtcggatgcagctttcggtggggtacatgattcaatttgctatggtgaaaattttgaccgtagcttagacaataaataggcaaaatatatctgttcttttagtttagcttaccttgcgtttcccttctccatagaaaagtatcaaaaggaaaaacaatggaaaatctattaggaaaaggaaaaaacaaacaaaccataggtaaagaacacttctgttgtaaatagttagtttgctacagaagtataaatatctggtacttgttgggtttcttggcggtgtctgtttcataattgtttctgtgaaaaagctgaaagaaactcggtatgtcttttaatatgcaccatttttgcttgaggactctccatgacattgcgcagagaggagtgcaagaacttgaatgtctcatgcttctcttgcggtggacatccacgtcgatgacaaaattctagtatatggtacgtagttcattcgaaaggtgcaaggtatccaatttagttttggatatctagagttcacaagatagtacttatctgaaaaatgaaatcaaattaccattgcaaaatataaataa

SEQ ID NO: 32565 - DNA, 1418 bp, Zea Mays
accacgcgacgcaaacaacagagctgccagcctgccactgaggagtgaggaaccctaagcggcgcactgtgcaggcgaaggcggcgcgctaccggcgacggccgacgggggatacggcgacatcgtccccctcgacccctcctccatccccgacgcggcggcgccagactgcaggtgttgaatgctgatttgttgtggcctgttgcgtcttcaccagttcatacattaaacttgaagaaccacgtggttgaagaaaagcccactgaaaatgagtaatacatcatcttcgtcaagtgggatgtgatatatgctgatattccaaagctcattccatttattgatctgattcgtccgattgacaagaaggcagagtaccaaatccagaagctcaccgatgccgctgacaatgccactgttcgagagaaaccaggaaatgcacaggcgaaggggaaggacgggcattcggatgaggaagacctcctgaagtataggccaaacccagatatgatggacacaaagcctggtcctgatgggcaggatactgatggtgtttaccgtcctccgaaatttatgcctactagcatggatgatgaagagaaacgtcgtaaaaatgattcaaggagagataaagcgatagcccgagtggcaatagaaaacccttatattaaagagataattgatgatgctgcagacagacctgaagagtggaaggaaacagtgggcgatgaaagcagagaatttgggaggtacatgcgacagagagaagagcaagagaagcaggaagaggagttgttcactcgggctcctgtaaccaaacgtgataagcagatcgagaagcgcataaggagacaacttcatgggctaggaggcttaactgacggtttcgaccttgggatgaacatgctgttgggaggagacaaggaagatgatggcggttcaagcaagtcgcatggcaagagcggaaaccgaaagaagcacctgaagagcagcaagaagaggaagaggcattagccttggacccacactgctgtagcacttcaacataccgatacagcctagagacggttcaagcaatccacacggaaagttgaagctggagaaaatacaagaaaccaagtagagaaaaaaagctttggttcctgtaggcgtattatttctgaaacagaaaacttgatctgagcgactgatcctgagccaatggaacagtatgaattatatggcttgaacatggtaggtgtaccaagttttgttctgatagtcgaatgattgttgtattattgattaacaagaccaacaatatatagactaggctccaaccggttcatagaaacagtgcccggtagagatggacggtgatcacctgattagtaccttctaagtatagtcatgcactagagatggaaggtgatcaccttgcc

SEQ ID NO: 32566 - DNA, 3098 bp, Zea Mays
ctttaccctaaccttttcaatgctccagcgaaggaacagtcgccgccatttcttcccatctccatcttcctcgcagcttcgacgctccatcttccgctccctcccttacccgcggtcggcacgcaggcgacgccggcggcgctcaggctcgggctctcatctactgcgtcagcagcttcccctcccgcatctcgccagtcgcctcgcgctctcacctccggtcttccgcacactggccggtgaccctgccttataatattctgccacatcactctgggtgaagcaagattgggtagctttccggtgcctacttcattcttgagtttgtcaatataagccactgaagccaaggatgcatgaaaattaacccaatgaaataaatgctcctacatgagtccaagcatttacctatcaaacttgataatgctggatgctattctcaggcagacctatatggtgatcttgccatttattgtcgtgtttctatgttatggaaattttaagagcgctgatgttacctgtagtgctctttaaatttggaacttggaacatggagcatgtgctgattagtagaaggtttccaactgatcctgctctctaaatttggaacatggagcatgtgctgagtagtagaaggtttccaactgatcccaatgagtataagttatatgaggaaattggagatggtgttagtgccacagtataccgagctctttgtgtcccacttgacatcttggttgccatcaaagtgcttgaccttgagaaatgtaacaatgacctggatgggataagacgggaagtgcaaactatgagtttgattgatcacccaaatcttcttcgtgcatattgctcatttacaaatgggcaccagctttgggttgtcatgccttacatggctgctggatctgctctccacattatgaaaacttcttttccagaagggtttgatgagccagtcattgctactcttttgcgtgaagttttgaaagctcttgtctacctacattctcaaggacatattcacagagatgtcaaggctggaaacatcttaatagatacaaatggggctgttaagctaggagactttggtgtgtcagcctgtatgttcgatactggaaataggcaaagagcaagaaatacatttgtagggacgccttgctggatggctcctgaagtcatgcaacaactgcatggttatgattacaaagctgacatttggtcctttggaataacggcattagaactagcacatggtcatgctccattttcgaagtaccctccaatgaaggtgttgcttatgaccttgcaaaatgcaccaccaggtttagattatgagagggacaagcggttttcaaagtctttcaaggatttggttgctacatgcttagtcaaggatccacgcaagcgtccttcgtctgaaaagctgctgaagcattctttctttaagcatgctcgctcagctgaatatctggcacggagtattcttgatggcctccctccattgggtgaacgctttagggaactgaagagcaaagaggctgagttgcttctcaataacaaacttggtcaggagagcaaggagcagctatcacagaaagagtacataaggggcatcagtggctggaacttcaatctagaggacttgaaaaatgcagctgcccttatagacagttcaaatggcacttgttatttagatgtcagggagaacagagttaaggatgactcacaagaagcttacaatggtccagaacatatttaccaggaaaggctcaaccatgttgcttctagaaggcctgaagaggatgagatacaagaagttgaagccttgaatgatgctgtctcctcttcgttttcaagccgctcccttgaggcactaaaatcttgctttgatgtttgtggtgttgatgatccgagcccaactgctactgattcaagagcgcaaccaagtgtcggaactttacctttccagcagttgcaaaaatttgagcattgtaaaagtggcgactgcaatggtgaaagcttggaaagaagcgtttctgtacctacgaatctggtcactagtggataccacaagcattcaagtggttctcttatacctgagcaagttctttctccctacttgagcagtgatttggaaagggatggatttcgtcagaaaaacttaagcagcaggaactgtagtggccctttattgttccgccaaatgaaggattcacgcacacatcaatctgttgcgccagacgagtcgtcggaaggaaaaattatccgtcgaagggggcgcttccaggttacatcagatagtatttctgaaaaggtagctacatcatcctgcaacagcagcaggataaatctaccaattgatgcagcacgttcaagtcccaagttgtctgcaattcttccaactttgcaattcttgatgaagcagaatactatgcaaaaggaagtactcagtaggctgatttcttcaattgaggaaacatctgatgattctgaagcaaccggaagcagttcatatcagtcttctggagggcctgcccgagaaaaggaattgcatttgtatgttctccaattgcagcgaagtgtcaccgaacttgctgaggaagtgcaaagattaaagctccaaaacaataagcttgagcatcagatcaatatattgtcaagaaaagatgaaaggtcgtcaacgcaagataactgacaatgatgatatgccccttctaccacattgaaatggaaaagttcaggcctctgctcttacacgcaacgagtcttacaagtttgttgctcaattgctaatcaagaatagacgggaaatgaacataataaacgaaagtgaagctgtgatccttcgaggctgaggtatacaacaattgagaatgttgtggtagttggaggattttgtatagccattgtactgcgctgtcaaatagaatcttttgtctagtaactagcattcatgtttgtcgtctcttatctagacgccactaaaaagatatgttctgtatctgcggctaaaattgtggtagcccctaccaaaccgttgccgaagtttttttttgttaatcacctctgtatcaatactgctagtgctaggtttgggg

SEQ ID NO: 32567 - DNA, 3038 bp, Zea Mays
tttttctagtccccaccacccgggtccgctccgctgtgccgcgcccgggaatcactccgcacgcgaaccgcagtcgcggacaccccacgcccagctcagctcggcacgaccaccaccaccaccaccaccagtcctccctcgccctccctccgttgtccgttccatccccgcgccgcgccgcgccgcgccggatgcctggagagctggagtccatcgagcagcggccggcacggcactcggcctttctttaatccgggacccgccctgagctcccccgcactacactgcatcgcgctcgcggctcgcgcgacgttgacattgggcatggccccttccccaccaccgccaccatcaccaccacctcgtcgtccactccctcccctccccctccacgcggagcggtgagctgtctcccccccccccccccctctgggagagcacaggcggcaacaacggggagtctcgtcgaaatggcggcggcggcggcggcggagatcgtgcgggagatcgcagcggtgggcgccgccgacctggccgccgccgccgatccgctgcgcgcggactgcctccgcctcgcgcggaaggtgtccctgctctcgcacctcgtggccgaggtcgccgacgccggggccggggccggggcgggcgatgcggcggcggaggcgtggctgcgcgacctcgtcagggcgctcgaggctgcccggaggtttgtcgcgctcggacggacgccggccgctgcgggggcgtcagatcaggatgccatctgcaagaatactggtcttcagttcaagtatgtgacctggcagttgcaagctgctctggcaaacctgccacatagctgttttgagatatcagacgaagttcaagaagaggttgacttagtgcgagctcagcttagaagagaaatggaaaagaatggaggtcttgatgtaaccgtatttatgaaagttcatgatatcttagctcaaattgacaatgctgcaccacaatctcaacagccgcatcaacaaccagagcagccacagatggagaaattcagtaatgatgacctggagttgcgaaatgtcgtattgctagtttctgaaataagcgggttatccaaacctgacatgtcaaaaatagtatcagatctaattcaaggacttgaaaatgttgaaactcctgagtctccgaaaccagacaacgttgatcgccaaccaccaagtgatgaaacaaaaggctcatctgaggaagttaagaagtcggactctgtagctattcctgaagatttccgttgcccaatatctctcgagctgatgagagatccagtaattgtttcaacgggacaggtgaggcttcacactatcaccctttcattggtcctttaaactgtcatgtataatttgccggctgctgacgagctgctcacgaattctgtagacctatgagcgcgctttcattcagaggtggattgactgtggaaaccgaacctgcccaaaaactcagcagaagctccagaacctttcgttgaccccaaactacgtgcttagaagcttaatactgcagtggtgcgaggaaaaggggatggaaccacctagcaggtctaaaagcgacggttctcctcttgaggttgctggcaacagattagcaattgaagcgttagtccgcaacctctcgagcagttcattagatgatcggaaatctgctgcggctgaaataagatccttggccaagaaaagcacagacaaccgtatacttctagcggaatctagcgctataccggctctggtgaaactcctgtcgtccaaggacccgaaaacccaagagcacgcagtgacagctctcctgaacctctccatatacgatcagaacaaggagctggtagtggttgccggtgccatcgtcccaatcacacaggtgctgaggacgggtagcatggaagcaagagagaacgcagccgcggctatcttcagcctgtcactgatggacgacaacaagatcatgatagggagcaccccaggggcaatcgaggcgctggtggagctgctgcagagcggtagctcgaggggcaagaaggacgcggcgacagcgctgttcaacctgtgcatataccaggcgaacaaggtgagggccgtccgagcggggattctggtgccgctgatccggatgctgcaggactcgtccaggagcggagccgtcgacgaggcgctgacgatcctgtcggtcctcgcgagccaccacgagtgcaagaccgccatatccaaggcccacgccatacctttcctgatcgacttgctgcggtcaggccaggcccgcaacagggagaacgctgccgccatcatactcgcgctgtgcaagagagacgccgagaacctcgcctgcgtagggaggctgggcgcccagatcccgctcgccgagctggcgaagaccggcacggaccgagccaagcgcaaggcaacctcgctcctggagcacctcagcaagctgcaggtgctctagtagtcccacccaccactgtccatccacagccacaccactctgtgcgcgcgcgtgcgttttcgacttttccacgccacggtgtatgcgtacaaatgcgagtagtgtagcatcatcatcatcatctgtcgtcgagtgtgatttcggtggggttggtgataagttcgtttcagtcagaggagcaagaccaaacgcttgttcgttctgtcagctcatgtctgcgtgtagtttgattcgagctttttcaaaagctcgcggtgtgggaattacctcggtcgccatcgaaattttctacttatattattattatgactcctttgtcttcaagacatcaacctgacatcaacctggtaccatcagcacttaattcctggggctaccttcagcattaacttgttggtgccaaaatgctctcccctggactggacatgattagcaaggcgacctggtaagaaaagcagcgcggtaatgatgattctatgctccattactcctacctgcgtttagtttagtatccgatatcttggcaaaagctcagactggttcacagagaaggatgccga

SEQ ID NO: 32568 - DNA, 1857 bp, Zea Mays
ggcgcgcgtgacccacgaagcaatttcaaacccagccagaatcaggagcaccgcgtacgcgacgtcgcggtcgcggcccagcttccagcgcccgacccggcgggcaaggcaaggcaacgaaccaacctggattactggattgtggcttggaagcttgccgcgagcccgcgacgacagaccttctttcgtcccgtcctttcccctgcgcgccgcgagtgaattccggaatccccaatctatccgacgccacacgaaacgaaacacaagagaagagaatagagagaaggtcggagggctagacccggtcccccaattccaattcgcccctctcgcggccggcctcgcgagacgccgattcggatcccatctcctgctcagagcctcgattcgaccggcgggggcgacgattcgaccgggtcggtagccaggcagaggcagcggaaggagaggatgagcttccaggacctggaggcggggcacgtccggggggcgccgctcggcggcggccggaggaacggcaggggccccgcgggggcggggggcgccggcgccggcgcgtcgcaggccgtggcgtcgggcgtcttccagatcaacaccgcggttgccacgttccagcgcctcgtcaacacgctcggcacgcccaaggatacccccgacctccgcgacaggatacataaaacacggcaacacataacacaactagtgaaggatacatcagacaagcttaaacaagctagcgaggcggatcatcgcgttgaagtcagcgctaccaaaaagattgctgatgcaaagctagctaaagatttccaagcagtcctaaaagaattccagaaagctcaacgattagcagtagagagagaagctgcatatgcaccttttattactcaagcgggcctgccacagagctacaactcaagtgaagtgaacaatggtgctgataagttggcagagcagcgcacgcagcttctagaatctagaaggcaggagttggtcttcttggacaatgaaatagtgttcaatgaggccatcattgaggagagggatcagggaatacaagagattcaacaccaaatcactgaagtaaatgaaatcttcaaagatcttgctgtgctagtccatgatcaaggagcaatgatagatgacattgattcccatatagagaatgctgttgtagcgacttcgcaggctaaaggtcagctttcaaaagctgccaagactcagaagtcgaactcttcgctgatatgcttgttactggttatcttcggcgtggtcctgctcatagtgataatagtacttgcagcataaaagcttggaaggcagctgaggttccaatgatcgagcttattgcgatgaattccttattattattttttttgctgtgcagccaggaatggatcctggcatccgcctggatgtatccaggcggtgattggtgatgtgcttgtggtatggctgtgtatttggtgatgatgtatctggaatgcatgggtggtttcacataaaagtatactctttcctgccagtgtagttcctcttgtctcatatgcacgctttgtttatatattgtaatgtatgagtgcgtgctgtagaacaaggttggattatctgtggtatgaatttcctcgattccatgagaaacgcttttctatatgtgaacttcgcttcctcttttcttcttgggcaatgggcaccatgttgttaggtggagacggaggtccatcattgttttcttcttgcttattattatgtggtccatcatagttttctgcttaaggaaatggttggttcaggagaggataaaatagtgttattgtaatcttctgtatttataatgaccgaagatatcgtacatagttt

SEQ ID NO: 32569 - DNA, 2437 bp, Zea Mays
ctcagtaaagtgatgtttgatgcaggttcccctcgtcctgctccacataaaagtaacagtacttctgcaccaagccatggatatcctggtagtactgcacctgcacctgtacgtttgcctccgccaaaaggaaagggagaaggaaattttgctcatgctccaaaccatcccaatcaataccattcaacgtcatattctccaggatcagctctaccacctgcgcatccacctgacattcctgcatttagaaagcccaagattttggcaccagcgcctagtcaatcgctgctacctccaccaacaaattcatactgcacgacgccctgctcagatcctctgaccaatagtcctccaggaatgacatgcctctgtgtgttgccaataaaagttgagcttcgctttggtatagcattgtacacattctttacacttgtccccgaacttgcacaagatattgcatcgggagtgttcatgaatcaaagtcaagttcgtgttatgggggcaaatgctgcacctgatgaccctgaaaagacaatagtctttattgatcttgtgccactgggaccaaaatttgacaatgcgacggcattttcagtatttgaaaggttttgtaataagcaggtcatcataaatcataatcattttggaaagtatgacgtgttgtatgttctctaccaaggccttcctccgtcaccaccggcagcaagcatgaacaatggtcttagcaatgtaaatggtccaagtttgcatccgcttgctgctgatgtgggaaattatagagaaagaaaaggcaggtcctgtttctgcaatggttgggaacaggctagaaagcagacctatttcggcatcaccatccttcagctcaagtttggtggcatataaaggatctgccaaaacatttaacctggttgagatggagagagctacactaggatttgatgagtccagaattattggtgagggtggttttgggcgtgtctatgaaggtattcttgaggatggagaacgggttgctatcaaggttttaaagcgggacgatcaacaaggtacccgggagtttttggctgaggtcgagatgcttagccgattgcatcataggaacttggttaagctgataggtatatgcacagaggggcatagccgatgtttggtttatgagcttgttccgaatggcagtgtggaatctcacttgcatggatcagataagggagctgctcagtttgattggaacgctaggctcaaaattgcacttggtgcagcacgcgcacttgcatatttgcatgaggattcaagtccacgtgtcatacaccgtgatttcaagtccagtaacatcttattggaacatgacttcaccccaaaggtgtcagactttggcttagcaaggacagctttgggtgagggaaacgagcatatttcaactcgtgtcatgggaacttttgggtatcttgctcctgaatatgcaatgactggccatcttctagtaaagagtgatgtttacagctacggtgttgttcttcttgagcttcttacagggaggaaaccggtagatatgttaagacctcctggacaggaaaacttagtggcatgggctggttctcttctgacaagcagggatggtctggaatcaatcatagatcattcacttgggcgcagcattccatttgacagcatcgcaaaagtagcagccattgcttctatgtgtgttcagcctgaggtggaccagcgcccattcatgggtgaagtagttcaagctctaaagctggtatgcaatgaaggcggcgagttcaatgagtcaacctttagccaagatttgcatatccaagatgtcgaggttatgagtagagcaagtacggatgtagacgttgacccaacgctatctgctgagctgttcacttcatcagcgcgttatgatgctatagatgcccctggttctttccgaagatactcaagttcaggtcctctaagagtagggagaactggactgaacaaagagaggggcctgtcaacaggcagctcaagtgaacacgttgggctacagaggtttaggattgatggagaatagtcagcctgcaagcagctcatgatgatgtgcgcatggaagaaatacacattggattattttcttccaagccagatttcatactcatcgtgaatagtatgtggaaaattgagaaaggcgtaaaaatcagtgtgccactgttcggtgctcccgtcgccttctttggaaagctcaaacaagacttcacacgaatttttgtacagttctagagatgatagatgcttttaggaaagaaggggtgtacacgagtttttcagctgtaattccccacgaaccgtattacgtttcgccgtagcatcagtgcaaatcaattaaagggcgtgcacgcagtcaccattttgagttcaatgaaaaaaaattcatcctgattgaccgcaa

SEQ ID NO: 32570 - DNA, 3034 bp, Zea Mays
cccatccctccctgatctctcccatccccttctcctgggctggctggccagtgacggaccagccctctcccacctcgcacgcccctgtggctcctgaccttcccaccaccggagttaatgccgcctggcctggccgtctcgctggcgcggcgtgggacgtggtagcagtaccgcgcgtcgcggttgggccaatgggacgggcgtaagtgcgtaagcgaggacgcgaggtgaggtgtggagattgaggggtgggagctgttgtggcgcgtgtctccctgtcgcccgcagcttctttttattcctcccgtccggttccgttccggggaattgattctggggagccggcgcggccgcggctgctttgatcccttgccgcctgcctggcctgggctctcgtaccgcaaccgcaatttggattggcgtgatccagctctgctccaaccgtagaagtgcgcgcacttgctgctagctaagaagcatctgcagtgatcgttccaggctcgtgaggaaactcatttgctcgaatcatgtccgactttgtcgggagcagatataccaagcaagaagatttccatgttttgttgagcaagaaagatcctggagaaccacctgaacataagcacgtcctgtggatggcacactggaccaaagcaagcagcaacaatggcagcagcaatcctttggagggtaccaccaagggcactactacgaaagatagcgagaccttgccttatgaattcacggaatctacggttgctaaaaggctcatggtaggagtaagccatggaagcgcctccatgcagcatgaccgacaattcaattctagtgtgtggggtatggcacgccatatttccaacgaattgggaccgaagaatagtgaacatgttgatgggtcttttgaaaaatttgtgaagaaggatgctgtgaacttgagagcaagggcagttgtgtcagaaacatactctgttcacaagctttcagagttaccgttggattttcagcaccttgggaactccgacgatccaagtccagattggagccactttccaatgttcgaaattaatcgaaagattgacagtattctcaaccgcaaacgaaggtctgcacctctgaatctaaatgcgtctgcatcccatgtattggccctatcgtcacaagaatacatgatgcactcacatcaaatagctgacgagaacttggatatgtgcagacctgcagaaggctttgcatctcacttagaagatcctgctggcctcaattcagatccttcagggccaaagttaaaaggacagttattggataccgtgtcatgttcttgcagcaaggacgacaccaattcagcagattgtctaatagacgagcagcatacaagccactattttgcaaactcaaagcatgaactgccctctgtatctaacgaaaagaagttcaagtttgcaggaaacaaccacaatcgaattcttgcaagtgcgtcccataaacatgaaagtgttgcagaggcaatgttctgtgcaccagtacttggtagtgagcttcagaatgaacctataactatttccaacatcggcaagaaggatggtgaaaacttccatgagatgtataattgtaatagcaaggctgttccttgttctttgttagctcatgagcaccatcgtcatctgaaaacacagagaacggaatctgcaggaaatttgaaagtctgcacgttacctgatcaacaaactgcaaatgaattggcagacaagagtaatggtgacctgctgacatatggaccaaagccaaagaagggctcttgcaaccgaagaagcctctatttattcgaaaagttaacgattccttccaaatcacaaagtgcatatcctaaaaattctgcgtcttcaggaaaatctagcggctttggagtttgtatgtacggcaccaatattggaagccagttattcggagcacagaatcaatcttcatctaagactgaaacattgcacagcgatgctcttattgggtccaaatcctcagcaggcattgcttcattatcggcacaaaaggacaacggttgcccagccccagccccagccccagccccagacgaagcgaaaagcgagcagctagcagctccgtcgtccaacaccaagcagggaggagaatcagcatacagtaaagaagatggatctcataatctcaacgaaggccacgatgtttcgtccaaagcagctatcggtagcaagcaaccatgcatgcctggagcaggaatcacgaacctggatctcatactctcccagatgagcaggatgagaaaccagattcccagtggcggtgtaactcagccaccaataggcgccgagccaagtgatagatggctcaagcgcctgcagctcggcgtaccagaccctgacgtccttggttccaagaccaagaggccaaaagtcggagacagtcctccgccacccaggcaaataaaccggtcctttgacgtggcactcccttgcaacccaggaaaacaggaggagcagagcttgaatggaggggggaaagtgcagggaagagcccccccgattccagagaagagcgtcaatcgctggatagggagatggtgccagggcggcactcctgttttccgtgaaggcccaggccagggaaggcaggcaacgaaacctgctggccggttgtccgaggagcttgaaggacagttctttccaagcactgcggcgatggcgatgatggggcgcgcgatgcacaagctccggccgtgcgagcagcagcagaaggggccattcgtggtgtggaagatagattgacctttttgggtgtgatatacttgtttctttaaaaaaaataaaatgtaaggcaactatgcattttgcctggctgtggctcatggtttattgctttctggtagtggaagtagctaggtgtagtgcctactgattgtgtaatgctttgctgtaccaaaagtgtaatactatactgtttactgtgtcgttcgttatggtgatgtacaccatggagtaatcgaatgggacagacgaatgaactggaa

SEQ ID NO: 32571 - DNA, 1568 bp, Zea Mays
cacggctcccggcctctctgcgctgcggcgatgcggtggctacccaggctgctctctcactccatcgaggtcgggagggcctccgcggcggggaggtccaaccctagtctcgtcaaggcaggatcccatgggttcgccagcggcggctgggatgggtcaccagcggtgccccgggagtggctgcggaagctgtgggtagacgtgctgaagaagcagaaggaggacgcgaggaggtggggcatcggcgcgtcacccgggaacgccggcagcggtgcggagccttcgctatgcgcgttcgcgaattctgtggaggctgcaggagcgaccagggaggcaccttcaaggagctatcagtacgaatacaggggtctcgccggctactcagaacaagacggccatttgttgcagaaataacggatgctatgggtaacgagatatttaaggttcgtaggccattttggtggatcaacagctcaatttatgcagaagtggatggtaaggagataggcgtagtccacaggcgttggcacctttggcagagaatctatgacctgtacttagggaataggcaatttgcagttgttgagaatccaggattctggaactggacctttagcctagtggatgaagatgacaaactgttggctcagattgatcgtaattggaggggcatcggctttgagctcttcacggatgctggccagtatgctatccggtttggtgatgatgtacaaagcgacaagtttgctcacttaccgtttattatatctgggtatgtgggtgcccacttttcccagttagttaatgtctcacaaaagctccagaccaaagaattgcatgttgttcgccagctgactttgcctgaaagggtagtggctcttgctctcgccatttccttggacagtgattacttctctagaagaggtggctgaggacttccgtttctgattgccacggagtaggcacacgaaccaccatctgccgtatacaaggaatttctttattctcgttcctgaagaggctagcagttacactcattactgttgtcaggtgatcggcatcatcgccagaggcagaaactgtttctgccgttctgcgtgcttttgactcattactgctgtcaggagatttccgaagccttcctttcccctttgtttctgctatggagatgcacacatgcgtggcttgtttggatggctatggtcatatattcctctcactccagatgtgttgaaatagtttggtgttagatacaggctaaactatttcatgacacatggattaaaagatacatggacatccaaacgataccgcatttaagttctagtacactggagcctgatgtttacagtgcaactcgtctgctaggctacttggatgtgaatgtatattgtttaggaattagatccattcggttagcctggctagacagttagacctaaaagggccatttctggtactcgttccgacgggaacaaaacgaggcctgatgtagctgtcagctgtgagtactgaattgatagttccaaacgattctgggtcagacaattcagaacagtggaagccac

SEQ ID NO: 32572 - DNA, 1233 bp, Zea Mays
gccgtcgccaacctgcagctccatcccggtgcttgcccagacgggtcgccccgtaaggagagaacgtgaccaggcaggagacgacgcttcatgtatccatctccgcctcaatcgaccgtgccaattaacaggctcccaaggaggagatccaatcctgcgggcgggtgtcccgtcgcccatccatcgatccgaatctgcatgtgaccagtctcatcgggctcttctcttttttaggaatgactcatgggtttctcaccatcccttccacttggggatttcaatcgaatggtgaaatggagttaccaatcaacaactagctgaatcagctcccggcctacccgggcttatctccaccggtgcaggtaagcattgctgctggcactcgagcaagacgacgccgactatgacctttgtccccatgagtcaacaggttggtgaacaccaccgctgggagcacctcgccaggaaccctttcctcacgctcttcggtaattaagttcatccatgatccgatccacatcaagcgtggcaatcaatcatctagtagtgtttttctttggagacaactcggtctattgtccctgcaaagaatgagaagaaagaatcctcaaacactggcaagcgagaaactaggaaatctataaaaaggactggtgaggatccagttggagtgagggatctgcttgtcaggtcatgaggaacatgcttgcaaatgagggtgtccgttcattctacaagggtttgtccgctggtttgctaaggcaagcaacgcacatagactgctcatcttggatccttcagctatggaatgtttgccaccagagggtgtgatagatttgtgaatgtgtgggatgacattaacaagagaatactatatcagtactcaaaagtgcgcatcaagcattgttgcactgtcattcggtaaggatggccatctgcttgctgtggcatccaactacacttatgaagagtgagaaaaaacgcactttgtctgacaaatctctgtttacgcaatattaaccgctcatgattctcctcacacttgtcctctttgtcgtcttgagttttatttgctgtgacttagcaaaagtgaattccactgatgggactaacgatacctcaatatgttttgtcaataccttaaggagtctattgtcctatttttctttcaaggttcgttgtagacttaaggtacacattatgaatcgtgcgttgccttcttttgagttgtta

SEQ ID NO: 32573 - DNA, 2882 bp, Zea Mays
ctccaagtcacgcccctcccacctcgccggcgcgcccgcctcagccgccatgagcgcgctccaggcctccctcctcctccgcccgctcccctcgccactgcccccgcgccgccggcagccgctcccctctgccttcgcctctttgccccgcggtgccaacgcgccccgccgtgccccgctccgcctccgcgcattggaccccatcgcgccgcagcccgacgcctccgagccgcccgcggctgcatcctcgtccgcggcggaggcggaggagtcggagagcacgacgatgacggagtcgacggcacagcccgccacgatgagcgggaaggaggagctggaggacctggtgggcaaggctagggcctgggccgtggcggtcgcggccgcggtggtggccgcggtcaggaggttcgtcgactgggtgctgtcgaggaactggatgagctggtggcccttctggagatccgaccaccgactgcaggggctgatcgaagaggcggacgccaaccccaacgacgctgccaagcagagcgcgctcctccacgagctcaacaagttcagccctgaagaggttattaaaaggtttgagcagcgaagccatgctgtggatagcaagggggctgcagagtacctgcgggcacttattctcactaacactatagcagattaccttccagatgaacaatctgggagatctgcaagtctgccagccctgttgcaagagttgaaacaacgtgtatctgggaatgaggataaacctttcatgaaccctgggatatcagaaaagcaacctttacatgttgtaatggttgaccccaaatctacaggtagatctacacgctttgctcaagaaattgtctcgacgatgttgtttacaattgctgtcggcgtaatgtgggtgatgggtgctgctgcacttcaaaagtatattgggagcttaggtggaattggggcatctggtgttggttctagctcatcatattctccaaaagagatgaataaggatatcatgccagagaagaatgtcaagacatttaaagatgtcaaaggttgtgatgatgcaaaaaaggaacttgaggaggtagttgagtatctcaagaacccttcaaagttcactcgccttggtggaaagctacctaagggcatacttttgactggtgctccaggaactgggaagacactactagcaaaggccattgctggagaagctggtgtaccattcttttaccgagcaggctctgaatttgaggaaatgtttgttggtgttggtgctcggagagtgaggtcattgtttcaagctgcaaagaagaaggcgccatgcattgtcttcattgatgaaatagatgctgtgggttcaactagaaaacagtgggaagggcacacaaagaagacgttgcatcaacttcttgttgagatggacgggtttgaacaaaatgagggaataattgtgatggctgcaacaaacttggcagacattcttgatcctgcactcacaagacctggtagatttgatagattgtcgtcccaagtccagatgtgcggggtcgccaagagattctggagctctatttgcaagataagccagtggcaaatgatgtagatatcaatgcaattgcccgtagtacacctggctttaatggggctgacctagccaaccttgtaaacattgcagcgataaaggctgcagttgaaggtgcggacaagttgaatgctgttcagttggagtttgccaaagatcgtattatcatgggaactgagaggagatcaatgttcatatcagatgaatcgagaaagcttactgcgtaccatgaaagtggacatgctattgttgcgctcaacacccagggtgctcaccccatacacaaagcaactatccttcctcgtgggtctgcccttggaatggtcacacaactcccctcacaggatgagacttctattagcaagaaacaactccttgcacgtcttgatgtttgcatgggtgggagggttgctgaagagctgatatttggggaagacaatgttacaactggggcgagaaatgaccttcacactgcaacagagcttgcccagtacatggtatcaaactgtgggatgagtgatgctatcggtcctgtgcatgtgaaagagcgaccaagtgtagagatgcaatcaaggatagatgctgaggtggtgaagctcctaagagaagcttatgggcgggtcaaacgattgcttaaaaagcatgagaagcaattacatgctttggcaaatgcgctgctggagcgtgaaacacttactgcagatgagatcaacaaagtagttcacccttaccaagaagaaccccagttttccttccaagacgaggagtttgccctcacttaaaagattcctttgttgcatccagattttacctactgtgaattgtaaatccgtgtacagtaagtggcatctagatgagccatcgaagtttgttcacatgcccccttctgcaaaatagggcgcaacacaccttcggtacatttttcaccttggcaccatttccatttgaggagcagccagtaaatcagaaaatgagaagattggtgttggaaaagccgatgcctgcttattgataattcttgggatggaagaccgccatggtggccggcaaggctctgggttgcaaaaccctccatacttttggttttagctaggatagatataggtgcaacattgcatgctctgaatgctaggtttctggctagggtaacatgtttaccatgttctttttacttctttattacatttgctgtaaggaaatcgtacatatggcggtagtttttttttcaaacaagcactgtttgttttttgtcaaacaatatacgttcaatgtatttgtattgctaacatgcacttgatgcctt

SEQ ID NO: 32574 - DNA, 819 bp, Zea Mays
gcgggggcggagtgtgctgtggagcggcccgcgtgcggcgagggtcgtccctacaagccgtctgacagttcataagaggtacccttttgggaaggtcctcaccatggatctatcccaggcactgacctcatccagtgatgatgaaaccagggcacttggtacattgcttgatatgttcagcagttccttttcacttgatgatatagctgatgcatatatcaaagcaaatggcgatgttaacaaagctggagatttcttatacgaccttcaacattcattgcctcataccaaagatgttgagtcaagtgtcgaggctaacctttcccatactgacaaggcagttgaagaaaactgtatggacaattcaagccaaccaagaactcttctccgtactgagcaggcagttgaagaaaatcatttcgagaattcagatcacacaaaaatgcctgaaaatctgcataagtctagtgctgcatttggtactgtctccagcatgttaagaaaagagtctatcagggctacaacaacagcgagtagagcatcaaaaaaaggcaaacctcttagggttgaactgccagagtacatgcgggatgattttaaggtgacatctgatgaatctgactctgcaccgaggagagagactttgaataacagggatgttgaggagtttctgttttgcatgcttggtgaaggatttaagctcagtaaagaattgatccatgaagttctaggcagctgtggatatgatattaagaaggctgctgatgctttcagggagggtaaccagaaagaagtcgattatcttatacaggaagcaag

SEQ ID NO: 32575 - DNA, 4647 bp, Zea Mays
cgctgccgtcgtcgcgccggcctcgatacgttcccgggaagtcggaggcgccgcgctcgtcacgccgccggctccgacgagatggaggatggcgtatctacttatactgtggatgaggcacttgtgtccatggggtttgggaaattccatgcattcgtgcttgcatactctgggatggctaaaatctctgaagcaatggagatgatgcttttgtcatttgttgggcaatcagttcaagctgagtgggggctttctgcacatgaagaaagcctcataacaagtgttgtctttgtggggatgcttgtaggagcatatgcttggggcatagtttcagataactatggaagaagggttgggttcaacttcacagctattgttactggaggagctggccttcttagcgcttttgctccaaattacttatctttgattgtactgagatttatggtcggtgttggactgggtggtgggccagttttaggttcttggttcctagagttcatccctgctcctaaccgaggaacatggatggttatgttctcagcattttggactgttggcacaataatggaagcttctcttgcttgggccgttatgccagcttttggctggaggtggctgctggcactctcatcattgccatcgtttgccctgctactcttctacccagtgacacttgagtcaccaagatacctatgcatgaagggtagaatagctgaagcagttcatgttctggaaacaatgtcacgcgtgaactgtgtttctctcccctctggccgacttgtctctggccatcgggtggaacttcatgatatcggggattcttcagaaacggcacagttggtgacatctaataagaataacactgctgatcgtggtagcaaatccgagattggaggcctcagtgccatcttaaagcttctatctccaaacttaatcagatcgactcttctactctggactgtctttcttggtcatgcctttctgtactatggtcttgttctactcacatcagaactaaatcatggaaataggatctgtggatcagaagagggggcagaagtgacaacaacagcccacatacatgatgagaatctctacagaaatgtatttataacaagctttggagaggtccctggtcttctcctgtcggctgccattgttgacatgatcgggcgcaagctctcgatgtcttccatgctttacatcagttgcctgtgcatatctccgcttatgttcgcccagacggaatcgctgacgaccatctttttgttctgtgcccgggtttgcatctctgcaagcttcactgttctgcacatctacgcccctgagatatacccaactgctgttagggccacgggtgtcgggtttgcaagctcgattgctcgctttggtggaatcctgtgccctctcgtggccgtcggcctggtgcacgcgtgccaccagatggcagctatcctgatattcatcacggtgatgctggcttcaggcatcgccgtgtcatacttccccctggaaacaagcggccgaaagctgagcgaccacgtcgccgccgcgtaagagctgattaattgaagaactgactttttgagagggatacaccaatacagaatcaaggcccaaggggccattattttttttgttcagttgttgacaaaggatacagtgggaaagaaagtgcaaaggaggcactagattgttacgttattatactgttgcttctcaatagaaatctacagatcactatatgatttttgttctcttgtcaatatggtattagtatgaattctaaacgccctcaaaattcattttttgtttcaaaagtgaaacgtctttttatatatgaattgggaaactaaaaaatgaaattccgttgccgggactcgaacccgggtctttcgggtgagagccgaatatcctgaccagctagactacaacggattctgtttatgttgtgcatagtaatttataagattacgtagagctattcacagtaatggcttagcgacattctcgctgctgcaatggcgacggtctcgttccatcactgtcccccgtcattctcgctgctccaatggcgacggtctcgttccatcccccgtctcttcctcctccgtctcctaattttggaaaggccatagtttcccatcgcgagacctgtatccccatggatccatgagagaaaggcggaggagatcaggcgacgtacgcgcgtgggggtctcctcctgcacgctctcagctgaaccgccccgtgctcccctgggcgcgccgcgcgcaatggcccgacgacggcgccccctaccgccgccgctgctcgtctggttggccgtcctcttctctgcggtggcgcccgctgtcgccaagaccgacaagtctgacgttgctgcgctcaatgtgatgttcaatagcatgaacaagccatcgcaattgtccggttggaaatcgagcggcggtgatccctgcgatgacgatgacgagtggaaagggatagagtgcagcggctcatctgtcacagaaattaacttgtcagggcttgaactcagtggctcgctaggatatcagctatcaagcttgaaatcagtaaccaaatttacagtgatctcagcaataacaatctcaacggcgatcttccatatcagcttccaccaaacgtggttgaattaaatctttacggaaactctttaactggaggagttccttattcgatatctcagatgggtgatctggaaacactaaatttgggcaagaaccacctaagcgggcagttgacggatatgttttcagaacttccaaagctctcaacattggatctctccttcaaccgcttctcaggcagcctgcccaagagttttcagcacctaaaagacctcaagacgctgaatgtggagagcaaccaattcagtggtcatatagatgttctagcgaaacttcctctcgaggatctgaatctgcagaacaacaagtttactgggtggatccctagtaaactaaaagacatcagcaatctacagattggagggaaccagtggtcgtccggatcagctcctcctggtatggagaagggctctgcactggagggctcttcaggcggaggtggtcgaagtggagtaaacggtatcgccatcgcagctgtggtgatagcggtgcttgttgcagctctgattctcttgtctgtgttgaagaggaaccgttcttcttcctcgtctcattacctcatggatgagtcagcgatcaacatgaagccactggagcattcatcgtcaattagcagtacgacaccgtctgcaatgcctatcaagccgattagtgacaacgagttcgagaacaaactaaactattcgaggcggagcacagatccagtcaaccttgttgcttattcatcatcagacctccaagcagccactggaagcttccatagtagcaggttactaggtcaggggacaatcggtggtgtttacaaggcaaaatatgctgatggaacggtgctggccgttaagaagtttgatccattgagcttctcgggaagcagcgacttcatggatcttgtgaacagcatttccaagctgcatcatccaaacatctccgtgcttgttggttactgctcagagcctgggcactacatgttggtctatgactacaacatgaatggatccctctatgactttctgcacttgtccgacgactacagcaagccgctgacctgggacacccgcgtaaggattgctgttggtacagcttgtgctctggagtacctacatgacgcgtgttcacctccagtgatccacaagaacatcaaggcatccaacgtcttgctcgatgctgacctcaaccctcacctcactgactgcggccttgcatacttctatgaggatccgagtcagagcctgggaccagggtacgatcctccagagtgcacaaggccatcaggttacgttatgaagagcgatgtctactgctttggtgtcgtcatgcttcagctgttgaccggccggaagccctacgacagctcgaagcctagagcggagcagtccttggtcaagtttgtcggtccacagcttcatgacaccaacgccttggaagctctggcggatccaggccttcgtggcctatatccaccgaaagcattgtcccgtttcgccgatgtcctctcccgctgcgtccagtcggatccagaactccggccatccatgtcagaggtggtgcagttgcttctccagtgcgtccagcgcacaaccagcaacaggaggctgggtggccaccgcaccgtctcgcagcgaagcgacgattctgattggtgatgctctgtttctgcctccatcctgctgctgcggcccagttgctgaaactgtctcagaacagaaccgtaggtgtgcggcccttggcatgccgctgtacaaaagaaaatgctttattagacaatctggttgctcgaacagtgtggcaacaaataagtcggttgatttaggtaaaggtaaaagcagattgggtgttctagtgagtagtgacattgtatttgtactcataaacttaaaaacatatgaccagctaatttttaaaaatatataaaccatcttagaacaactccagcagggcctctcagatccctattctacttttgagaatgcaagagccaaaaaaaaaaaaa

SEQ ID NO: 32576 - DNA, 3576 bp, Zea Mays
gagtaaccaaaccaagcaccacgcgcggccatggccttccccgccgacgcgctggttctagagatcaccgacacatcatcctccgccaccgccgccgccgcccgtgctccatcctcaccttctcccccgccgctgtccatctccgacctcgcgctaatcgagagctcctcctacttccgcgcgctcctcggcggcagcttcagtgaatccggcagagagcatgtgcgtgtgggctgcaatttggaggctgctgtgcaagtgctgcgctacctttttgagccttccgagagctttaacatcacgcacaacaatttcctccccctgttggagggagctttgtttcttgctgttgagagccttctagtggagtgtcaaagatggttcggcaccatagcctctcaaacttctgccatgtcagttccattagatttcataattgaagtctggtactttgctgaagagcatggtgttacttttgttcaagacatttgccaaaaatttctagctcagaattttgcacatgctatctcaggaaggtcatttaataaaataccttatgatttgctatgttcagcgatcaaatgtccacatctgacagtggatagtgaaaaacaattgtgtgaagcaattttgtattgggtttcagaaaatatgaaagcctgtgaacaatcaaaccccaactcagtagatggccacctcttcattcttagcaaggtgaagatatgccttttaccattaggatttgcggcagggacaatgaggcattggtttgactttggaaacaagatcatatgcactattcttgatcttctcaaagacagtttgaaaactttattggatgctgttgatgatggtaacttggatcgatattgcattcgaataacagaatattcaaagaacatagtgctttcaggatgtccccaagtaactacagcattcttgtacatatctgttctccctaatgatctgagtgtttcattgaagagaaggatagtgagttcatacacccaggttgatcatcaaaccttcgttctttatgaggaattagagaaggctactaaaaccttatcatttaagaatgtacacatggtggatatttcaaaatgtccaaacgttcattttggcgcagcaattgactggttgaagttgggttttccagaattaagggtattcagggtttcacattgtttatcatttcaatttgatgatttactatatctgttaatgagatgtccatggattgatgaaattgatatgactattgatacaagcactgtaacacccagacattcagtaatctcgtctagttctgaagtcctaagcaaggcaaaaccaaatcagaaaagatatggcatacattgttcagcatatgacaggcaaccaaattcggttttcttaaatatatcaagattgacattggaaggcagaaatgatattgatgatatggacttgttggagatatctgtcctgaaaaattctctgtgctatataaacattagaaactgcttcctgttgacggatgatggtatttctaaccttctgatgaagtgtacaaagatccattcgatggttctttcttatacttcttttggaaatcgatcaattcaaatgctatgcgctgccaatccttctggccacaacagtggacatgctcatgttatggcatcttatatgcaagaattacatctggatggctgcaaaggtaaaaacaattccctttgtcccatgccccagatccttccatgaccgagcactgatatcttattttaatgatatcagaaatacggtgttctgatgttttatgtctgtcttccactacttagtcatgctggctaacattacatatatgtcaatgtgtaggtattgactctgttgctttgtcgcagctagtgagcattataagtatcacaaagtttttgagcttaagggaaacatcacttacagatggtgcactctgcaagtttgttggctctagtctggagtatcttgacgtttcagagactgtgatttctatggtatcattagcaccagttattcaaagaaactgtaaattgaactgtctgaaaacagctggatgctgtagtcttctgttgcaatgtgctaatgtagaacatatcaatggtaacaagtatggagattttctacaggagttaggaactacctactgtctggaggatgttgaaatgggctggggattttgccctattcgaatcgaagaccttgttccttcttttagtaaagtaaggaagatgaaaattggtctcggcacatcattagcggagaatgttctgtgtgctcttcctatgatttgcccattcctcgagtctttgattctaaggtttcaggtgatatctgacagagttgttagacgtctattggaatcagcaacaaatcttcaggtgctttgcctgcactattgtcttggaagtttaacttcatttagtttccaaacaaaggcacctgcattaagagtattgcggcttcattgggtaacttcatggcttacaaatgatgacttgacaatccttacagagaattgcaatttggctgaactttcactttctggttgcaaacttcttgactccagctctcaagacattatctcatctgggtggccaaacttggcacttttacaccttgaggaatgtggtaaagtaactgttgaaggggtttcttcttttttcaactgtaaggctttggaagacgtcctactacggcacacggtgagtatgaaaaatatcgtagcaggttcttggtatatagttctggtgaatcttaaaacacaacgtagaaccatactaaatgacgtgacatggctacagctgaaacaaaatttcaccatgctgttgcaaaattgcagtccatctgtgcatgtcatttccaggacttctaccggtgtaacttttctccgttgaaaaagttgaattgttgattcacttgattggttatatagtttctgagagttgggaaccgcagggtaggggcatcggaaggagcatcatagacgatgctatcagagagttaccactactgcggaagctggctttggatctttgcgatgcctgtgaagacggttacgatagcccaaacgatgcggaagggaagatgattagaagtgtaaggatgagtcgatgcaagaagatggcggggtcgtgtttggaggtccccagacaagggtcttcaacttcaaggccggtgcacaaggacactgtagtgctggaatggagcagcagaatgttcacaaccaccatagtgaaagaaagagtgtgatgagcctcttctgtagttttgtccctgatgaagaacacaagagcaggccacaatatatatgacttgtatgaatggtctccccgcttctgattttgaatgctttgtatgtggacatatcctcgtgtgtgaatgtatttgtatggtatcaaacgaagatcatcttttgcagtcgtactgtacccatgcactcttatgttgatccacgaacaaagtttggaatttttaggtgaccgtgttcatgtttgaaaattattgttgtactagtccttggtaaaataaaggaggcaaggcaggagccaaaaaaaa

SEQ ID NO: 32577 - DNA, 3789 bp, Zea Mays
tcttatttcgattaaagtgtagccaaagaaaggcaggcctgatgcagtgatgagagctgtcacactaagtcaccaggaacttcgacagtcccttcatgggaacaagcttaaggaattgaggaatgcatcagtgcagcctgaattgatccctgagtggaacagatggaaacaagaattgataaaacagtacttttcattgcatcctgctggtaatgttggaaactttgagaaaaacaattgttatgatgatccagctttagatcaacaaggtagtagaaaacgtccaaaacttgaggtccgaagaggagagatacaaatttcacacatgggtgaggctgactacaggactccaaccgaagacccaaaccaaaataaccttcctggtaactctgtcatgcatgaaaatgtaggggcattaggatcaacagatcaaaataattctgtcacgttgcctggaagttttggcaccaacgaaaacacaatatccagtagtgccaatgcagctttacagaatgctagacttgatttagattcattcaagagttctcggcagtgttctgcacacattgaagcaaaggggaggcaatgtggtaggtgggcaaatgatggtgatatttactgttgtgtgcatcaaagtatgcattttcttgaccattcttcaagggaggacaaggcacttaccattgaagctccgttgtgcagtggtatgactaacatgggtagaaaatgcaagcatcgagctcagtatggttctactttttgtaaaaagcaccggctacagacaaacttggatgcaatgcacccagaaaatttgttggatccatctgaggtactccatatgggtgaagaacctccgaataagtgggtggaagaaatttctaagtcgcaagcaatgtatagcatagacttggaaacagacaagaaagtccaggatgctgtaaaagtgaaattgatgacaattgtgtctatagagaactctggtgaaaaaggcgcaatggagaaagctgatatgtgtgtggcatcaacttctataacaaatactgatgatacttctctttgtattggaattcactctcatgatagtattgttgaatgccaggattatgccatgcaacatactctttattgtgagaagcaccttccaaggttccttaaacgtgccaggaatggtaagagtcgactcgtttctaaagatatcttcgtcaatctactgaagggatgcacatcaagaaaagataagatatgtctgcaccaagcatgtgaatttctttattggttcttgagaaacaacctttctcatcaacacactagtcttgctagtgaacatatgccccagatattggctgaagtgtctaaaaatccagatgttggagagtttttgttaaagttgatatctactgagagagagaaactagcaaatatctggggctttgatacaaatagatctaagcaaatatattctgaaaacaaagaagggtctctagtgttgcataaagagggaactaatctttcatctggtccgaagtgcaaaatctgtgctcaccagttctctgatgatgaagctcttggattacattggacaactgtccacaaaaaggaagcccggtggctgtttagagaagggacaaatggtctgtccctttatgatagccacaacattgaggatgccaatggctctcagaagttcatctgcagattatgtgggctcaaatttgatcttcagccagatcttggccgccaccataaagtcgctcatatggactcagatgttgttggccacagctcactgggccgtgggaagtatcagcttaaccgtggccgacactactattccgctttcaagaaaagtttacgaccaacaagtacattaaagaagaggagtagctctggaatcgagaaaaactttaagtttcagagttctgccctaacatctcaaataattcaatctgaaacatccagctttggtaagttacaggattttcagtgctcagatgttgcgcaaacattattttccaagattcaaaagacaagaccccatccaagcaaccttgatattttatcggttgcccgcactgtatgctgcaagacaagtcttgctgctgcattggaagttaaatatggatctttacctgagaacatatttgtgaaagctgcaaagctatgcagtgacaatggcatccaaattgattggcatcaagaggtatttatatgccctaaaggttgcaaatctagatataattcaaatgctctgcttcctatgcaactcacggcagttgattttcctgaagctccttctgttgatcctcttaatgatgatgaaatgtgggcaatggaagaataccattatgttcttgattcaaagcactttggatggaagcctaaaaatgagagtgtcgttctctatgaagacataagctttggcagggagaaagttccaattgtctgtgtcattgatatggacgcaaaagattctttaggcatgaagcctgaagaacttttgtcacatggcagttctgtgccttggcaaggtttccactatatcacaaagcgtttgatggattcatctcttattaattcagagaactctatgcctgggtgcgcatgttctcatcctgaatgttctcctgagaaatgtggtcacgtgagtctcttcgatggtgtctatgctagtctggtggatatcaatggaacaccaatacatggcagatttgcatatgatgaaaatagtaaaattattttacaggaagggtatccaatatatgagtgcaattcatcatgtacttgtgactcatcctgccggaataaagtattgcagaaaggactgcttgttaagttggaactcttcagaactgagaataagggttgggctattagagctgccgaacctattccacagggtacctttgtctgcgagtatattggtgaagttgtgaaggccgacaagaccatgaaaaatgcagaaagtgtgtcatcaaagagtgggtgcaattacttgtttgacattgcttctcagattgatagggaaagacttcggactgtaggggctattgaatacttgattgatgccacaagatctggaaatgtgtcccgctatatcaatcacagttgttccccaaatctcagcacccgattggttttggtagagagcaaagattgccagcttgctcacattggcttgtttgctaatcaagacattgccgtaggagaagaacttgcctatgattaccgacaaaagcttgtagcaggcgatggctgcttctgccattgtgggggtaccaattgccgaggccgtgtctattgacttcgcaggaagacactaactgttcaacgcttggttgcagaactcgaggtttctacagctgtgtaggctgctgagcgatttagcactgcaattttccagagctcgagtgcaggactaggatcccattcttcatgctacaaatagggattgtgatataggactcacagaaatgaagtgattcaggctgctttattcgtaggcgagaattctttcagtaaaattccttcattcatattttattgctcatgggcaccatcatcgacgtcaagtaataaactgcttatcccatttttgcgtttgttcatattagacgacggcctgttgtgcaggtaatattttgtagttgtattaattgcgtgatggctatcagaatcaatgaaaagataagtcttgtttctttaatggcgtatttgtattttgcagttgtattaattgtgtgatgggtatcagaatgaatcaaaagatagtcttatttctctaaatgcgtg

SEQ ID NO: 32578 - DNA, 5395 bp, Zea Mays
atggccgccactccggaccgagccaatgccgacctccgccatggcctctccgtcgacacccccctgccgccccagattgccagagagaagcaaggccttgatactgaaatacccctttctcctcagtggcttatgaaggtgggggaaaacaaggatcctgtttcacatggtatccgctcagatgtttcaaaaacatcaggggctggtgaagaccaaggctacaatacgaagaaaaaggatgttttcagggcttcagttcttgatggtgaaactgggcgtcgtgaccgctggcgcgatgatgaaagggaaccaaattcaacccatcggtggagtcgctggagggagacagataaggaacatggcgatgcacgcaaagcggaaagatggtcagatgacacctccaagcattctgtggatggacgtcgtgttccgcaggagcgctggggcgattccaataataaggatggcagttatgaccaacgacgtgagaataagtggactgcacgttggggttccaatgataaggagtctgaaaattggcgtgataggtggggggattcaggcaaagagggtgatgcttaccgtgaaaaaggtttatctcaccatgggaaggatgccaacagttatgaaaaggatgacaatatttctcgttcatggaaacctagttattccgcaggccgtgggcgtggagatttgccaaattatacttctcagacactgccgaaatcacctgctccttctggatatggtagggggaagctagacaatgattttgcaaagtttccaaacagtcgtggaaagttcacatctggtacaagtgcaatcagtagtggatcttcacgaccattccatcttggtcttctttctgacagacctggtggtatatcagatcgttcggcattcagatacagtaggctgaaattgcttgacatataccgaaattgtgatgtcactgattttaagttatctgttgattgtttggaggaactctctgtgttcatgcaagaggatgttttagaacctttagcactatctgctcctgttgctgaagaagcgaccattttaaaagctattgacaaaggggatatcgtaaacagtggtgtccatcaggcttctaaagatggttctgttggaaaagctggtagagaagaccagccaggaggtgtggaagtctcaggtcttgctggaaatactgatttggcagcaagaggggaaccaatgcatcctgcgacatctacttatgttgttccacaaaggtcacagtttattggagaacataaacttggaccatctgaatttgggcatcaaatacctaatttcttaaatcaagaatcaaaaactgttggcatgttgggttttgataactttgccagtccagtgcattctcatcctaatccagaaaacctctctctatactataaagatccacaaggtcaaattcaaggccctttttctggtgccgatattattggctggtttgagactggttattttggcattgatttgctggttcgtccagtgaatgcaccccatgatgttcctttcttaatgcttggggatgttatgcctcacctgcgagcaaaggtaaggcccccaccaggatttgccacttcaaagccaagtgatatgctagctccagagaccctacctacagggaagtttgtcagctctagcatgcaagcaggatcaactggcattggaatatttgacagtgggccaatcaggaaagataatgctgttgaggctcaaaatcgtttcctggagtcacttatgtccaatagtgcgcggaatccttcggcaggcactatctctataactggaggtatgaatgaacttgttagtactagctttggcaacatttctgtgcgcggaggtgagagcggggtcaatctgaactatcttttggcacagaaaggactgttggagagacaaaactctttgcaaaaccctgtttcatattggacaggagatgctccagcatcaaaagtacatcccatggctgatacatctcgccaatctttgcaatctcaaaatgttgatttactagccatgctgcaaccaaaggagaagcctcaagttcctactggtaattcgggtctgccactatgctccaattaccctgaagcaagtatcgttaatcccaacttgcatagtggagatcttgctcaaggggctcttaatatgcgtcaagatatgcagaactcccagaacattggtattggagttcaacaacacaacttaatgccacaaaaccgaccagctttggctcagttgccatctgagaagcttgctgagatgtctcaagatccacaactgttaaatatgattcgtcaagatctgcagaactcccagaacattggtattggatttcaacaacacaacttaatgccacaaaaccgaccagctttggctcagttgccacctgagaagcttgccgagatatctcaagatccacaaatgttaaatatgcttcagcagcaatatcttttgtcacaactacagttgcagtctcagacaccttttacacctcagcctccactctctatgttggacaagatgttattgctcaagcagcagcagcagcagcagcaactgcagcagcagcaacaacaactgcaacagcaactggagcagcaacaaaagctattgttgcagcagcaactgctctctcagatggtgcctcacgcgcatcctaatcaacacactgatgattcttatgcattgaagtatacttctgtgccatctgatgattctaccagtcttggttttagaagaatgcaagaggctattgaagtagatcagaaattttctgtccatggtatgcaagtgggtcaacaacctagtcagtcaattatgaattttagaaatatggatggtatagctttattgcaaaatcctgtaactgcactgccggtgccccatgaaactgctgtgggtgcacttccaaaagaggaccactctcgtcctggaatgtcggaagattttgcaaatgtcgacttacaattgaaatcaactatggtacactcaaagctggtggaagttgcagataggaacgagggttttaaatctcacgaagtggacactgcagcagaaaaaaataaaatgtctgaaaaggagttgaattctggatctactataatcatggggagtgcttctgatgaagctaagaatttgcatgaaccaccactagatccaaagtcagaaaatttatcttctgatatttctggtcaggttcaagagtcaaacctgtctgcagaagatacgcctcctggcatcacagcagctgtggcaactgaagtaaaagttactgatacacaggagaccaaaaaagcagaaaagaaaaggaagcaaaagaaaaaacaggctgctgcagatgctggcaaaggaacatcaaaggcggttgtagcccagcagcaaaggcaggaaactgaggttgacaattctgatattggtggtaataagcatgatttaacagatgatacagaggaactattttggggttcacctatcagagtgcaaaatgagattttaccctccaaaagttttccagaggaacatgacgctgacaaagctgaatcgcagtttagttctctatcatctgatcctcatagcatggcaagccagcgtgcatggaaacaacctactcaaggtctcaggcctaagtcactgctagaaatccaagctgaggaacaactgcgtgcacagaaaggattaactactgaaactgctaagccagcagcttcagttccttcaatttcttggagtggcatgtcaatatcttccgagcaacattatgggggttcaaatatatcattgggaagtatggaaagtgctgttgagagaaataaaagaagccagttgcatgatttgctggcagaagaagttctggcgaggtcaagcattgcagataatgagaataatgccaacgatgcatttttctctcctctgtcgcctgctgctgttcaggctgatgctcctgcccttgatgataatgacttcattgaggccaaggacaaaaagaacaaaaagaggtcagcaaaaacaaaagcttctactgtgaaggctccatcacctgttgtttcctttgatccaccagctatttcgatgccttctgaaaagggaaagtctgccaagcaagcacaacaggagttagaaatattgccagctccaccaagtggtccatcgtttggagattttgttctttggaagagtgatcagactagctctgtgcctgctccagcatggtctaatgactcagcaaaggtgcagaaacctttgtctttgagagatattcagagagaacaagaaaggagaaccgcatctatccagcaacaagcaccctcaccaactccagcaaaggtggccccgaaccaaagaagtcatgtgaatgcttcttcctggcaagcttctggaccacctccatcacaggcagttgcccctgtccaaatgagttccaatgctcccagtcattccaggtcaagtgctgaagatgatttgttttggggcccttctgagcactccaaacaagatacaaagcagtctgagtttccaagtctgttgagccaaagcagaagttccatgatgaaggatcattctgcactgaatcgtcaaaagtctcaggcaggcagattgccagttccttctgctgctactgcaaaccaatctggcaaagggaaagcagaggctacaaacaagcagactgaggcaatggacttcagagattggttggatagtgaatgggccaagcttactggaacaaatgatgtaagcttccttgagttctgcataaagcaatcaactaccgaagcggaaatactcctccatgagaacattggttcccttgaccgcaaccacgagttcatcgacaagttcctcaactacaaggccttcctgtcagcagatgtgatccacatggccttccaagctcccagcagccgtggtgacggtgcagggtgggcaaaccctgctgctgcagctagaggaggcacggtcatagacgcggagctggatggcggcgggaagaaaaaggggaagaaggggaagaaggtgagtgccgcagtgttggggttcaacgtggcgagcaaccgtataatgatgggcgagatccagaacgtggattaggaggatggcggcacaccaacaccaccgtgtatataacatagtttggcctttggttacatgccaccgaagtctcagggctcgagggaagctgggggtgctcggaatggcggtctggtctacctgtttttgccgagggtgggaaactgagcttagatacagggtcatgtgctggtgattttgggttcctgtaacaattggttaggatcctgtaacggacagaaatattttcttcaatagaaactcaccagatggattcagttcagtaaaaaaataa

SEQ ID NO: 32579 - DNA, 246 bp, Zea Mays
acctgttggaggggaggatggattgccaggtgccagcgagggatgacgccgtcaggggagacacctagccgcgaccggaacagcggaccacactgacgtcagacttcgcaccagcgacgacgtttgacgagagggagagacctagcatcgccacctaggatgagttttaggaggaaggagatgaaactccaaggacggcgcgacacgctacacaggggatggctggtgggcggcggcgtttgacgg

SEQ ID NO: 32580 - DNA, 2073 bp, Zea Mays
cgaaaggttatcccacctcttttctattcttttttccgcccgaagacaacgtaacaaaccaacgataatcctccctcttgctacaaaaaaggaaaaaaaaacatcaataataatccactgcggtcgctcgtcctcctcccaacctcctcccaagttgcctcgtgctctgcttcttcggttttcaggagcgtcggccattgctgctggaaaagcagaccattgggactccctcgtgcgttttccaaatcaggttgatggcgatggagggaccagttttatgccgccctgcaatgcaagccaaatcgcctgctgctgcgctggtcaacaactccctgaccagattcgggcagcttgggaccatttcaaaatacaggaacgtttcaagattcatttctcccatctctcagccatctacgaagaacataggtccatgctgtagcttcagctcgtcttctgatggcaatggatacatggctggaaactttagcgacagtgatgaagattatgttaattctactgtgctagaagcagttgaggtgagaagtggatcggaaggatatgtgataaagatgcgagatgggaaaaacttgcgttgtgtccataacaattctcaagggagaaatattccagagagtgcaccccaacctgctattgttttgaggattgaagatggaagcgaaactttacttccaatcattgttttggagatgccaagtgtacttctgatggcggctattcgtaatgtccacattgcacgaccaaccatatatcaagttgtcaaggaaatgattgataaaatgggctatgaggtaaaacttgttcgggtaaacaaaagaattcaagaagcgtactgtgctgaactttgtctaacaaagattgatgattctacagacagcatcaccttcgatcttcggccttcagatgccataaacattgctgttcgttgcaaggttcctgtacaagtccatagaagtcttgcatacagtgacggcatcagaccagtcgagccagcaagaatggcagtagcagctggcctatcagatgggttgttatttacagagcttgacaggtattctagaaggcgaataagaattttacagtagctgtaggatttgtttttaatattttcgtgatctgcccccaactttgcttgtggtctaagaagctttgttgttgttgattatctgccctgcaacttattgcttctaccgtgttatttctgagggcatggagggactgatgaatcgatatgtttcttagacctttcactgatatatccaacaaactggtttcgtacattcgagtatattctgtgcatttaagatccagaactccaatatatgaatctgtatgttaatttttgttacacttgcatttttgttagacccgatggacaggcatctgttgaggctcaagagtttggattggtgaagaacatgctcattgcagccgtagaagagagatacaaggatgctggtaatgatccattcttcttgtggattcattcaattcatctaggactccagattgagcatctggcaatgactccacccagtgttgtattaccaaaaccgtccgaatgctgaacaaaaatcacctctcttttactttgcaaccatgttctgcaaagaacaaaacaagattaatgtgcatcaccttgcgtgatacgcattgatcttcaatataattatgattagatgaaacctagatgtggtagttctattgaaggttgattgatttatctgttggcttcgacagcatcatggaaggacaaactgatgcggctgaggtctaagcggaagaactgggcctgacagcgttgcatgtctggatggtgtaaataaagatgatgcccagctgaattccagtacgcattccagataattgatgctgggttatggctatgtaactagctgtacatattgtatggacccgaggatggtcttctgtaaattcagactaagctttgaagtgaaacactaatccttcggagaaacttggtaccttgtccgtgttcacttgtggtatataatgttggaaattaacagggttaagattaatttgataatgcag

SEQ ID NO: 32581 - DNA, 332 bp, Zea Mays
ctgagttggttaggtggtccgagtagcactactcaggtcctgagtttgattcctcgtgggagcgaattttggttgtagttaaaaaaatctccttatctatcacacgctaaagcacgggtctaaggctcggtgtcggtcgcagtcgtttctcacatagctacagtgccgctgtgtatgggtggagtaggagttcggggagttttctcgacctacgtgagaaggtcttcttcttaatataatgctcgggactgtcttacccccatgtcgagttttttcctatcccacctcctatctcactccctattttcaaactttactatgtaaacagtgtt

SEQ ID NO: 32582 - DNA, 2283 bp, Zea Mays
cactgagcaaagcggaaaaaagcgaggaaaaatatcctgctcggctgctccaacgaagcaccggaggccgcaacagagaagagcggacgccaccgccgccaatcaatagattaggcgcggataatggtgctggccggaccgcgacgggcggaggagggcgccgcggcccccgcgcgccgccgctgacagagtatacctgcttaaccagccgtctgcaggcacggcgcacgcgcggtggtacctcgcgaggggctcgggttgactgggcgctactcgcggccgcggggatggaggaggaggcgtctgcagatccaccgaccgcttcgtccttcgcctgcgtctctggttccgggcgctgctgaatccgacgcttcggttcgcgtccccagtccccttggcggaggcgtggatcgtgtgtttggggggtctgggtatggtgggcggaggcgagggggatcgcgtgggcggcggcggcggcgagatcgacatcatcctggctgaggttgatctgccggtctccaagtgcttcaagatgctcaagtacattgccaggaacaaggacctgcgccacatccccatcatcatgatgtccaacagagacgaggtgtctgttgttgtcaagtgcttgaggcttggtgcggccgagtacctggtgaagccgctgcgcacgaatgagctgctgaacctttggacccatgtgtggcggcggagacggatggtaaagggcactatgctgattcacctcaacctctgcgttagagaagcatgctcagctgagatgcttgtaggagttgctgtacctgcatgaattattctttaaatcgagtgctggtgttggcagcttggtttgcccgagaaaaacttcttcaatgacaacttcgagttggtgctctcagaacctagtgatgcaaataccaatagcgccaccctcctctcagatgagacagacgacaggcctaaagaaaacacaaatcaagaaacgggcacctcaaatcagcttgaatacgagtctaatccttccgttgctgagcgcgaccagagagacaagatcggtgctccaggctctgccctagatgccagtcaatcatcgactccgggaagaatgttttcacgtcctataaaaactaacctgaaggttgctgagtcgtctgcatttctagcatatgttaagtcaagcaccccagccaccagctcatttgatagcggactacaaagaggtgacagccggttagattctttggataaccatggtaattgctctagtgcaacagatagaagtgacaccggtgctgatgtaaatattcggaataaagaagcttttgagatgcctgtgcagtatcctatggtatgcttttcttcctctagcatgcatatggagcgaagcaatgaaggccataatgacacttcaggaactccacctgcataccatttcccattttattatccagggatggtagaacacaacatggcactttcatcagtgcaaaattttcaagcaaacataaacagtgctcaagcacatacaccaccagcgatgcttcatcagtacaatgttttctcccaatgccatagtttacccatgatatcaccatttcagtttaatacttctggcatgagtatgcactcaagtcatttaccgacgcaaaatgtgtggtcatcggcatcgagcacaccaacgcctgacgaaacatgcaatcgctccgagagaagggctgcagcacttgctaaattcaggcagaaaaggaaagagcgctgttttgacaagaaggtgaggtatgtgaacaggaagaaacttgctgagacgaggctaagggtgcgaggtcaatttgttaggcatgcaagcaatatggatatcataagcaccggagatgatatatctgaagacgaagatgacgatccaacctccagggaggtagatatgatttcttctccagagtagtggagaggtcctcttgtgtgaaaaattagagtgcagatggttactgctcactttgttacaactcagtaggactagacaatacattattctactggcaacaaggcaatacaccctttttgctcacacagtataaacttttgtccccaaatatctggctgttactccggttgctttaatcgagaaatcatctttttgataaggctgttactccggttactttgatcgagaaataatctttttgataagtgtagttatagttttgctaagtttttgatgcaaagaccagtcaaatcagtttgatcttattgcagggtaatatttgcaattttgaggttaacagtgtt

SEQ ID NO: 32583 - DNA, 2269 bp, Zea Mays
ttgtacagaatctggagaattgtagagtatcaagttaattttgttctgtttaagatatgtaagaaagtacataaatgtactttagattggtgaatattttgtttatagaaggacttaaagcttcattttgttgttgattttttagattgataccattttcgttggagaatcaggttcgcaaatgcgcgactctgcactgagtttaacaaaatgcttagcacaaacagcacaaaagactttcagtgattttgaagaagctgttgaaaaggatgcaacaaagaatattcatactgatggaacagttcatcctttaacaagctatgtgatcaactatgttaagtttttgtttgactaccagtcaactctaaagcagcttttccaggagttcaaggaagatgggacaggttctgagctggcagctgtaacaatgaaaatcatgcaagccttacaaaataatttagaagcaaaagcaaaacaatacaaggatcctgcattgatgcacatatttttgatgaataacattcactatattgtcaaatctgtccgcagatcagaagccaaagatttgttgggtgatgactggattcaaaggcaccgaaggattgtacaacaaaatgccaatcagtatagaaggattgcttgggcgaaggtgttgcaatgcctctctggtcaaggtttgacttcatcaggtggtagtggtcatgtaggaagtgatggtggcaatagcagtggagcttcaagaacagctgtgaaggagagattcaggtctttcaatgtgttgttcgaagagatctaccacaagcaatgtggctggtccgttccagacactgagctgcgcgagtcactaagactcgcggtcgctgaaatcctgttgcctgcctaccgatcattcataaaacgttttgggcctctcattgagaatagcaaagcacctgggaaatacgtgaagcacactcccgagcaactcgagctgctgctaggcaatttattcgaggggaaacaagaacgtgcttgatagtttggtaccgcccgcagcaaggatgtgctgctcttctatgtaaaatacaaaataataaaaataaaaaagatctggaggccctgttagcgttagcattgcttgtgttctccccaatccttgtttagccgcattattatttgtacagaagaatatatgtgtcagctgtgccttgtgttgatctgatagcaggcgtgttcctggtttctttaatgactggcgttggtcattcgttcgggtggagcactaagatggcgacccatctgtagtttttgagatagaaaaatacttccccctcgtcgttatttattttcggatggtgtacgcgagaggatgtgtgcctatctcttatctgtatggtatagctgccaaacaaagcaaaaagcaaagtgaagaattgaaggccatgctgatacacaagaagttaaaacctcctgcgagagtcggtgcagacgcgtccgtggccgccatagacgacgccgtgcagccgccagccggccgagctgaggtcccggcctgcaaggcagcagcatgtcacaaccgtggtgccggatggtgaataggaaaggggtggcatgtgtgccaacaggatgtatccatgtatcgtgatggtgggtgccatgtgggcttgtattataaggagtgcggtcactagttaaaccctgagagttgtggataaagacatcaagaaataaaaggaaaagaaatatctgagcgctctgctcaacttggctcgcacatctctgcgctcgtgctcgccgatccactgtctctcatgtcgccggcgatcgccgcagccacggggctaggtcagtgaactccttccgtctgccacgcaccaccgactgcgtcggaagttgatttcccttaaatcctactccacttggggcgattcgtgggcagtcgccacagcgccacccaaaccctcgatgcaaactggtttcgtcctcgacaccatggaggcggcacgcaagcatgaggacgatcattggacgcacatgaccgagtgcatcgaccttgtcttcgatatcgctcgcattcaggagcatatagtgactcaagatctgggagtcaaggcgatggatcaagtgctggaggatcaatttctgttagtggcttagtgtaacgccctgaatttggggtataaattttcttctctaatattcactaaattcaggcgttactctttttttctcttcctgtttcgctcctttctcccattttcaaaacaatagagactagtgtccgtgtcgc

SEQ ID NO: 32584 - DNA, 1643 bp, Zea Mays
cgccacaaggcactgactgtagggcccacctagcacccaccgtcccccgtgcatctcctatatataaacctccagcagggcgccacaccagaaagcgacacgaccgcgcccgaggagaccacaccacaccgcctcctccgcccgccgattcgtcgagctcgccctcccgctcgcctagctcccctgccttttcccttcctccccacctcctgccccgcgaacgtgctcccgcatgccaccgcgctgacgcgcgcggcggacgacggggtcgggatcatggacaagtacgaggctgttcgggacatcggatcgacgagaatgtgtaccgcgagatcgtcaaccaccggtcgctgcggcaccctaacatcatccagttcatagaggtgatcctaactccaactcatcttgcaattgtgatggagtatgcggctggtggtgaactatttgatcgaatcgtagatcgtgggcgatttagcgaggatgagaccaggtatttcttccagcagttgatctgtggagtgagctattgccatcacatgcaaatatgtcatagagatttgaagctggagaatgttctcttggatggcagcccagctccacggcttaagatatgtgattttggctactccaagtcatcagtactacattcaaggccaaagtcagcagtggggacaccagcatatattgcaccagaggtgctttctcggcgggagtatgatgggaagcttgcagatgtatggtcatgtggagttactctttttgtcatgcttgtgggagcctacccgtttgaagatcaggatgatcctaaaaatattagaaagaccattcagcgaattgcagcaattcaatataatatcccagacaacattcgcatatctgatgattgcagacaactcatttcacgtatctttgtcagcaatccattaaggagaatcaccatgagggaaataaaaagccatccatggttcctaaagaacttgccgagggagctcacagaggcggtgcagttatcctacttcaggagggacaacagtgtctctgcattttcagaccaaacaaccgaagaaatcatgaagattgtcaaggaggcaagaaccttgccaaaatcgtcgagatcaggctatggttacagtgaagaatgctcagatgaggaggaaaaggaagtggagagcgaacccaaagaggaggaagaagaagctgagtgtgataagacagttagggaggttcgcgagagcggggagctggatatgacctcactgcacatctaaatgctgcctgtgaggctgtgacgtgtctgtagataattggctttattgtctgctgaatttggtagaacttatgcaattctggcgtcagatatagtggtctatataagccttttccatcctgtaatatatttgttttgttgaactgtatgtgtggtactccgtatatgggtttgttctaagggagcaaggctttgtacaggcacacctgattgtgtttttggataggaagttttaccgtctgtttgcacactgcagcaaacattttggagtttgtaagccatatgttgcggcatatccagtaaaaatggatgaaacgctgcaaattccgtcaaaatggcttgtataactttgcaaagattgaagataaaagatttt

SEQ ID NO: 32585 - DNA, 115 bp, Zea Mays
ccttgctcttcctcgtctcagcgactcgatcacattgttgaacagctctgactcctactttttcgtctccttcccgtcctaccaccaccgcagcacggcgacctcgtcacccgcg

SEQ ID NO: 32586 - DNA, 4235 bp, Zea Mays
ccttcatcctagccgtccaccagcgcaccgttcttgccccgcaagcctccgcacgaggcctggaactttccacgggtccaaaaccttctctctctctcctctcctcttccctttctctctcctccgcctcccccgactcgcgagtcgcgatctccacctccctcgaccaccactcccgtaacccacttccgggtgggccccacgtcgccgccggcgaccagcacctcccctccttgactccctcgctacccgccgcccgcgtcccgccggccatgacgacctcgccgccgcccgccgagcagcagcatgaggaagaggaggtgctggtgccgtatggcccgcacctggagttgcccaatggagcgcagccaatggaagttgtgcctgctgagccagctgctactgtggaaaaccaacagatagaggatccaccaatatcgagatttacttggaccattgagaacctatcaagagttagcacgaagaagctgtactccgaaatctttgttgtcggaggctacaagtggcgaatcttgattttcccaaggggaaataatgttgaattcttatctatgtatttggatgtggctgattctggggtattgccctatgggtggactagatatgcacaattcagcctctctgtggttaatcaaattcacaacaaattcacaataagaaaagaaacacaacatcagttctctgctcgagaaagtgattggggtttcacttcatttatgccgttgggtgaactctacaaccacagtagaggttatcttgtaaatgatacttgtatagtggaagctgaagttgctgtatgtaaagttgttgactattggagttatgactctaaaaaggaaactggctatgttggtcttaaaaatcaaggtgctacctgctatatgaattctcttcttcagacgctgtaccacatcccatatttcagaaaggctgtttatcacatgcccaccactgagaatgatatgccctcaggaagcatccctttagctctacagtcactcttctataagttgcagtataatgacagcagtgtctctacaaaggagctcacaaaatcattcgggtgggacatgcatgattcatttatgcaacatgatgttcaagaattgaacagagttctttctgagaagttggaagataagatgaagggaactgttgtagagggcacaatacaacaattgtttgaagggcaccacatgaactacattgagtgcatcaatgtagatttcaaatcaacaagaaaggaatccttctatgatctccagcttgatgtcaaaggttgtcaggatgtctacgcttcatttgacaagtacgtagaagtggagcaattggaaggtgacaacaagtatcatgccgataagcatggtctgcaggatgcaaagaaaggagttctttttatcgacttccctcctgttctgcagcttcagctaaaacgttttgaatatgatttcatgcgtgacacgatggtgaagataaatgatcgctatgaattcccacttcaattggaccttgatagagatgatggaaaatatttatctcctgatgctgacaggaatgtgcgtaacctttatacccttcacagcgttcttgtccatagcggtggtgttcatggtggacattattatgctttcatacgacctaccctttctgatcaatggttcaagtttgatgatgagcgtgtgacaaaagaagatgcaaagagggcactggaagaacaatatggtggtgaggaggagacaaatcctggcttgaacaacactcccttcaagtttactaaatattcaaatgcatacatgcttgtgtacattcgtgaaagcgacaaggacaaaattatttgtaatgtggatgagaaagatatagcagagcatcttcggattagattggaaaaggaccgtgaagagaaggaacgtcggaagaaggaaaaagctgaggcacacctctataccataatcaaggttgcaagggatgatgacttaaaaactcagatagggaaagacatatattttgatcttgttgaccatgataaagtcccaagcttccgtatccaaaagcagatggcctttgctcaattcaaggaggaggtagcaaaagagtttggtattcccacacagttccaacgattttggctgtgggccaagcgacaaaaccatacttaccgacctaacaggccattgtgtcctcaagacgaagcgcatactgttggacagctaaaggaattggtgaacaaggcccacaacgctgaattgaaattgttcttggaagttgaacttggactggaccttaaacctcttcctcttccagacaagactagagaagatatatttcttctcttcaaactctatgaacctgaaaaggaacagctacggtatgttggtaggctctttgtaaaggcttcaggaagaccacaggacattctgccgaagctaaagatgttggcaggtttttcacaagatgatgatattgaactttatgaggaaattaagttcgaacccaatgtgatgtgtgaatacattgataacaggcttctgttccgatcttgccagcttgaagatggggacataatctgttttcaaaaatcttcaaaggcagatagtgctgaccgatatcgatttcctgacgtaccatcctttttgacgtatatacgtaaccgacaggtggtccactttcgttcactggagaagcccaaggaggacgattttttcctcgagatgtcaaagattttcacatatgatcaagtcgtggaaaaagtagctgaaaaacttggcgtggatgacccatcgaaaattcggcttacatcacataattgttattcgcagcagcctaagcctcagccaataaagtacagaggcgttgaacgtctactggacatgctgattcattataaccagacttctgatattctgtactatgaagtattggacataccacttccagaattacaagcgctgaagacattaaaagttacataccatcatgccacaaaagatgaggtgtcagttcacagtataagattgccaaaaaacagcactgttggcgatgtgctaaacgatatcaaaacaaaggttgagttatctcatcccaatgctgaactgagattacttgaggtcttttatcacaagatatacaaggtgtttgcaccaaatgaaaagattgaaaacattaatgatcagtactggacactgcgtgcggaggaggttccagatgaggaaaaaaaccttggtccctttgatcgattgattcatgtatatcattttacaaaagatactcaaaaccaaacgcaagttcagaactttggagaacctttttttatggttattcgtgaggatgagaccctatcttctatcaaagagcgtatacagagaaagcttaaggttccagatgaggatttctcaaagtggaagtttgcatacatttcacttggtcgtccagactattttgaagattcagatactgtagctttaaaatttcagagaaacatgtatggagcttgggagcagtatcttggactggaacatccagacacagctcctaggaaggcacacacaattaatcagaaccggcattcatttgagagacctgtaaaaatttataactaggcatgatagaaatttgagcaatgagctgccaagcaagggctaaaattgctgtcctgaaataaagcgtgccggggcatgttgctcaggtttttcgtggagctggtgagctagttcatgagactccaagtatgatcggggcggcttctcatctttccctgcttttccccggatacatataaagttgtgcagagatgaccccaccgaacaattgtctttagtagataagccagtacttcccgttagatgactttatacagtcgaatagccggcattttagtcgatctttccgttctccagttgctgttggtgctaggaggccttgagctgttgagggtacttgccctgctgtatattatgacgtagagtgtacaagtctttgttgttgacaattacacggtgttttgtaatttcagtgatacacttccaggtccttcagtacgtacttgcctggatggtgtcaatttggcattctatgttagatattgatccatctgttctaaattaaaattataaggcagtttgacttttttaagatatactgcctccgattttctattagttgtcgtttagaatagtgacacggtctccatattataacgtgtctccatattataactt

SEQ ID NO: 32587 - DNA, 135 bp, Zea Mays
tgtcacaccaaaataaagtagaaaagccattgctgacccctgattccatagcttagcaagagctttagaattagtagggatttcaagacctgaacatggccgatcatgagcggttttcttgagccataaccagag

SEQ ID NO: 32588 - DNA, 903 bp, Zea Mays
tgtttggactagcagattccaaaatctttcttgataatcatccactgtcgtgcgaaagggtagtcgtgcctgttcacccaatggattgctgcgaagtggcggtccaaatctttgttggcagagctgtttgaaatgagaccatgacaatggtggtgcatcacgctggagctgtccatacgggcgacccctgtcatgtgataggaggcaaccagccttctcttctatcgtgcgttggccgtcgaagaactggtcacactgtggtggtggtgtatgcgacggcggaggtttggatgggctgcgggggtaaggatccctcagggactactgtggctggcagcaggccgccgtaccctggcatgccgtaggggcagccaaatggatgtgtatcagctgaggttcctgggtttttttccatggccgtgacgcgagatgagatgaaggacatctgggagttgaacttccccagctggcgttgcatgtcggctagcatcgtggtgatcgactccatcgatggcggcaccgtggcggaggccaaactatcgccggcgttggaccctggcatctccgatatcaggtttcaacaaatcccagtgctgttggaggctgcagttgcaagagttctttcatggtgaaatagcttcaatgttaccttgaagagatcaataaccggagttctgtagcgaaacatacgctttagatctgagtgtacaattggtattttttggtagctcttgagatgtttctttttgagttttattaccttaaagagaacaataaccagaaatatcaatcacaaactgtctggttcaatttgtatctctaacatgtgaaatgatgacaaatttatgtacatgtaatcttatggctattaacatttgactctatgtcgcttttacaacaaca

SEQ ID NO: 32589 - DNA, 1340 bp, Zea Mays
atgagggctgaaaagaggagcaggaaggcttggcttgctgcaatgcctgtgctgtttggcgccacaaaaggagcagaggtgtgttccttcaaatgccagatagcccactggagacaaggtcacaaagatgaatgccatccaccaagtgttaatacaaggcatgatgatgaagaagaaaaggctgaagtgggaagagctgccaaagagaatgtatcagttggtgttaaacaggttgctgaaatgaacaaaccagatgtaggatctgaaacttctgatgcaaaccatgatttgaagagttcaaatggtaaaagtaaacatatgccttctaaagcagtatgttccagtgtagagattcctggaggtcataagtccaacaacacagttgaaatttctcaaaacgttcagtctgttgacagtagtaagatgggatcaagtatcaaacatgcaaattttgttgaagatggttcttccaccgaggacttaaatgaggaataccaaagagctaaggatgccactgttgttgaggattgttctcagacaaacagtaccagggcaaacggtgcaaccttgtcaccgacaggaatactctctcatttgaatgacattggcagtagctttggtcctgaaatgctccaagaagctggagcagctcatacttatatagaatccttcgcttaccgtttgtacatattgattatccggtgcgtggcgccaccactggtgccggagctggacagggacgccgtggcccctgcgggcagcggtgaccggaaggcggccaagctcgggagctggagcagcatgagcagcaaccgcggtagcaagaagcggaagagcagtagcagcagcttcgggaggagatccacatccacctgcgaggaaaggcagggggtcttccgcatgctcatgagctggaaccaggagagccgattcagcaacaagatcaagacgacgacgagcaaagaaagatgaacgaaatgaagtgttcttagcttggtgtgattattcggggggttgcttgctggatggtttttgttcgtttagtgtctggccttagcttacttattacttttgttagtactctactagcagagtacatgcatagagtcagtggtgtggctgtggcgtggatcagatcattgatttgatcgagctgtacaaatagcgaggcgatacatgtcactgagttgatcagttgacaaggtggtttagaccatgttgaggcacggagaaacatcatccctaggttttagtttgtctggctttgctcgtcattttgtacttgctcttctcacatatttgttcgcttagaatttacttcaaactcacgtccttttggc

SEQ ID NO: 32590 - DNA, 817 bp, Zea Mays
gtgaagccaagttgccccgcggacgcaaagcatacaggccattttgccgtttccggcgcgcgcctctgaacaaacccgaaagcccccctcatcgccattcctcttcctgccatggcgatcctctttactcctcccctcccaccaccaccgcccctcccaactacaccacaccgcaccggcaccaccaccaaccgagcggctccaggctcctgctcaggaaggggagaagaggcgagccttccttgggaagtcgcaggaggagagaaggggaacaaagatggggcgcggcaagatcgagatcaagcggatcgagaactccaccaaccgccaggtgaccttctccaagcgccgcaacgggatcctcaagaaggcgcgggagatcagcgtgctctgcgacgccgaggtcggcgtcgtcgtcttctccagcgccggcaagctttacgactactgctccccgaagacatcgctatcaaaaatcctggagaagtaccagaccaactctggaaagatactgtggggtgagaagcacaagagccttagtgcagagattgaccgtataaagaaagagaacgacaccatgcagatcgagctcaggcacctgaaaggtgaagatctaaactcgctgcaacccaaagacctgatcatgatcgaggaggcacttgataatggactgacgaacctgaatgagaaactgatggagcactgggaaaggcgtgtgacaaacactaagatgatggaagacgagaacaaattgctggccttcaaactcactacctttactttgatgcttaaatcacgcgtgccgcatacagacata

SEQ ID NO: 32591 - DNA, 1762 bp, Zea Mays
aacgcgaagctttctgccgaaacagtggggtttgggcgcttgtccacggccgccgccaacaacgagttcctgacctccgccgtctcttccccgctccctcgcgctcgcagtcgcagctccggccgccctattttgcggaattcggtagatttgtttccttcatgggtcgcaccatcaagaaggccaggaaagcgaaacccaagaagtctaagaagaaaactgaagcgtcttcatcgtccaatcatgcggttgcctctggtccggctaaggtctggcaaccgggtgtagatgcactggaagatggggaggagcttcagtttgatcctgaggcttataattatctccgaggttttggcattggctggtcttgcttgaggcggagaaagcttcattgaattatatcggtgttttcaagctttctaacataaatgggaaaaagcgggaacctataccagcttcagcagttgatggtgacactgatgtggatagtgacagcagcagtgatgaagaagatgaagaaattaacgaggatacaaagcccatcctacatctaaaaaaggtggctcatgcggggtgtgtaaatcggatacgctcaatgactcaaaagccacatatatgtgctacttggggagatactggtcatgttcaggtgtgggacttgagctccttccttaattctttagcagagtcaggggcatctgcacccaaagaagacgatataatccacaaacacttacccatgaaagtttttagtggccataaagatgagggatatgccattgattggagtccacttgttactggaagacttgtttctggtgactgcaataagtgcattcacctatgggaaccgacttcaaataactggaacgtagatgcaaacccatttgttggacacactgctagtgttgaagatctacagtggagtcccacggaagccgacatatttgcctcgtgttctgtggatggtacgatatcaatatgggatgtacgtacagggaagaaaccttctatttctgtcaaagctcataaagcagatgtgaatgttatctcatggaacaggcttgctagctgcatgatagcttctgggtgcgacgatggcagtttctcagttcatgatcttagatcaattcaggactcgttggtagcacattttgagtaccacaagaaagcaattacatccatcgagtggagcccacacgaagcatcatcattagctgtaacatctgaagaccaccagctcacaatctgggacctttcattggaacgggacaccgaggaggaggctgagttcagagcgaagatgaaagagcaggcaaacgcccctgacgatttgccgcctcagcttctctttgctcatcagggtcagagagacttgaaagaagtgcactggcacccacagataccgtcgatgatcatatcgacggcaatcgacggcttcaacgtgttgatgcctagcaacatcgatacaaccattcctggcagcacagatacagcaatgccgcctgctgagccataggttaggtgtttctggtagctcatgattccaggttcatgcggtggtgagtgtagttgccatttgtcatgtgtcgacagtgctatgctgtcgtgttggagcatgatgggaaaattttgattggctggcgttctatgataatatgattaggatttaatatgtgcatgctttttttagttttaccagcatctttgatggttgtgggccccatcatatgtcaaattatcaaccgatgttttcgttgca

SEQ ID NO: 32592 - DNA, 3536 bp, Zea Mays
cgaagttggaggagaccccaaggcagtcgcaaaggaagggagggagctttgctggcccgggcatttgggagacccaccccgcgcgggagtaaaagagaagagaaagagaaagcgagagaagaaaaggcggcgcctcatcacggtcgcccgcctgctcggcctcttctcccccctccccttcctgtctctgcgtcgcgttgcggttgtgcgcacacctggtcgttctcggtttcctctcctgcggttctgcccagtcctcacggcttcctttttcttccgggccactctccgccctcttccttgctgcgctcgcccttcctgcgcattgctcctctgttccccccgtcggtccgttcctgagcgcagccgcttcgcgtccccttgattccacccactgcctaatatgcgtccgtcgcggcggcggcggttggtgctgtgagcgactagcggcgggacaaggggaagggattccgtcgtgctgtgcgaaggcctcaggagccgccggcattgtgcatggagggtgaggaggacggttccggctccgcggtgcagcgcccgcctccgcagcagcagcagatacgggtggtgcgctgccccaagtgcgacaagctcctgcctgagctgcccaattactccgtctacgtctgcggcggttgcggcgccacgctccaggcaaagaagaactcaggatcagatacttcttcagataaatctgatactgctgagcatgtgaagtaccttgaagtgctcgagagtttaccagataagaaaggagtagcgtctgaagctagctgtgctgttcgagaagcagagaccaataaaatcgaagctgggtcagaagagaggtttgtacccagctgctgcaccatgaagcttgaacctgcactcggagatgacagcagggaagtccgggaggcaaaataccggcgcattcgtcatgaagggaaaggagaagcaaagcagccagcgacagcaagagacagatcaccaaggcctgtggttaacagcatcccttctaatgctgaccctgtagaagggccatttgagtgccatatgagaccgggattcatatacgctaacggcgagaagggccatctgagtgacaggaattttgatgatcctagcaccagagtcagtggcctggagaaagatcgtactgagcttctgcggatgcttgatgagttgcgggacaaggtacagagatcctgcgagattgctgacaagtcaagtgtgaatgcttcgacaaatagaatggttaatcctacaagctcctgcattcctcatgagcgtctgagtcgattgcggtatggttcacctcagctgcaacggaatgggtctcagcactcaccttctttgaatgggcagacacctggtgttcctcctgcttttccttcattatctgtacagcaagatctccatggatacggggaatcggttgcacacacgggagctcctatctacccagctgccccatatccatggagaaacttcgataattatttccaaggacattatgatcctgaccctctgatctcttatcaccatgatggcttctaccatcagcctgcttgctcttgcttacattgttaccatcgtgaattcttacctgttcgaagggcaccctatcttatgaacaatcctagcttgtaccatgcagaaggcccagtgatgtttggtgcacagaactacaatacaagaggcatgaatggtatgatgcgacgcagtcacatgagggccaccctgagtaaaaaacctgcacagacttgtgaaccgattgtcaatggcgctccttttactatttgctacaattgctatgaagtgctgcagcttcccaagaactctctcttgttgggaaaagatgagtataagctgcgttgtgggtcatgctcacatgcaattgtggtcagacttgatggaagcaggcttgatgtttcagcacctacaccagtttcacacttatcacctggaagtaagaactactacaacaatggccaagcaaacaatggacaaaatgctgatgagagacttcttccatcctatagtttttctgcaggcagtcattgctctcaagaaaaagatttaccctcgaactcaagcgaaccagacaaaacgcaatgcatatcttctgccagcatttccgaggatgataatagcccagctagatcgaattcacagaagaactcctctggttctagagacgttcctcatgatgctgaagtggttatccgcgttccaactttacctcttcgtgatcattttggatattctccatcagatagggtggttgatgggccaggcaaaggaagcagaagcacccggtccgaacatgaaaagggtgtgttaactgaaagttttaagccaaacaaagtgaaatgtgtacctgtagcaagcgtgctagacccgtcggacgacgagtatgatgatcctgagcacagtcaagatccaggtggtggggcacaatacgtcgaccacctgcgggccacgaaatcgggtgattcctttttctccagcctcataaagaagagctttaaaatcaatggtggaatgggcaatggcagagcaaatgttttcatcaatggctatcccatttctgaccgagctgtcaggaaggcggagaagattgctggaccagtctacccgggtgaatactggtatgactaccgtgctggattctggggtgttatgggacagccctgccttggcatcatacccccatatgttgcggaattcaactatcccatgcctaagaactgtgctggaggaaatactggtgtgttcatcaatggccgagaacttcaccagaaggacatggacttacttgtgggtcgagggcttcccgattctcctgatagatcatacagagttgagatttctggtaaagtatccgacgaagtatctggtgaagagctttattgccttggcaaactcgcaccaacgtaagtaacttaaaagaagcttcagattcttcagtttttgtctgtttggagttcccttctcgtgtaagtgagcgctgttcaatttctggcgaagctgtatcactgcatgaggccatgtgctattgctcatactcagttgattactcttatatgacttaaccgacactaatttcatagatcatctagtagggttaacaaaataagcaagcacaggggttcttgtatgtttctacctgtttcagttagtaaaattcatagacatgatgctcagtatagggctgggtatatttgatccaatttcatattttgcaattgccattggaaaacagggtggagaagatgaagcgcgggttcgggatgcgagtcccaaggatcattcagtgaagttggttcacatcgagaagcagaggctctgaaagttgtgtgccactacgcctttgtggtatccattgctaatgtaaccctgcctggaatacttgcatctgtcgcagtggttgttttgatcgagtgtgtcttggtgtggccatgtaattttgtctgtacaacatgccggataggtttgcttggggtttaataaaaatgggtgggtccaattctgtg

SEQ ID NO: 32593 - DNA, 3015 bp, Zea Mays
atggcaaaactgcattgccaatgggagtcagagggccgaaaccctaactcgtccacttttcaaatccacattccccccttatgcctctcacccgtcacccctcgccgtctccggcgagacccggaaatggatgtcgctgccaccccctcaaggtcaaaatctaagcccagatcctcgctggtgaatcccgtcgcagcccccgccgagtccaggatggacctctgcaccccatcgaagcccacgcccaggcggaactccaaatcgacggcctcgccggcgccaatgtctccgtcgacgccctacaccgtccggcgctcgcgccgcctcctcgaaacccccaccaaagccgccctggaggtgcaggtgaaggctacgctgacccctacctccaagggcaagcgcgccgcgccgtcacctaaaacccctgctcagcacgagcccaagaggcagaaacgacacccgaggaagagggcatactaccggaaggtggtgtatgacggcggggagttcgaggtcggtgatgacgtgtacgtgaagcggcgggaggcggcggagtctgacgcggaggaccccgaggaggaagagtgccgcgtatgcttccgcaccggtggcggggttatggtggagtgcgacgcgtgcctcggcggatttcacctgcgttgcgtgcgaccgccgcttcggagggtgcctgaaggtgactgggcatgtccatactgcgaggccgagcgcgccggaaaggtggtcgagcggcccaggccgcctgagggcaagcgcatcgtgaggactgccaaggagaaactcctttccagcgatctgtgggctgcacgcatcgagagtttatggagggagcctgatggcaccttctgggcaaaggtcaggtggtacattatccccgaagagactgcagcaggaaggcagctgcataacttgagaagagagctgtatcgtaccaatgatcttgcagacattgagatggaaacaatccttagacattgttctataatgtgccccaaagactttagggatgctaacgatggaggagatgatgtattttactgtgaatatgagtatgatattcattggcataattttaagcgtttggcagatattggtgatgaacccgagacaaaggaagatcccagtgacgagccttacaatgccagtgatgattataacagtgacactgatgaagattcagagtatgacgaggtggaagaacctacatcatctttctctgccagagggaatcaatcacatgaattggcagcgaattcaaggaagggtagaatatatggcctacaaaaaattggaatacgaaaaattcctgagcatgttcggtgccaccaaaagactgagctggagaaggctaaagcaaccctgttattggcaactctccctaagtcattaccttgcagggataaagaaatggaggagatatcgatatttgtaaaggatgcaatctgcaatgaccagtgcctaggacggtgcctttatatacatggtgtacctggtactggcaagactatgagtgtacttgctgttatgaggaggctgagatctgaatttgattctggaacactgaggccatattgttttattgaaattaatggtcttaaattagcatccccagagaatatctacaaggtggcactaaaattggaaagcaagcaaaccagccaattattttgctgatcgatgagctcgatcttcttttgacaagaaaccagtcggtgctgtataacatccttgattggcccaccaaaccatattcaaatctagttgtcataggtatagcaaacacaatggatcttccagaaaaattattgcctcgtatatcaagtcggatgggcattcaacgactgtgttttggtccatacaattatcggcaactacaggaaattataacaagccgtttaaaggggattgatgcctttgaagaacaagctattgaatttgcttctagaaaggtagctgctatgtcaggtgatgctaggcgagctttagagatttgtagacgagcagcagagtttgcagactaccgtgttaaacagtctcgacagtctgcacagaatactgtttctgcaaataaaggtgatggtgttgtttccatgggtgacatagaagctgctattcaggaagtcttccaggcaccgcatattcaagtgatgaagaattgtccaaagtttggaaaagttatcttggttgccatagttcatgagctgtacaaaagtggactaggtgaaataatgtttgataagttagcaacaacagttttctcctggtgccgtgcccacagagaactattgcctggatacgacactctcttgaaaatttgctgcaagcttggtgaaagcaagatcatcctctgtgaagagggtaccaagcacaagttgcagaaggtgcagctcaactatccaagtgatgatgtgacatttgccctcaaggaatctccagatcttccttggctatctaagtacttgtgaggctcttattgcattaaccattgattcctggcactctgttgcctttctgttctctttggaggctagacaattctacttcacccgcaaacctttcaaacacacatatcccatggtcgatctcctggtcactctagcctcgtatctgcaaaggaaccggcgaaggatgacggcatgtcgctgcacccaacggaacgcgtcacactaggaacgtaaaacgttagaaacatgtacgtctggaatttcgtccccttcatgactggatacgtatgtatccacttcaacccatgtagtttggagtggtttggtatgtattttaaactaaactctatattaaaccactctaatccatatcgattgaggtgaatatgcatgcgtccatatgttgtaactgaactgccgcgtagtgagatttagtaactatatatgaatggtttgttacaataacattgcgagttttgaataagaaacattgagatatcaatttgtactctgctggctccaatgcgatggccatttaaggcattgtttggtt

SEQ ID NO: 32594 - DNA, 1792 bp, Zea Mays
ggattctccaattcctgcatgcatctccatcgtgctgtggctgcattttttctacgcttcccaccaaccgcactgtcgggcagtgcaacagccaagagtgctgaacctaaaccgaactgactgcggcgtcctcttcttgttcccaaacctcaccgcctcaactgcttcgccttcgactgcgggcggcggcggcggcgtacaaagaaccaaaagatgactccttgcgctctcaccgtcgactccctaaacccaaaggtgctggctctcgcggatcacctcggcgacaacgccattgcccgccgcgcgcagtgcatccagaacgagatagaagcagaaccggagtcacaccctttccgcgagataatcgattgcagcctcagcaatccacagtccatgggacagcggccaaacaagttcttccgagaggttcttgccttgtgcgactatccccatcttctagaacagagtggaactaattccttgttcagctctggtgcgatagcaagggcacgggagattctagacctctttcccgggagagcaacaggaggatatagccactctcagggcactgaaggattgcgcgacataatcgccgctggaatagccgctcgagataatttcccctgtaacgcggatgacattttcctgacagatggagcagctccgccggttcacatgatgatgcacctgctgatacgggataaaaaagacggcatcctctgcccagttccatcgcattccttgtacacgagtgctatgcttctccagggcgctactcttgtgccatatttccttgacgagtcaagaggctggggagtgagcatgtcagacctgaagaagcagctggatagtgcccggtcaatgggtgtttttgttagggggcttgtggttataaatccaggcaaccctactggacatgttctcgtggaggaaaatcagcgtgagattgtggatttctgcaggaatgaagatcttgttcttctagcagacgaggtttaccaggaaaatatttacgcagatgagaagggatttcactctttcaagaagatagcacggtccatggggtacggcgaaggagacatatctttagtgtccttccattcagtttctaatggatattatggtgaatgtgggagaaggggaggctacatggaagtcactggcttcaactctgatgtaaagaaacaagtgtacaaagttgtatccctaagctcgtgctccaacatctccggccagatcctcatgagcctagtcatgaacccgccacaggtcggagacgagtcgtacgcctcttaccaggccgaaagagacggcgtcctgtcatctttcgctcgctgcgcagaggccatggtgcgctcattcaacgggctggaaggggtgacctgtagcgaggctgaaggagcagtgttcgtgttcccttcagtccgtctgccaaagaaggcggtcgcagctgccgaggcaagcaacacgcagccagatgcgttctacgccctccgcctcctcgaaaccaccgggatcgtcgttgtgcctggctctgtttttggacagatgcatggaacgtggcatttcagatgcacggtcctgccacacgaagagaagaagacgatgacggtgatcatctccagctttgtggcgtttcatcgagccttcatggaagagtttcgcgactaacagatttcagctcctcttcttctatctctgtattgtaccacaacttaatgctgtacttcggagaaaacctagacctctccaaatgcatgattcctgcaggtataacgggagcccaagg

SEQ ID NO: 32595 - DNA, 331 bp, Zea Mays
tttatgtgcaccgtcataactgtggcaacagaaaacgatttgattatgattatccatgtgacattttttatcttgttgggttgattgaattttttttatttatatagattattattttgctgtgttggtttcaagtcatgtatgatagaaggcgtcatgtatcctgttggtggattgtagtggttctgttctaacgagcaaaggagcagagtagtattatgttccacctgtgcagcttccctggcccattcggttccaaagagcaaaagggaattccactgtgcagggatatctctcccgggctctagctgtacatggaatcctacggcgt

SEQ ID NO: 32596 - DNA, 4107 bp, Zea Mays
tttacccctgttgcacttgtttactgaaacatctccaagaccaaggtgattgtattcaccaactgtagtctagtttttttcacatcattcaacccatatttcaatgatatcgtttttgtggatcatagttggatgaccaatgataaatgtgataagttgcaaactttattctcagaagatgactggaagttagttcagttggtgcttactttgttccgcaacgtcttggctattcaagaaatcacattgacgcagaaagcatctggagaagctacccacttactcttcctgtctgataactttttggagctcatgttccaagagaatgtgatggacataatcttagttttgactcagcatattgatgagccctctggttaccttaaggaggaaaaccttcttttaatggagatttaccattatctcttcttaggccgagacccaggactgattgcccgagcttctaataaaggtttaaaggatcgtgttaacggagatattgtttcatcagttgattcattgagattgatgatggaagaggaagaaaggaaaaaaagaatgttcaggcaattgaactcagaacatagctcgcttagtgggacttttacgtgcttttctgtggatggatctaaatcattgtgcaaagggaacccaagctctgcatctgctaatagcctcttgaaaatacgtaatgtccaaagaggacctcagaaacggatagcctgggacaatgaacttctgtacgtaccaaaggagggtattacagaaatgcttagaagcttcatggatcaatttttatctggagcatacaatatcctgatgcagtcagtctgtggtgatatcatggatgagcaccactccattgagaaatctgacataactacattcttcaaagttgctcggtttgttctagcttttcaacatgaaaaggcttcaaatgatcagctaccgcagttatatcttggcttatttgtgatgaatatcataactatgtctatccagaaatctgctaaagggattcaaccatctggggtttctcctagcaatgaacctgatgataatctgccatttcatggtgatatatgtggacctgttgcggccacgttgaatgaagatatgttcaatatagtcatttccaggtggcgtgagacgtatgaggctcttaaggaaactaacgactacaaaactctttcagcagctgggtctttaatgaagaacatgattgacatgatatatttggtgctaaaagtactccctgaagattcaagggaatctcaaacagctcgtgttttgctctataaactgttttatgatcagacagaacatggtctcactcaatttctgctgaacttgttcagatcgtttgatagtcacaagcaacccaaaagtgatctagtggatttattagaaacaattcatatcatgctacagctcatggaaaagcttcaagcacgtggtgcattaagggttgcaaaaaagacaaaaaaggtcagaagaaagaagtccacaaatgataaaaaggagaattcagaacccaaagtggataatgcagaaccaaacgatgctaatcctacagatggaacgaaatgctcacctgaaacacttccagatttgagaagcgagggtcctgctttagaatcttctccctcagaacctggaaaagtagacactagtggcgcacatgtactggatacacttgtggacactgtagttaacattgagagtaccgcacatgctgaaggtgacccatcttgcacagacagtggcgtaatgaagagaaatctcattgaagaagagggtgagacttcagattcttcagttgatcaccaacctgctacaagtgaagttgattttaatgtttctcggttaatatctagtcttgcaaacaattctgttgtgcaaaatatttgctggctgttgaagcattacaaaagtaactcctaccgtacaaaccattacataatatgcatgctacggagattctgtgaagacctagagctgtcaccgatgctgtatcagctatcacttttaacaactttctatgatatattagcggaacaaaagttgtctagttcaaaggagtacacaaacattgtaaattttctttctaaagttgtgaggaaaatgttgagaacaataaaaaaacagccactgctatttgtcgacatactattttggaagacgcgaaaggagtgtcattgcattgatgctgatgcactactgaatgagcttaagaatgatgttggaagcaaagacagtgaaattggttcaagtaaggggtggagagatcgaataaatatagcagattctcttggtgacgatgaagttgacgtagttataccgcaggcaccttatgatgctgataaggatggagatctatcagctggtgaacatactgatgactttaggaagagtagtactaaatataaacggagcagattgtcactttcagatagtgaggctgatgaaatcgagaggttcttgtatgctcttctgtatttgaacacagctaattagctgaacttcaatcctcactttgatatgaatggatttaattcaggaaccatgtatcaagagattcggtgcccaaagttccaaaacgacgaggtcgttctctttttacggaagagcaagagaggctcataagagacctttatgaaaaatataaggatggtcctaaatgcagtcatataatagctgagtctttagaccccagcgggaagatatcttctgctcaagtttctcgtaagcttacacagttaggtctcaggaatgtcacaaggagaaaaaaggttgcaggtgaatctctttcaactggagatcggactatagaacaacaagacaactcgcttgatgatctgaaccccatgctaggcgaacagaaccatggctccaaggctaaaagctccaggcccagaaggaaaaaattacacacggcaagtgatgaccatgatgacacaagtcagagaaaatcatctgatgaagacacattacaagtacttaaaagcagatcaaaaagtaagaaagttccattggtggatagttcactgagtggatcacagcatcaagaagctcagcatgacccagactctgatgatgcgaccataggatccatgattagaagtagaaaaaagaagaggttatccacgtcagattttgaagggaatgtacgaaaccatcaagaatcttcagacaacaccaaagccaaggactgttcaccgattatatcccaacatgagaaagcattgcaagacatttatcctgatgatgagaccattggatccatcattagaagtgtgaaaaagaagagatcagtgacatcaaatttctcagcgaatatagaagcccaagagtctttgagaaatattaacctacaagatgaaactgttgtttctaatatcatggatgcttctgtaaatcatgggtctgatccagtcaataacagtgacaatactgttgaagatgaacttttggatgattttgaaactgagctagtcaataacggtggcaatactgttgaagctgaacttttggatgattttgaagttgagctagatgatcatgagcatactgaccaaaggatcactgatgatgaaattatgactgaatcagggaaagcaacaaactccgatgctaagggaagggctggtttgaaaagaagacacagaatggttattgacgatgaggatgatgattagtaactgttcaggactgaagaacccgtaactattgaggagtggagtttcaaatgggaaatgggattaaaaaaagaacttttcaggattgtttcccttgcactgctaagctctgagcacgattcaagctgtttcacacctactagtgccagatgttcttccatctgtaatgtttagtggggtcacaatctaatggaattttgcagatgcaaagttcaggctgccctgctgtgtggcctgctgtacagactgataatttcgagtactgttttttttgaaatgaaatactgtagagaagccccccgcagcaatttcgagtactgttggctgtatttgaaactccgaacactgcaactctagcgaatgcgctcagttatactgttttcactttcacctaaagtgctctttagac

SEQ ID NO: 32597 - DNA, 2399 bp, Zea Mays
gcagctagacgcacagccacataggccacgtcgttcgaatttttgtaagccatccgatacaagatcgttggttaccaggcgtgggagcaaaggtagccaaccacacgacgggactcttccagatggagacgaaacaccacacggcggggaagaaaaagagggatcagatctcagacgccggcgtccgtctccgccaagctgcatcgcctcaaacgctttgtcccggccatcgcgccggccatggccgccatgtcgaagaaggcgactctccatccctttcgagttccgagctcattctcccctccgcccctagcctcacgccacgtcccgcggaccgtactatagcctccacagccgtggtcgctcggccacacgtatcggtcgcttcgcatgccatcgctgcggcgacagtcgtgatacctgccttcgtcagcaacacgtcccaacccgactaagcgtcccgggccaccgcgatacttcatttccgaaatcgctgcggcggcagcagttatgcatgccttgctccaaatatataacactgtgagactgagtagcaaatcaagttgaagtcatcggaagttgtcaaacctcttttttttctcttttttgtatgttttttagagtccaatttggctggacctaaaaataatggctacgacttggtccaccctggcttccaacatatgaaacttcttgcgtcttcattaaattgtgctaataaaatgtgtgtttcgttttgttttgtcctgctacaggggtgaactatatgtgggaacactgaacctgcaaccgagactgtagcgattcgacaatatcacaagaggatcatacttctactccatgacaactgtaacctactagagctgaaagaaatacagagcctataagaaggaaatgtatgagatgcaaccaatgtacagtaagcaacttaccatatttatttatgacaattgttccaagaattaataagtattccagtgagcgtctcaaaaatggaatcaagaggtgaggaaagacatcgccccagttctgtagaggatgccttcgttttcctcgggttttgttgtgtgtcctgcttaccaagcattgatatcaattcgccgatttgatagatgagatggtaactagctgaaaacagtaataattagaaacccaagagcgattttgcgacgccctgctgtgagccgaccctagcagtcaaggcttcgtaaatcagatttatctgtcaggtacaatcacaggaaatgttgtggcaaaggtatggcttaagagaaatcatgtacctagatgatttgttgtctatacgattagatggtgctgttcaccttcaattttttcaaatttggcaccactccagtcaccaaccatacatagaaaagttttagtgaagtcaatgaagcaaacattttaatatttcattctatcaataaaagtgtagttttgcttacgataagacctccataaacaataaacacgggtaaatgagagtattgatggttggaatgagtggtggtagcagaatgatatctacatacattggttttaggtaccagcaccttattttttttaataaaaatatgtgtgaacttggaactttttaatatgtgaggaagatgggtagatactgttgttgtgggcagggcagggcacccgagcaaaagcatagatgcgaatggggatgaatatgggttagctctcttcccctatttattggagttggagggatacactgctgctatggtttggtctgtgatgtcgtctcattagaaaaacatttgcttggcttgtatctcatttcctttctcattagaggacttaaactgagcacatgtttggcttatgcgcaatgtatgtggcaagcaaaagcaaatattatcctattaatgtgctcctactaacctgctctgcccacaatttattatgggtagatattgttccaatttattatgcatgttggcttcttgcagggaatgaatacatcttccgtttatatcaattgtgacttagatgtatgtcagtcttagtatgactattaagttgtgacatgaatgtgaattcgataatgtatttcataacttcatctacactacagatgtattgtgttattgttcccattcaccattgaaagtagttgttagatccaaattgatttcacttttaccaagtgatgttgttgctgcttccttataagtgttgctcccatttgattcgtcagattactggcttctgctactttcgagtagtgctgctactttcgagtagtgctgctgctttcgagtggtgttgttgctttcaagttgaagtgagttgttgttgacttccacaacaagctgctacttttagcgaaatttgctgccaccgttcagaattcagccatgttcaagtttacaactgtgtga

SEQ ID NO: 32598 - DNA, 2860 bp, Zea Mays
ccaccccacaccctctcccatctctctctccgtgccctcctcctcccccccagtccgccccacccttccggccctccccctcttttatatccagtaccatggtgatctccgagctcgggtgagctgatgagaatgcggccgatttgaggaaggctgtgggcgcgatggatgcggtttcgggcggattcgctaggaggctgtagaggttaggttccggtgtcccccggcccggccggtcgtgggagatgagctcctcgtccgcggccagcatcgggcagccgccgccgcccgcgccgccgccggaagaagagaagaagtgcctcaactcggagctgtggcacgcctgcgccggcccgctcgtctgcctccccaccgtcggtacgcgcgtcgtctacttcccgcagggccacagcgagcaggtggcagcgtcgacgaacaaggaggtggacgggcacatccccaactaccccaacctgccgccgcagctgatctgccagctccatgatgtcacaatgcatgcggatgtggagacagacgaagtgtacgcgcagatgacgctgcagccgctcaatccacaagagcagaacgacgcgtacctgcctgccgagatgggaatcatgagcaagcagccgacgaattacttctgcaagacgctgactgcgagcgacaccagcacgcacggcgggttctctgtgccccgtcgtgcggccgagcgcgtcttccccccgctggatttcacacagcagcctccagcacaggagcttattgcacgggatattcatgatgttgagtggaagttcaggcatatcttccgaggccagcccaaaagacacctgctgacgactggctggagtgtgtttgtcagtgctaagagacttgttgctggagattctgtgctattcatatggaatgagaaaaaccagcttttgcttggaatcagacacgctacccggccacagactgtgatgccctcttctgttctttcgagtgacagcatgcacatcggactccttgcagcagcagctcatgctgctgcaacaaacagccgcttcacaattttctataatcctagggcaagtccaacagaatttgttatacccctttcgaaatacatcaaggctgtttttcacacgcggatatcagttgggatgcgattcaggatgttatttgagactgaggaatcaagtgtccgcaggtacatggggacaataacagaagtgagtgatgctgacccagtgcgttggcctagttcctattggagatcagtgaaggttggttgggatgaatcaaccgcaggagaaaggccacctagagtttctctgtgggaaattgagccactgacaacctttcctatgtatccatccctgttcccactgcgagttaagcatccttggtattcaggacttgctgctcttcatgatgacagcaatgctttgatgtggctgagaggagtaaccggtgaagggggctttcattctttgaacttccagtcacctggtataggttcctggggacaacagagactccatccatccttacttagcaatgaccatgatcagtatcaagcagtggttgctgccgcagctgcctcccagtccggtggttatctgaagcagcaattcctacaccttcaacaacctatgcagtccccacaggagcagtgcaatctcaatccgctgttgcagcaacaaatactacagcaagcgagccaacagcagatggttagttctgatgctcaaaatattcagtccgtgctcaacccaggtgctattcagcagcagctccaccaactccagcagatgcagcatactcataatgaccagaagcaaaagattcaaccagatcaacagtaccaagttgctagcagtgcggttctcccgagtccaacatcattaccaagccatttgcgtgaaaaatttggcttctctgatcctaatgtgaactcttccagcttcatcagctctagcagcaacgaaaacatgctggaatcaaacttccttcaggtaagttcaaaatccgtggatttgtctagattcaaccaaccagtagttagcgagcagcagcagccgcaacaacaacaggcatggaagcaaaagtttatgggctcacagtcaatgtcttttgggggctcggtttcgcttaactcgcccactagcaaagatggttctgttgacaacaaagttggtcgtgatgtgcagaaccagtccctttttagccctcaagtcgactcttcctccctactgtacaatatggtacctaatcttacctcaaatgttgctgataataatatatcagcgtttccctctggatcaacatatctgcaaagtccaatgtatggttgtctggatgactcttctggtttattgcaaaatacaggagagaatgatccgacaactagaacttttgttaaggtaagtataatcgagtctactaaaaacaaatttaagcccttcctcatgtaatcattttttaaaattcaggtttacaagtcaggatcagtggggagatccttggacatcacccggttctctaattatgctgaacttcgagaggaactgggtcagatgttcggcattaagggtcagttggacgaccctgatagatcaggctggcagcttgtatttgtcgacagggagaacgatgtgcttctccttggagacgacccgtgggagtcatttgtgaatagtgtatggtacatcaagatactttcacctgaggatgtgcataagatgggaaagccaggaaacgatccacgctacctatcttagctacctatcttaaatcgatacatggagctctttctgctactttgcttgatggttttagttgctgggttattatgtcagaaattttatgcaag

SEQ ID NO: 32599 - DNA, 2475 bp, Zea Mays
ccggctgttctccaaccccacggcggccccggaccgcacccaatgtacgaacacctccccgcgttcccgatcgcgccggccgccgtcggcgactgccgcggcatccccttcgacccttcctttctcccgcgcctcctcctctccgccacctcctgcacctcccccttcctcgccgagcgcgcagtctccgccctccacgcgaccggtctcaagctcggcgcgctcccctcctccctcccggcctcgaacgccctcatctccgcctactcccaagcggacctcctcccctccgccctccgcgtcttctccctcctcagccacccctccaccgcctcctacaccaccgtcctctccgcgctctcccgccacggccgtccccacgaggcgatctccctcttcgccacctccgcgtccgcggtcgcccccgacgccgagctcctctcctgcctcgtctcatgctgccgccgcgcgtccgccttactccccgcgcgcgcggcgcacgcctacgggatcaagaacgtggcggcgctggccttctacgcctcggcaggtccggcgctggtcgccttgtacgcgagccgcgggaaggtcggtgcggctaggagggtgtttggctacatggacggcttggacgtggtgtcctggaacgccatgatcggcgggttcgctagtgccgggatggacgaggagtcgtgggcctgcttccgggagatgcactcgagaggtgttcgagggaatgcccgcacagctgtggtggtgctgggatcttgtgacatggagtccggcaggcaggtccatgggactatagtgagtagtcatggtggttcttcaaacgccattttgtggaacgcgttgatgagcatgtattcgcgtgccggctgtgtcactgatgcagagagggtgttcctggagattgtaaagaaggatgttgtgtcatggaatgtgatgatcggagcgtttgcgaagaatggatatggagaaagggcccttgaatttgtggacatggtgttgcagtgtggtatgaagccagactctgtgacattcacggccgttctcatggcatgctgccattgtggcttggttgatgaagggcttgtactattccagcgctttgtgtcagttgttgggctcgttccaactatggagcagtgtgcttgcattgtggacttgcttgcacgtgctgggaggtttctggaggccttggaatttatcggccagatgtcagtgagaccaaatacagttgtctggggtgctttgctgtctgcaagtaagatgcatcacaacgtggaatttgcaaagattgcatttgaacaactggttcaggtggagcctgagaatgctgggaattttgtgacaatgtcaaacatatatgcaaaggctgggatggtagaagatgcaaagagagtgaggatgatgattgatagtgtagagttagcgaaaccttctggaaaaagctgcgtggaaattttgtagtaaagcataagactccatggacttgtcagggtttcacatcttcaaagaggaaaggattgcaacagggcaaaccaaatcatgcgattagtgatatgaagagacttgaagtgcctgcatgttttgatgcaaccaggaagctgactgaagataaatatcagcaaatgttaccacaagagatataataaaacttatccagtaacatatactgatctccttattatttcacatgaaatggtggcaaaataaaacgtatccaggatgaggatggagtcaattcaaaactgctgctgttccctgcatgcataactcatctcccagcacccatccggtagaagtactggcgacaacaaaagattgatatggagaaagggctccttgaacttgtagccaatggtttgtgacttataaagacaattatgcatcatggacaaaattttatctagttcttagttttgatcattcctgaatgttcttgtttctaatgagagctatctcactgagtcaccaggtcgtgacttcaaagcaatctctccatatttgcgagggaagacttttttgcctcattctctagacctcactcatgttggagcctccgacattgggtctgtcctgcctcgaatgttcttgtcttagagccttcatagatgaagggtatttattcagtgatacagtagtggggttcattatctacaccactttgatcaataaattaatgttttatattcacatacaagcttcttgttgtgcatgtatctattgtttcttttggtaaaatcaattgcgacacaagtctaggctttgactgttttgttgcccatccttattcttatcttcagcgaaaggacctctagccgagttggttagatggttcgagtaacactccttagctattgagttcgaatcctagtaagagcgaatttcaggttgagattaaaaaagatcactcgttagttctctggtcgtgtgcacacgagatggactaacttatggggacggatcctc

SEQ ID NO: 32600 - DNA, 4256 bp, Zea Mays
gaggagccgagccccaccccatacatccgcgggaagccgctgcccgcgcgcgcctttgcggtggtggcattcctcgaggcccgagttggccagctctccccgtcgtcgtccgtccctctcctcgtctccgcctccccggactccggcagggagggaggtgaacgggccggggagagagatggggccggactcgtcgcccaagaagttgagcctcaaggagcagcgcgctgcctacctccagtggttcgccctcgccgacgaagacggagatggccgtctgacggggaacgatgcgctcaggttcttcgccatgtccaacctctccaagcccgagctgaagcaggtttgggcgatcgctgattccaaacgccaaggatatcttggattctacgagttcatgactgccatgcagctggtttctctcgcacaagcagggaacgaaatcaatcaagacacccttccaaatgcagatctcgagaagttgcagctccccacaatggatggtctggctaaaaaactaaaaaagaactctgggagcaaggtcgagtctgctattgttgcatgtcatccatcagaagcacctactatgactgccagctggtttaactccaagtcaggaaagaagattcctttgaaatcagtcacttcaatcgtcgatgggctaaagaaatcgtacattgagaagttgaggcccttggaaaaaacctatcagttccatgacttcgtgtctcccttgctgactagcagcgatttcgatgcgaagccaatggtcatgctgttgggtcaatactccacggggaaaacaacattcataaagcatttactaaaaacaagttatccaggcgctcatattgggccagagcctacaacggacaggtttgttgtcatcacttctggaccagacgaaagatgcattcctggaaacaccatcgccgtccaagctgacatgccatacagtggcctgtcatcgttcggaacagcatttttgtccaagttcgaatgttctcagatgccacatccactgttagagcacgtgaccttcgtggacactccaggagttttatcaggggagaagcagcggacgcagcgcagctacgatttcaccggagtcacgtcgtggtttgcggccaagtgcgacctcatccttctcctgtttgatccgcataagcttgacatcagcgatgagttcaagcgtgtgatcgggtctctccgcgggcatgatgacaagatacgcatagttctcaacaaggccgaccaagttgatgcacagcagctgatgagagtgtacggagcactgctgtggtcgctcgggaaagtcctgaacacaccagaagtcatgcgtgtctacataggttcattcaacgacaagccgatcagggagacagcggctgggccgctgggcatggagctgttccagaaggaacaagatgacttgctctcggacctgaacgacatccccaagaaggcctgcgaccgtcggatcaacgagttcgtgaagcgggcaagggcggctaaagtccacgcgcacataatcagccatctgaagaaagagatgcctgcactgatgggcaaggccaaggctcagcagaagctgctcgacgggctggatcaacagttcgccaaggtccagaaggagctgcacctgccgccaggggacttcccgagcgtggaggagtacagggagctcctgagcgcctacaacttcgacaggttcgagaagctgaggcccaagatggtccagggcgtggacgacatgctggcctacgacatcccggacctcctgaagaagttcaggaacccctacgactgaagccggaaacccactctcttgcctcctcggggaggggtggcagagcttcagcgacggacgaggaggacgtgccggtgcagcagcggttcatctggtcagggaagagaaagatgcggcgccttttcacgactccatctctcttctggattactcagtgctgcagcgtaaactcgcgcgcagttccctgtaaaagctggagcttttctgagcgtgtaggtgcgttggtggaacttgggcccccacccaagatctcacctatctgcactgggctggccggctgtgcccgtcgccaaccaccgtgcttccgccattgcgtcgccgcataaccttggccaagcgtgaacttcatataataccaacttcatataatccgccattactggcaaggcgcatgtcccatgtcgtccgtagaactcgggctgatgacgggtgccactcaacagtcaacacacgggctagggctaattgtatatagaatttcatatactgccagcttcagctttcacagcaaacggaggttttattataaaaaaaaacatcgtgttccaaaccgccggtggtcttccttcctattcaacggctaaaaagtctattggtgtactttgaaaagctgcaggaggaggagagtaaaaaaaaaaaaaaggtggtgcggtgaccgtaggtctggacatgcgtagcgtagccaccggtgccgtgcacgcggtacagcagcagcagcacggacgtgcaccgctgtgtgtcgcttccggacccgtctacgttttacgtggtcataccaaagactccagtcgccaccacagaaatccaaggcgccagccagcacaaggccaaaggccaaaaccaagccggcgggcccgctttccgtcccgtcagattccctcccccgtccgtccgtccgtctctgccccatccctcacccctcctccctactccctaggcagcaaagcagcgagaaagcagctcgcagttcccacccaccaaaccaaactctcctccacaacctcccccgccgcccctcctcttctcggcttctcccctgccttgttcggccccaaaacggcaagagccgacgccagcaaaccctcgggttcgggagggaaggaaggaaggcacgagcagcgcgcctgcctacccgcagctaaccccaaacagcaacgtcgtagccgacgagagcctccgccacctacccaccaactcccgcccgtcgcctccgcttgggttctcgtcgagcagttggtgggcacctaccgcatccagagagagagtgagccactgagccagggcggcaagggggagatgaagaagctgtaccagggcggcaaggggcggcgggtgcacccggcgccggctgacgcatcggcagccgtggcgctgccggccgccgtgctggccctggcgtccgcgctgacggccgaggagcaggaggtgctggcctacctcctgtcctgcggcggcggcggcggccggcaccaccacggccgccgccgcggggcccacccgccggagatgggctgcgcctgcttcggctgctacaagagcttctgggcgcgctgggacgcgtcgcccaaccgccacctcatccaccgcatcatcgacgccgtcgaggaggagggcggggcggggggcccgcgccgccctccccggcgccggcgccgcggtggtggcggtggtggtggccgccgcggcggcggcgacgctgccgacgaggacgccgcggagacgggccccggcgtggaccacgacaacctcccggcgtgcgacggcggctccgggatggacagcgagggcggtggcagcgccgagaagagcacggtggggaggctggtgcgcttcatcggggagaaggtttggggcgcctggaactgatcgggctgtggcccaccgccgccgctcgccggttcttgtagattaggggaaggggaccaccagcaaggactgcgtggtctcgtcaaggtcagtactcatcagtgccagtagtggctgttttgatcagggagcgcctcctgctccacgccctttttcctcttattgcttttgtttaatcatggcggatttgttgcactctgatgatgagtgatgacgagcatgccaggattggaggagggtggattatcccatccaatttctcacctctcttctccccctcccctcagcccccctgtaccatatttttgctcctttcgttcggtagtccagttcaacaatgaacttgcaagagaactctcgtcaacattcaatgtgccctgattcatatgcgttgaatgtcgtcagcatttgattcttcctgtcacgagtgcggactgtgatgtttgcgcgaagctttgcacaaaggttagcatcaagctatgcctgcctcgttgtccacgtctgctgcctgcctgcctgtgccaattgccaagggagggaagaggaaagcatagcatcggtgcaaaggcgttgttttttc

SEQ ID NO: 32601 - DNA, 7277 bp, Zea Mays
ccgcgctcttctttgttgctgttgttgttgttgggcaaatcagtagggtttttggtttcgccggtcttcgcttcgctgccgccatggcgtctcctcccgagcgtgaggtcgccgcactcgagagctgcttccgtgccctctccgcggctgacgccgtcccagcggttgtcgactgcgtcctcgcttcctccgcctcgtcctccccttcccaactcttccacgcgctcctccgttcctttcctccctcccagcgggagcagggtctccaagcccagtctgaccgtcatgccgccatctgccacgccgcggcgctccgccatttgctcgcgcaactcgacagcccccctaaggttagggaggctctgcgcttgctgctgtggagggtcttcctgcccttgctccaggatatcattgaacccactcatcctgcccactttgacctggtaatcgagatgatgtgcaatgcagtctctgacactggatgctgggacctgcttggagctacaatagtatcattctgcattcggtcatctgttgttgccatgggtttgtccgccgcagacgccaactctatactttaccaaagtataatggaagcggattttcctgcggagactctctcatgcctactaccgctctccaattcaagcagtgtgttagcatcattgctggtggacatgctggagaggcgaaggactatacctacctcccaggaaggtgctgctgatctagctgcattggttcagaatttgacatgggaccttgccaagttggtactcaagatgtttacacatgctcaagagtatcggtcttgtgccactcgggtccttcttcagcctgtactcatatcgcttacagatgtttcttctgtcactgtatcgtttggtgcagtccagcataagctatcgaggtttggtttcctagaatgtatatggaattcctgtatttctctatttcctttggggcctggtgagcggcttgatgcatacagaatactctctgtatacttctcaacactgaaatcaggacatcaagccgctgtcttgggagttggcattgtccaggaatttgaccttaagaatgtcagtgaattctgggatgaactgcgcaggggactggttgacaaggattctttagtaaggaaacaggccttctatgtcttgacaatatcacttagcatctttacctcttcatctggaaatgatagctgccagcatttttccagtaggagcccagctgctttgcctgctcaaatcaaagcaaatgctggggaaacaaaaagggaaaggtgggctaacaaagaagccaagtcccttggtgttggagagatggaccaatcaggtgaaaattgctcaaatggtcaagatcggtggaaggtctttttgttactctatgagatgctccaggagtatggcacacatttagttgaagcagcttggacacaccatgtagtgcggctgtttgagtgtacgctacaaaatgactatctaaatcacacctcctgtggagcctttcatgctcagatggaatcttgggaaagaattttgtactggatggcagttttgtgggagcgtgggttcagtcatgagaatcctcaagtgagatgcctggttatgcaatcctttttggatattgcatgggaacgctacaaggtttgcactcatataattccaaggggttttgtgctcggccctctgatacgtggtttgaatgatgtggttcatcataaggattttggcattgggggtgcttatagttcgaaaaccataaaagatgctcagagatttttcagaacttatacccacaacttggcgagatgatcactgctacatgtacgactacaatggtagactcaagtacgactaaggtcatctaatggctcatcattcattagttcagaataagaggcaacaacatctatagattacgttggtcgtactccagtcgtacggtgaccgcatacatctggtttggagtctggcttctgcggctaagcaagattcatttggccgagcaggattgatgactcttgcatcctgtgttgcttcatgcacacgtcagtcagagacaaatgatgtgccatgtgctatatctgggaaagcagtgaccaaatgtgatggatgtgtacctacagaagttaggccaacagatttgttagatgtcttatggattctcagtgagaggagtaaacaacactttaatccaaagtatcgtctgaaagtttgtgaacaggttatccaagttgcaacatcactgataaatgccactgaaattccacttaaccagcttctgcatttcattgccacaattcctcgagagttcactgattatattggaccattgagagtagtagttcaaaaatggttttttcagaaggaagaatgttctcctggtgacactttgttgagtaagctgatcgatttctctgccaccttcgtaagtcaaaaacggaatgaaggttcgaatgtttttgatgacgaggatgtggatgcatgggaagctgaagcaaggaggtgggctagaacccttcttcttgtaaccgaggaggaggaacatttgaaacgaatcttcaggtttttggaggcatatggctacaagctctctgagcaatgtcccagtggagatttcatacccataaaattttttatcattgttttaagcttcattgaggaacttgagctgagacagagaaagcttgtttgccggagtaatacaatcttaagaggttcagatacattaaatggattagtgctcgatgatctcaacaaaatgttcacagaatcacttttgctaattttggaaaatatggtggcattcagtaaactgtcttgctccattttctggttagatgtggacaacaaggatttacccccttctatcaaaggaaagcttggaggcccaagccagcgtcgtttggctacctccattacttcttcagtattacagggtatttggtcaatgcgatgtgttagttctgttgcctcatggtgtaatccttacaactccgatgattctgtttcttctgcattttccgtgctatgggacttctatttgaatgttacccatcactccactattgccaatgagatcggagctgaacttcacctggcagcttatgaagctcttgcctatgttctggcagttctatctactgcttccagtactcagtttttggattttgtggaagcgaagcagacagatcaagcccacaagttttcattggacattttggtcaccactttccttgacaacatcaaccatcttcttacagagggaactctgacgcgaagcagaagagctgttttgatgacttggaagtggctttgtatggattctcttctatctatttcaagctgctatagtgacaatgaatctcaaatgaagaggttggaacctttattttctgattcaaccctccgatgcatttttcttgatattatcgaaagccttgaaaacactggtgaaaattctgtcttatctatcttgagatgtgtgagatctgttttgagattgctacacctgaatgagggcaacacaattttttcctctttaggcatcagctatgagatgatgatgcaattagcaaagtcttcctggatcttgcaccttaactgcaacaaacgccgagtggctcccattgctgcactactatctgcagtattgcacccagcaatattttgtaatttggaaatgcaccagacaaatgaaaaagggccaggccctttaaaatgggtcagttgcgagttctcacattgtctttaagatattttactgttttggatgcaacaccactcttgttctttaactgagtggtcagcatacagaaatgtttagctgctgatctgctgttttgtgcgcattagtttgctagttcaggtctttctaatatgttccgatcctcaaattttatagtgtaaaatttagagcccattaccaccactagtttcaactctagcctaccccaacttgatagggactagaagacattgctactgttggtatccttgaataaggaaatcattcttctgtcttcactttttttctcgcatcgttgctacatgttcatttactgatctgcccatgaccttagtgcaattcacttagaattacaaaggtgttttagtaccaagcttttcttgataaaagtgatgcaattaactcatctatctgtcttcagtttgttgagaatcttcttaatgaaggctcaaaaagtcctcgaactattcgcctagcagctttgcatttaagtggtctatggttgatgtacccaaaaactcttagattttatatggaggaactgaagctgctctcgttatacggatctgtacttcatatatattgaatagtggcattcgacgaagattttgaagctgaactctctgaaaaccatgaagcaagatttgaggtttccatgctagcacaaagtcctgatcgtgaattcacagaggtgttcattaatacagaattatatgctcgtgtttcggttgctgttctctttcatcagctttggaaacaaatcaaagaacatagtatattggaaactgaagaagctcttgaatgcggcaaactatttctactagaacttctggactcagcggtgaacagcaaagatctttcaaaagaactctacaagaaatatagcagtgtacataggcgtaaagttcgtgtgtggcaaatgatatgtgttctatcacactatgtagaagatgatattgttggagaagtgacatctagcattcacatctgtctttatagaaataatttgccagctgtccggcagtacttggagacgtttgctatactcttatacttaaaatttccaaccttggcagaggagcaacttattcctatttttcatgacaaagggatgcgacaacaggcactatcttcatatgtttttatagcagcaaacgtcatacttcactcaagacagtccgtccagatataccacctgaatcaattgcttcctccaatactgccgtttttaacatcccatcatcacagtttacgtggttttactcagtgctatcgaggttgtggcctactctgcatcccgaaacttcagaagatgcagtctttgagaggaggtgctttcaagaattgaaagattatttggcagaaaattctgactgtgttaggcttagagtttcaatcgaaggtttccttgatgtctttgatcccaatgcatctgggaccccccctggaatatttagcgcccgtcctgaggtgtctgacttcgaatgtgttccggtgtcagtgatggagcgtgtgattgagttcctgaacgatgtgagggaggacttgagacaagctatagcaaatgatacagtaacaatcaagaatgaggatctcgcggtgggagagcatcacaagagtgacgagagcgtgtctgagatggtaaaaactggtcaagaggtacttgatttccagaagaaaataacaccccataggggggactccgagcaagcattgaacttgaacaccagaggtcattcaggcgttggtgacgaatacatttcaagaataatttcagagatggaggaagatgaccaagttttcgacctagcgctagaagcaagattgcatgctgcggaaacgatcaagcagagccggcaagaactgatcgtggttgcgtcattggtggaacgcataccaaatcttgcggggctgacgagaacgtgcgaggtattcttttttttgggtgacttggtgtatcttgtgggggacattaaatctcgcctgcctctgcctgacaggtcttcagagcagccggtctggttgttgccgacaagagcgttcttcaggataagcagttccggctgatcagtgtgaccgctgagaaatggctgcctgtgacggaggtccccgtggacagcgtgaaggcttacttggagaggaagcggggcgatggttactcggtgattgggctggagcagacggccaacagcatgcctctggaccggttcgggttcccggaccggacggttctggtgctggggcgggagaaggaaggcatccccgtcgacatcatccacattctggacgcgtgcgtggagatcccgcagctggggcgtggtgaggtcgctcaatgtccatgtcagcggcgccatagccgtctgggagtacacgcgtcaacaacgcaatcagcgttagcttgttgcttgtttttgctccattgaccattgacgacgaagactactactactacctgggagggagagtagaaatcaacatgcagcactcacaggaaggagagaaagacctgggctgggctgggccgacagtaatgaacgctagcccaccttcctttcccaccaccaagacgtacaagtcagactatattacttcatttatttgtgctaatatcgtaacgttttattgtgtaagcaatttggtacttgaagcctgcctgcatttggatttggagcggcatcagaagttttttaaagtatttattcgtagaggggtcgatcgagctcgcccttttattgctgcaaatatataatacacattattactgctgcaaacataagattacgttacattacattaaatgaaaagctatattacctcccgttctcgttatcccgctagttcatttttaacgaaacagtgacaaatatgaactaaacagcaacaaataaaaagaaacggaggggtactacgcttttttttatttcagtgcgcgcgtgtctgctccagacggtgctgctgcgcccagtccttgacgatgtgcggctgctgacccgacgacgaggtcgtggtctgaaggtagcggtacacccacgccagcacagccaccgcagccacgccgaaccctcccgacgaaacgatgcctaccgtgagcagcgccaccgtgatggccgccggcaccagcacggggctgaagatcaccatcaatggcgtcgccacgatgagcgccagcaccgtgcccgtcaccgccagccccgacaacaacaacatggagaaggctgccgtggctgtggctaacgccttggccaccgccatgggcgcgggcggcggccgctgctgctgctggtgaccgtagtgggtggcgttgtagtcatcgtcgccgtagaggcccctcatgtagttctctccgacggcctcgcttcttctccctgcacgatggtcatccgcatgatgagcagtggccatacaagctctggctagctagctagctagtatacaatgattcaaaagaaatagatgagtggagcagctagtaggttcttgcataatatatatatagatagatagataggataaggactgga

SEQ ID NO: 32602 - DNA, 2565 bp, Zea Mays
tcttcatcttcctcgcaacgccgacgctgcaacttccgctccctccccgactcgcgctcggcacgcaggcaggcgactgcggtggcgctcaggctcgggctctcagcaacggcggggcagtcccagactcagcggctccctctctccaatcgccttgcgccctcgctccgttcctctgctcaccggccgattctgcgtgcgcgcctcccgctcccctatcgcctcggtcgaacgtcgacggcgcccggccccggcggctgcattgcgctgcttgcggccggcgggtagcgggagccagcaggctctgctcccccaaggcggccgcgccgctttggttgcaatattttccagcatagcttgctcacctacttctcaatttagaagacttcaatttctggatctgagcatcaaatcaagaccataccactttagtcagtcctgtctgatggcactggctgcagctccagccagtggtgattcacagagtggtcctcagaggaactatcaggttgttgtggctgccactcgtgacatgggcattggcaagggtggggtcatgccatggaagcttcttggtgatcttaaattcttcaaagaacttacactaactacaactgatcctgccaaaaagaatgcagttataatgggaaggaaaacatgggagagcattcctgttaagtcaaggccactgcctggtcgtttgaatgtcatacttactcgatctggtagttttgattttgcaacagtagagaatgttgttatatgtggaagtatgaagtctgccttagagctgctagcatcaactccatactgcttatcaattgagaaagtttttgtcataggaggtgggcaggtactgagagaatatttgaatggacctgcatgtgaggctatccatctgactgatattcagtcaagcattgagtgtgatactttcatccctccagttgacttttcagtgttccagccatggtattcatctttcccagtggtagagagcaacattaggcattcttttgtgacttttgttcgtgttagaaagtcagtggcagaaactcatgagtcaaatggcaaggaatcaactgagattgataccaagaatgacaaatttgaaatagagaatttctcttttctccccaagatagtatatgaccgccatgaggagtatcaatatctcaatcttgttgaagatattataaggttcggtgctcagaaaaatgacaggacaggaactggaacattgtcaaaatttgggtgtcagatgcgattcaacttaaggaaaaattttcctctgctgacaacaaagagggtgttttggcgtggtgttgtcgaagaactcctttggttcatcagtggctcaacaaatgcaaaggttttgcaagaaaagggtattcatatctgggatggcaatgcttcaagagagtatcttgaccgtattggcttggcacacagggaggaaggtgatctaggtccagtttatggatttcaatggcgacactttggtgccgaatatactgacatgcatgctgactatactggaaaaggctttgatcagctaatggatgtgattgacaagattaagaacaatcctgatgaccgccgaataattttatcggcgtggaatccttcagatctcaagaagatggctcttcctccttgccacatgtttgcacaattttatgtggagaacggggagctatcctgccagatgtatcaacgctctgcagacatggggcttggtgttccattcaacatcgcatcatattctcttttgacatatatgattgctcaagtttgtgatctttctccaggagattttgtccatgttataggggatgctcatgtctatagaaatcacgttcgagctctggaggaacagattcagaagatgcctaaaccatttccaattttgaagataaatccttcgaaaaaggatatagattctttcatggcgtcagacttcaagctggttggctatgatcctcaccagaagctagagatgaaaatggcagtgtaacggtggcttagctctggagcccccagccttggaacctcggtgggtgaaatcagtcgaacgaactggtactacataaaaaatgaaccggacatcgcactagcttgtttttggtgatggtgctgaatgttgtgcgggaggcgttttcccccgttattagtagcgatctgcgtgctatatatggtcgctgaagtcaaaattggctctcttttattttttatctactactactactcatttgcgagtgagagatggtctgggcacaccattcaattgcaacggcctactggtgtgttgccccccaatgagggctgtgacgattgcgccactacctcgtgagaaacatgatgtgaccgaaattgctgtgtacctgcatggtagaacaacgcactctttggtatctggttgccttaatacgtgacctggttaattcagtttccagtttggatgggcacaagatagcgatttgctgtggcgttttagttgttgttgctgtgctgggggcagaaagtctagtgccgtgcttgacgaagacggggtcaaagcgcttg

SEQ ID NO: 32603 - DNA, 3051 bp, Zea Mays
ctgggaaagaaacagagataaggagaaagacgggtttcttttatcgtcgcctgtcggacgtgctctgctgcagagtcttgcttcacccgtccggcacctcactctctggcctgctgtatatatccacctccctccggcctccatttcttctcgacttgaacacggccagcgtctcatcggctgggcgtggtctacactgcacgcacacttaccaccagccaccgcaagtgaatcactagccggaagacaggccaaccccactgctagtgctaggaatctaggagcgagaacgagagaccatgtcctcagaggccagcagcgtcgtcgtcgccgacgagaatggagcggcggagacggtcggcgtcgggcggtacgtggaaatggagaaggaccaagagtcgagcgcagccaagtcgcggctctccggcctgctctggcacggcggctccgcctacgacgcttggttcagctgcgcgtccaaccaggtggctcaggtgctcctgaccctgccctactcgttctcgcaactggggatgctgagcggcatactgttccagctcctgtacgggctgatgggcagctggacggcgtacctcatcagcgttctctacgtggagtaccgggccaggaaggagagggagaaggcggacttcaggaaccatgtcatccagtggttcgaggtgctggacgggctgctcgggaggcactggaggaacgtcggcctggccttcaactgcacgttcctgctcttcggctcggtcatccagctcatcgcatgcgcaagcaacatctactacatcaacgacaagctggacaagcggacgtggacgtacatcttcggcgcctgctgcgccacgacggtgttcatcccgtcgttccacaactaccggatctggtcgttcctgggcctcgtcatgaccacctacacggcgtggtacctcgccgtcgcgtccctcatccatggccaggttgatggcgtgaagcactccgggccgaccaagatggtgctctacttcaccggggccacaaacattctctacactttcggagggcacgctgttaccgtgtaaggagacaaaacacctttctttcttttttatatatgcatggtccccggaacaaagaagaagaaataacgcatcacaactgggaccaacgaaagcattggctaccatacattttgcttgcttcgtctggccattccatacagtttttgctccttggcgccatacccgtgcacaaggtcttttccggccttcaatatatctcccgtcccgtcgtctccgtctcactctcacagggcacggcaggcctatctatctcctttgatgagtttgcttgtacagtcaaaggagccactccgactactggctagtaggagagcgtgcattgctgctttacgtctacagagctcctgcgcttttgcgcttgcaaccatggagccctgactcctgagccagcctggcctggtagatgccgatacgataccccctctgcagatgcacaagcaagcatgcatggcacggacgtccaagtctctgcgtgcacgaaaagagaaaacgcaaatcaaagcagtactagcaattaattgaaaggtgactggactgaacgaacagcatcaacagtaattagtaatggtttgcacgcatatatatatacacgcagggagatcatgcacgcgatgtggcggccgcagaagttcaaggcgatctacctgatggcgacgctgtacgtgctgacgctgacgctgccgtcggcggccagcgtgtactgggcgttcggcgaccagctgctgacccgctccaacgcgctggcgctgctcccgcgcacggcgttccgcgacgccgccgtcgtgctcatgctcgcccaccagttcatcaccttcggcttcgcctgcacgccgctctacttcgtctgggagaagctcgtcggcctgcacgactgccgcagcctctgcaggcgcgccgccgcgcgcctccccgtcgtcgtccccatctggttcctcgccatcatcttccccttcttcgggcccatcaactccgccgtcggctccctcctcgtcagcttcaccgtctacatcatcccggcgctggcgcacatgatcacgttccggtccgcaacagcccgtgagaacgcgatggagccgccgccgcggctgctggggcgttggacgggcgcgtacatgatcaacgcgttcgtggtggcgtgggtgctggtggtcggcttcggcttcggcggctgggcgagcatgacaaacttcgtccgccagatcgacaccttcggcctcttcaccaagtgctaccagtgcccgccgccaccgcccctgccgttccccggcggcggcctcggcaacatcacgatgccattcaacggcgacgggctccctcctaccccggctccttcgccggcgcattacttcttccgccaccaccggcatcacagccaccaccgcgggctctgatgagagacgatgaaatgaacccggcttaccaccagtagtgcgtgcgtggcacactgctgctttagtttgagctgatcccttagttaagtctagcttaattagcacctgcatgcagcatcttcgttctctcctctagcttgctggtgtcgaacgcatgctttcccggtttcagtgactttagagaccctgcctgagcctgacacgaggggagtatcactgtatcagtactagcatgcagtctcttgtgttccgggctgtgtcctggcgtggagctcaaagaaggggaatccatttctacagccgcatagagctcgtcacctttgcagtctggtctggcagtattccaccactcagtgctgtatcattggcagcacctcggcgctggtgcatgcgctcacgagtcactcagggctcgccaagtagaactctggatgcacgatgcaggatctctttgccccatctctcggtcgccgtgaactgtgtattggcattgccaatatatacagttcacagttctatttcacagctttacaggctactcaaagagagtgacactatcattaaacgttctcagagtactgaatattcac

SEQ ID NO: 32604 - DNA, 1192 bp, Zea Mays
atggcggcggcgcggcggatcgacctggccgaccgttggcgcaggatgcaggaggacgaggacgccgatgacggcggcgagtcgtccgccgccaagcaccggcgactcatccgcgccaaggaggagtggttttcacattgctatacctttctgataaatttaccaaaagaagatcatatttggtgtggatatgctgatatcatgagccccttcatggagacattccatggcttctttgatgatgaagatgagaactcatctcttcgaataatgtggacaagagtttcccgagaaatgggcatttgcacacaatgtgtatgtgaacaccaccaggcacaaggatttttcaataccgaatatcagtcagatactgttgatccccttctgaaagtattgcggcttcttgatgaagagaggataacaggacatcttatacatatcaacacaaagcttcagctcaaagaatatgacccttcatgccatggtgcagaagttgttagcataatgtttgaagttctgatgtatcctgttctgttggatgaccaatcattggctaatcaatttcagatgttcattgaaaaaattgatgagacgtacgaagtgagcctttcaactaatcagcaataccccggtgtctatgccctacttttcttcaaaagctgtaaagctcgggctattgggcttcgattagctcgatccatggggaagctgaggagggcagttgatttggagccattgcaacccttattacaaaagtatattatctttttggaagcggaagtccttccatctacttcagaacattcgagacctagggtgcagctcaaaagagccgatgtatggcttggatttaaatcactgtatccttggatttcttgaggctccagcttttgaagatggaattctggaaaagtacccattcctgaatattgtacttaaccatgtcagtgatgacacatctgatttgtcgtgtgctgtaagttgcctcaaggcatcatttgaaatgctcggcatgtttgttattcctttacttgactgtcctcatctaggaaacattgtaaatatgataggtcagttatctgtatgcagtcacttgaagcgctacaagacggtgaacatgaaaagcaaaggaggaacattttgtattttcttcttcatcaagttactcggagtagtaatttcagtgccttga

SEQ ID NO: 32605 - DNA, 899 bp, Zea Mays
attgaattggccctttagaatttatgaagcttgagatatggttgctgaaagggccttattcctgtggaataatgaacatttgttcgacctgatctcccaaaactgccaagttatcctgccaatcatctatccagctctggagaggaatgcccgttggcactggaaccagtcagttctaaatgttacaatgaatgtcaggaaaatgttctttgacatggatgagagattgctgctggcttgtcagaccaattttcaagaggaggaaaagaagcgggctgcatctgaggagcgaagaagacttgtgtgggagcatctcgagaggaatgccgcatttcatcctgtaaccggagacattggctttgcagttcctcctacatctgctcctctggttgctcccactatgacatgattaataatgggctcatatgtaattcataccgcctgattgttagctaggtttgggtgtttggtgttgccccaggaattttgttgcctttgtaagccccttgtgaagtctgtaattaatagatgctggtttgacaatgaatgcttgattctttggtgtactctcaagttatggtcatatctttgtatctcaagataatgcctagttctactttgctggaggggtgaaaaggtgtttccttagaaaatttccaggggagctgaacagctgatgctatgcacatattgatgcatttcttttatcttttgggttctcatggatctacacaaatgtcatgtttaatgggtgaacatgaaactgaggtaagttcatatcacttatcacgatttgataagtccaatgtttttttttcttttttactcgtaagggatcggaatttgcaactagaatttgtagttgttcatggaaattgtaagtcctgtcaggccatctt

SEQ ID NO: 32606 - DNA, 329 bp, Zea Mays
cggcgatgagattggacgatgagtgccacccactgccaacagtggtcctaggcggggaagtcaactccggtgaggaattaactctgcagttcctagcgccagtgccaataaccgacccaaatccgcacggtgtgccccgatgatgcgccctcgccagcgccctagggcacaacacttttcaaccggacttctgcccacggggaaagattctatggttctcggcggggagattcacggctatggtggaggtcggcactgggtgtgggttgtggccagagaacgaggcgcatggccgcgggttttataccccagattgggggcaacaaccc

SEQ ID NO: 32607 - DNA, 1210 bp, Zea Mays
aatcagagaggaggaggcaacacggcacgctaacaaaaaccagaccacgcggaacggcaacagcaagctgcctctctcccttgcgcgcgcgtgatttcatcttcgtccgatcccatcccaccccaccccacctcaccggagcccctctccccctaactcctccggcagctgctccgatcccgaaccgtgattcgctcgatggcggcaaccgcgggcggcaacaagatccgcaacgccaagctggttcttcttggggacgtgggcgccggcaagtccagcctggtcctccggtttgtgaaaggccagttcgtcgagttccaggaatccaccatcggcgcggctttcttctcgcagaccctggcggtgaacgacgagacggtcaagttcgagatatgggacacggcggggcaggagcggtaccacagcttggctcccatgtattaccggggcgctgcggctgccatagttgtctacgacatcacgaacgcggcctcttttacgcgtgcgaagaaatgggttcaagaacttcaagcacaaggaaactcgaatacaatagtggctcttgccgggaacaaggctgatttgttagatacgaggaagcaaaggcgtatgctcaagagaatggtctcttcttcatggaaacttctgccaaaacagctaccaatgtgaacgacgtgttctatgagattgcgaagaaactgcttcaagggcagcaggttcagaacccacaaggcgggatggttctcaaccagagaccacctgagaggatggtgagctcttcttcctgctgtgcgtgaagcgcaagatggaagtgtggatcacatgttccatggcctggactccaggagtattaggtgcgcggaggcggggaagaatgttgccgaatcttgtgaagtggttgccatcccagttgctgaaatcctgtacttttcactgcttgttcgttgccgtgttccttgtaaatgtgaatacttattactttggagactcacgtcacgtgttcttacggtgcatgatcgtgcttgtctttctatgacttgagagaacagagtgaaacaagacagattcgtttgattcacttataccaattacacgatgataaaatttatgggtttaaaggtttctagatgcaactcttttatcagtttgatgatcagtggggtgaacccaaacgacaatgttcagatgtgcatcagtttgatgtacagaa

SEQ ID NO: 32608 - DNA, 2517 bp, Zea Mays
attgttgacagttagccatatgaaaaatctgcactgcaatggcacccaattttttctccaaggcgaataattaatatttccctcaaagtaagtttcatatgtcgattcactgctatagatctcatcttgagaaaacttccaacgatgctgatctggtaccccatgctgaaggacaatgccacatacttggtcccgaatgaggatattccgtcaggacctgtactataatgctcccctgatgtcatccacccatctcctatagacaagggcctcagccaccgtcctattttttgtagctctttttaggattgttttcagcgggctaggcttgcctcggtttatcccttcccaaggcctcactcatgtgagagcctccggcactgggtctgtcaccttcagcaggttaggcgtcatttcagcaatggtcttcccattcagccacctgtcagtccgaattccaaaattgagttgattcaccatttcctacagaggtgacaacagcctaatcaaacaatacccgggtgttttgaggtacttcaattgttaaaccggccggcccaaggccttgtaggatcagtttatgtgcccaaagccatctagtttgcagggcccatccgaaaatttccagatcatgaatggccagacactacattttagtgggcgctgcacctttgcccaggacactaggcacttgcccccattggcttgcttccgccccttccaaaggaagcctcggtgcaatttgtccaattccttgttggcccattttggtagattggcaatcctgagatgaattggagaggctgccaagactaggggtggtaatggatcgtgatccaaatgattcttcataaaatggtagagctctaaataattttttagttaaaaaatgaatagaaatatggcccgatcctaatccgatctgatccttaaatcttatagtgcaaaatttagagcccattgtcacccctagtcaagaccacctcaacgagaattagacgcccaactttattcattagagaagctttccagcctgaaagatgatctgccactttatcaatcatgaactcagcaccttctttataggctttcggaatccaagatattatgacacttggtgtacaaatctgttgctttctccccatagagataaaccttgtcgttatcctgctcctttagaaataagactacataagttcagatcctggtataaagttaaagttatcaagctaaacagtgtgatccttatatgatctattttatatttatatatcttgacataaactagttagatatatatgtcagggttgatctcatctgactcggtcaaggggatcgagctagactcttatctcgcgtcctgatcgcaggcgcaacaaccttatggttacgaccctttcacgtcgcatatataaatacagggagagagaatcggcacgataaccaacgtttgtcgtagcctcctcttcccaacataccatgagatccgatcttctcctaagcacagttagtgaagtaaaggccgctgccgctacctcaccgttttgagttgagagtcatcaacctaatgatgtcgtcctccgatcccaaaggttcactatttttggcctgccacttctgatgctcgcagcatgtatgaggctatgtggcatgacataactgaccaatcaggagaaaatattgtttctgtcaccattcctgtaatgtttgggaggtctattgagattcctcaaagctgtaatggtgtcgcaaggtcggagcagcagattatatagcaatagctaggaactaccatacaattttcatatcagaaattccagcgatgagtatgaagatccgtgacaaggcaagaaggtttatcactcttatcgatgagttgtacaaccaccactgccgccttatatgcctagctgcctcatccattgatgatctttttcaaggaactgaggaaggacctctttttgatttagagagttttcagtttgaaaccgagtccgaagggacaaagctgaggagggatgttttggcggaaggcaatgctggctcaggaccatctactaccggccttgtggcgatattgtctggtcaagaagagatgtttgcgttccgcagggcgatatcacggcttatcgagatgcagaccccgctgtatctggagcgtgtgctggctgtacatccctcgttccgtcgtcctggtcttgcaagaaataacaggcctgcagttcctcagcctgctccggcggtttgaggtttgacagcctcgcgctgtaccattgctttatttcgagtttcgtgtgacaaggcaataaaaccaaccagagatggtaacagtgagacattgtaaatgattgtagaaaggttgtgattattaataagttaaaatttactattttaaacttcaacaggttacacatactatctgtcatttcatcttatattttaaactttactctacgaacggtacagtctaccatttaaaactatgttttggatgactatatggataacctggtggac

SEQ ID NO: 32609 - DNA, 1026 bp, Zea Mays
ctcctccgctccgcctcctgtttatagtcgcctgctgtcgcggcccctttttccttccaccacccaccggccaccaccctccgcgcttgcctagttgccttgactgcctgcctcgtcttaccaccaagctaagctagcgcgttccttccttttttcctccctcgcttcctgttgctcggtccatggaggtggcggcggccgcgacggcgggcgcgggggttgtggagctgcagctcgacctactcgaggcggcggcgccgacggagcgagaggccaagaggcgccgggtgcacccggttccagcgggcccaccggccggggcagcagcgccgggacgccgcagctgcagccgcaggcgccgcgccgtgcagcgtctcttccaggcctgccgccacgtcttccggggccccggcaccgtgcccagtcccggcgaggtccagctgctccgccacatgctcgacaggatgcggccggaggacgtgggcctgagcccggacctgagcttcttcagggctcgagacgccacacgtggcggtggcaccccgaccataacgcacacgacgatatacaaatgcccgaatttctcgatggtcatcctcttcctgccgcgaaacgcggtgatcccgctccacaaccaccctgggatgacggtgttcagcaagctgctcctggggtcgatgcacgtcaagtcgtacgactggctcaacactgctgaccccgatccttcttccgccacgagcaccaccagctcttcgtcctccgatggcccatgcctgaggctggcagaactggtggtggacgacgtcttcacggcgccgtgcgacacctccgtgctgtacccgacggcgggagggaacatgcaccggttcaccgccatggcgccctgcgcgatcctcgacgtcctcgggcccccctactccatagaggaggacagggactgcacgtactacgcggaattaccgtacgcacaccactcgccaacgtgggcacgcacttattgtggtgactatactcatcagcaaatat

SEQ ID NO: 32610 - DNA, 761 bp, Zea Mays
aaggcccagtccgatgactctggccctataactctgagccccatcggagactcggagtcgggggcgccagcgtctcgcctcgccgtcagcagcagcagcagctgcacctccattccacggcttccgtcgtgcgcttcgtctgcacccacaaaggcgacggcgacggcagggggaggagatgaagctgaagcagctggagggcctcttgggtggcctgacccagttctccgaccccaagctggagctggagcagtatgcgacgggccctcacatcgcgtcgcggatgctctacatgacatgttcttggtattgatattgacccacagtcacttgaacttgctcaagaaaatgctgctgatctggagctggacatcgatttagtttggtctgacataaagaacttaaatctgaaagggaagagcaagtgggaagttttgtccttagctgaccaaacaagttcgtcaacatatacctcttttggctcatcatttgagctactactgtcatgacacgtattatgatgagatggctcttgaatttctatgcttcggctttcataagccaaagcttgatgatgtaactaagctagcgaaaagaactgtgtgctacctaatttttcttttaagtatggacgcaacccattgaaagctaactttgctaactgcttatctatgacatggatctgaaaacatcagtttctagtatctctaaaccttcagaaacaatctttactgattcattgaccccttgccagagcgatg

SEQ ID NO: 32611 - DNA, 4765 bp, Zea Mays
cgaacgcagatatatcacctccgtcagaccgtcactccgtttccgtgcagcgacggaaaaaagagagtgaaaagaacgaaaccactcacccagactcgcagaggccacacgagagattaggagggtttgcccatccgtataaaaaggagcggccggcgagggctgcagtctgcagatcccgtctccgctttaccaaaacagctcctcgcccaatcattctctctgcctcgtcctcgcgccgcctctcatcttccgggagtcagcggcggcggaatatggcggggaaatccaagggtgggaagaacaaagggaaggcgcaagtcgtgggtcactccgcctcagctgagccagaggtgctggcgactgatggagccgaattggttaatccagataacggggaagtaagcgaacccggggaagtaagcgacccccctgccacggaggatggcgtggcagatgtagagaaaggagacggggatgctccggaggttgtgcagtctgcaaaaaagccagctgaaggagagcttcatctgtaccctgttcctgtcaggacacaatctggtgaaaagctcgagctgcagctaagcccaggagattctgttattgatgttaaacaattcctcttggatgctcctgaaacatgcttctacacatgctatgatttgatattgcatactgaagatgggtcagctcatcagttagaagactacaatgaaatatctgaaatagcagatataacttctggtggatgttcactggagatggttgctgcaatatatgatgagaggtctattaggtcacatctccgacgtgtgagggagttactatctctgtctactcttcatgtttccctatcgacatccttaactctgcagcaggagtctgcccagggaaaatctgcagattctggaaaaagccctattcaggagcttgatggtttaaattttatggaggatagtgctggtgctctcactaatttattggcatctacaccagcagagataaaatgtgttgaaagcatggttttttcttctttcaatcctccgccgacctatcggaggttacatggagatctcatctatattgatgttgctacattggaaggaaacaaatactgcattactggaagctccaaatctttttatgttaacagtagcaacaaaaatatatttgactcgaaacctacaaaacaaggactggaggccagcactctcgtaggcctactacagaagatcagtgccaaatttaagaaaggttttcgtgaagttttggatcgcagggcatcggctcatccatttgagaatgttcagtctttgcttccagtgacttcttggctaggagcgtatcctgtgcccgaacatagaagggatgcagccagggctgaagattctgttgtgttgtcatatggcactgagttaattggcatgcaaagagactggaatgaagaattgcagtcctgccgggagtttcctcatggcaatcctcaagaaaggatactgcggggcagagcgctctacaaagtaacatgtgattttgttgatgctgcagtaaaaggtgcagttggtgtcatcaatagatgcatacccccaataaatccaactgacccagaatgttttcatatgtatgttcacaacaatattttctttagttttgctgtcgactccgactatgaagacatttcaaaggaccacaagccagattgccaaaatgggtccagcagaagcaccaaggtttcctccccagatgtgataactaagccagatgcaaaccatggcaaatctgctgaggtagttgattcaaaatctgaagaggcacaactcgcagatagtgagcaggcgacatatgcttctgcaaacaatgacttaaaaggaactaaggcttatcaagaagctgatgtttctggccttcacaatcttgcgatggcaatagttgattacagaggtcacagggttgtagctcagagtataatacctggtattcttcaaggagacaagtccgattcccttctgtatggttctgttgataatggcaagaagatatcttggaacgaaacgttccattctaaggttgttgaggctgcaaagcagctccatttgaaggaacatgtggtattggatggttctggcaatcctataaaattagctgctacagtcgaatgcaagggtattgttgggagtgatgacagacattacattttggatctgatgagagtgactcctcgagattctaactacattggacaagagcaccgcttctgtgtgttgagacctgaacttatagcatcatttgttgaggttgaatccataaaacaatcgttgaagcaaaaggttccagatgctccagttgcaagtacttctgatgctaaggctacctctgttgaaggagatgacaagtctgaagaaagctctgttcatacacacgaggaaaatgacaactcaagctccgagattcttttcaatccgaatgtgtttacagagtacaagcttgctggcagtgcagaggaaatcgctgctgacgaagagttggtaaaaagggctggtacatatcttgtagatatagtgatcccaaagtttgttcaggatctttgttcccttgatatctcccctatggatggacagactttaacagatgcattgcatctccatgggataaatattaggtatctgggcaagattgcaggcatggtcaaacatttaccacacctatgggacttgttttctactgagataatagttagatctgcaaagcatgttatcaaggatatactgagacaaagtttggaccatgatattgcgccagctattgctcatttcttaaactgtttcgttgggaaagttttaggtgcttccacaaagagtagtcttagcaacgcacagtcaaaaactctgaagggtcacgaaaatagccaaactcaaaagtctactaaaggccctaaactgagccatgctgccgtttcaagaaaaagcttatcaacttattctcatctaacctctgatggaatttggtttagcattaaggaatttgcaaaatcaaaatatcagtttgaagtgccagatgaagctaggctttcagccaaaagggtagctgttctccgcaacctatgccgaaagatgcaaagaatcttatggaagcagggaaagtcaggatggctgagggaacattgaatgaggcatatgcattgttttctgaagccttttcactgcttcaacagattactggtcccatgcacaaggatgctgcaaattgttgccggtaccttgctatggttttgtaccatgctggtgatacagccggtgcaattgtgcagcagcatagggaactcatcataaacgagagatgtcttggtcttgatcatccggacacagcccacagttatggtaacatggccttgttctatcatgggctcaatcaaactgaattggcactgcggcacatgtcccgtacactgctgctgctaagtttggcgtcaggacctgatcatccagatgttgcagcaactctcataaatgttgcaatgatgtaccaggatgccagtaatatgaatactgctcttaggtatcttcaagaagcccttatgaagaatgaacgacttcttggccctgaccatgttcaaacagccgtatgctatcatgctcttgccattgcattcagttgtatgagcttatataagctttcaattcagcatgaaaagaagacctatgatatactggtaaaacaattaggggaaaatgactcacggactaaagattcagaaaattggttgaatacatttaagcttcgagaagaacaggtcaacgcccagaagcagaaggaccagggagctaatgcatctgataacgctgttaaattcttgaaggcaaaccctgcatttttacaagcaatgaaggctgctgcgctccaatcaggtgacaggtcagcaaatgtcaacaggtccctcaatgctgcagtagttggagaaggtgtaccacgactgagaggagtggatgagcgagctgctcgagcgaccgcagaagctcggaagaaagctgttgcaagaggcctgaatgtccgtaatggccctgcggcaaaccatgcgtctgatgaactagctcagattctcaaactcatcaatactgcttcggggtcttccacttcggcatctgcaaaaaccgaggaatctgcctctgaagggcaggcaacaaatggatctgttcaaaacggagctgcaaccgatgcgaagtctgcagatatcaacgtgccacctgcacctgccaaccaaccagttggattgggggcaacattggagttgaagaagcagaaatcaaagcaaaagtcgtagaaaacccgtgcctggaatttcttttatgactgcagttttggactttagggtgatttgtttttttacatttatagaaattccacgttcacgtggtggaagagttcatttgtttctgttggaggttcttaggagagttcaataatcattacgagaaagaagacaattgtttggaatcatcattgatagaccactgatgagataatggctaatccttaagctaataaatctgtagccggtacaacctgtttaatttttttttgtgcaagattagtatgctaatttgttgtccaacggaggtgttgcgcttatttctgttaatttttttagttcttctggtggtgcgtgactttgtgtgcagaacgattttttagtgatgcgcgtgccggcgtttgtgcagggttgtgttcgatatttcattttcagcatcgcgctgcccatgtgcaattg

SEQ ID NO: 32612 - DNA, 2761 bp, Zea Mays
caaagcaccagaagatatacagggggaggggttcctttcttctcccaccgtcgctgccgccagctgcccagctgcgcctcgtcgtcagagggttccctttcctgttcgatgtgacgcagccccccgctgcgccccgacggcggcggcctcaccggctggcgatgggcacgacaaactgagacctccctttccacccaagttctctttcctccttctctctctctctccctctctctgcggaaggtggcggtgctgcactctgttggtacaagagtctggagtgcagtgcagatccacccggccggacctggatcgatatctccgtttgttggttctttccatcgtgcaggttcaataaaaccaataaattctggggttcaactgaacccccaatccgagtataacggccactctgtgctgcaaggtttgtctaagattttcgtgcaataacggccatgtggaggctcaagcagttcatccccaaggagcagcccagccccagcggcctcgagggtcggacggtcgatgttggcaatgtcaaggtgcacgtccgagaggccattgctgagggtgggttctcatctgtctatgctgctcgagacctggtaaacccagcgaagcagtacgccctcaagcgcgtgattgtccaggacgaggagtcgctgaacctggtccagaaggagatcacggtgatgcggtcgctcaaggggcaccctaatgtggtcacactggttgcacacgccatactggacatgggacggatgagggaggcactgctgctcatggagttctgcgggaagtcactggtttctgtgttggagggcagaggagcaggttactttgatgaggagaaggtggcgctgatcttccgggatgtttgcaatgctgtctttgcgatgcattgccagacgccacctcttgctcacaggctcttgggtgtctcttgtatagaatttgctacttcaaatcagcatttgatggagaatcaaagctccaaatacttaacgggaactatcgcatcccagaattgccgaagtacagttcttctattacaacacttatcaaagacatgcttaattcttctccagatgccagaccggacatcacacaggcaagggctttgcttgattggccattcacttccatgaacttaggtgtggttccgtattaatgagttacttccattggagctgcaaaaggatttacctgatggatctccatctggatcagcatttgaatctcacactgccactgatgaagtatcaatgaggccacagcagatgagtggctcttcatcaagagagaatatcaagaatacctctcttagtgattcttccaacataatggtacaaagtcctctgaaagctatagggaacatgggttctatgggtgcattttggtcaactcaacatgctcaggagctatcttttgctgatgacaaggagccagcttttgataaagagcccattgatcaagtcagatcaaagcaatcacaggctaagaaccagaacacagcagctcgcaattcatctcggaagtctctgtctgcatcagttgatagttcccctggggatttcgaaattaggttttctgcaaatggctcggagtctaggttggaggaaaccaaaacggtaataacagagaataaaacaaagatacaaactactgccttcaactcctgtgcgtcagactttgataatatcaaaatgaactcacgaaacactactgacagtataaacataactagcaaattgaaagagcttcaattggaagcagaagtaactttactcaaggaacaattaaagatagcaaacctggagaaggaagaaatttcgttgaagtttgataagttgtctgccatttgctcctctcagaggcgagagatacaagagcttaagcaagctttggctgcagcttatgttacgccaccagctaaacagttcagagaaaattcaagtgttgaagtcaccccacccagcaaaagcctcgacactccgccgagggagaagattgaaggaacccctccagagctccggcaaggcctgtttacttcaagcccaggaacaccaagccctgacctgaaaacatggtcagctttccttgaagagccaaaatctcaagcagctgtgaagagtgtccaccccaggtcagtccgaactctgcgtgcatcaaacagcaacaaagccagctcgttgggacagtcaaatataagttctagcaccgatccatttgcgtttggtcaagatagttttaaggctgctccttctggaactgtacttcccctgttatcaaacatggggaatacttctcagctcagtaatctgaatatagaagaaaagaaagacggatcctaccaaccagatggatggactgggttttgattgtgctatagtaatttatgtgccaaaagagtcaagagttcatatggtcttggtggtgtggtatactgaaggtgcagagaggaatgcctgaactggtgtaggtatgtgtgacaatgctttttgtacaattgttctggtcctgagctagcatcgtgatgcgttcagttgtaactgtagtgcaaatgtaagttgcaacttgcaattaattgctagatattagatataggaagatgtttttttttcttatgtagacaagcttgtggtgtcatgaattttggaggcatgctatatagatatagccatctattataccatatcatgaataaagggttatcatttagtgacaattggccaatatactcactttaatactattcatg

SEQ ID NO: 32613 - DNA, 3683 bp, Zea Mays
agacctaaatcacctaatatatttcaatccggagagccaggcaatgtgacagctgttcattatgtcagtaatatttcctgtgttgttgtcaaccttcctcagaggttaagcctttttttgaatggcatgtgcaactgggatgctaggaaagcgttgcttgattttgattgggcttctcatgacaatacacactgtgatgaccaatccgtttggagatgcactgattgtcacgtgcttgattgcgaggaccataagatagcatcgatatcaaataaagaaaagtcatttgacctgcacgaaatcttcaagacactccctggtgttaggatggagaagaacatgcaggtagcaagaataacaccagacgaaagagcactggaactgggtatttggtccgtccctgatgatgtattgcataaagtactaattctactcaaacccagagatttggtaagagtggcagcaacttgtcatcatctaaggactcttgctgccactgttatgccttgcatgaagcttaagctcttcccccatcaagaggctgctgttgaatggatgttgaagcgagagcagaacgtgcatgtcctagcacatcctttgtacaaggatttctgcactgaggatggtttcccattctacataaatgttatctctgctgaaatatctaccggtgatgctccaacaataaatgatttctgtggaggtctgttttgtgatgaacctggcctagggaagacagtaaccacactatctctgattctgaaaacccacggaacaatggcgtaccctccacaaggggtagatgtgagttggtgcatgcataagcctgataaaaaatgcggttactatgaattaagtcccagcttttcttctaatagaaacagctcgtctgtgtcaaaaaagcttttgggagaggatgtgatagcagattgtccaagtccagatgattctgtctgcagtaccagatcttcaagaaagagaggtaggttactgagccctgatccaaccaaggtaatgttgcatgctgcgattgagaattccccatcatcatcaaacagcaaagtgcaaccaatgccagctatgcatatactgaagttcactaaaaactcgagacaagttaggaaaaaccccatggatgcatacagcgacgtttcagttggcaataaaaggaagattgacaccacctctgaggtaagtgagacctgggttcagtgtgatgcttgtagaaagtggcgaagggtatctgatggaacagttcttgattctaccacagtgtggttttgcactatgaaccctgatcctacacgacagaaatgcactgccccagaggaatcctgggattttaagagaaagataacctatttgccaggattttacaagaaaaattctttgcctggaaatgaggaaaacgtatcatttttcacaaacatattgaaagattatgttactatgatcaattcagaaaccaagaaggctttgttatggttagcaaaactttctcctacaaaacttcttgagatggagtttgttggtttgactcgcccagttctagatacacgtgcaactacaggcaagggtgcccatccatattacaagatattccaagcatttggccttgtgagaaagattgagaaagatacaacgccatgtgtcctcggatacccttaatgtctttgtgtggggagaccacaagaagccatctgctcacaaccttgcttgggactatgacattgtcataaccacattcagcaggctaagtgcagaatggggtccacagaagagaagtccactaaagcagatccattggttcagggttatactggatgaagggcatacactaggttccagccttgccctgacaaacaagttacagatggctgtcgctttggttgcatcaaataggtggatattaactggtacacctacaccaaacacaccaactagtcaggttgctcatcttcacctcatgcttaagtttcttcatgatgaaacttatggtcagaattaccagtcatgggactctgggatccataggccttttgaggcgcaaatggaagaggggcgtgttcgtcttgtgcagctgcttcagagaacaatgatcagtgcaagaaaagcggatctgaaaactattcctccttgcataaagaagataaccttcctagacttcaatgaggggcatgcaaaaagttacaatgaactggtggttactatacgccgaaatatactgatggcggattggaatgacccttctcatgtagaatcccttcttaaccccaagcagtggaaatttcgtgctgctactttgaagaatgtccgtttgtcttgctgtgttgccgggcatatcaaagtagctgaggcaggtcaggatatacaggaaacaatggatgaattggtgcaacagggccttgatccttcttcagatgaatatcagttgataagatattctcttttaaacggtgccagttgtttcaggtgtagcgtttggtgtcgcttgcctgtgatcacaccctgtcgacatcttttgtgccttgactgtgtagctcttgatagtgaaaaatgcacattaccaggttgtggatatcattatgagatgcagtctcctgagactcgtgcaaggccagaaaatccaaacccaaagtggccagtgcctaaggatctaattgaattgcaaccttcatataagcaggatgattgggatcccgattggcaatcaacatctagcagcaaagttgcttacatgattgagaagctaagaagtctgcgagaagcacacatgaatcatgggaataacataaccaacagtgttggtcattctaatacactatcttatcaaccacaggcaatgctggacaaagttataattttttctcagtttctagagcatattcacgtgattgaacagcagctgactattgctggaataatatattcgggaatgtatagtccaatgcctctagctagtaagagaagtgcacttacgaagtttcaagaggacccaacgtgtatggctttagtcatggatgggactgctgcactggggcttgatttgagttttgtgactcgtgtttttctcatggaaccaatatgggataggagtatggaggaacaggttattagtcgggcacatcgaatgggggctacgcgtccaatacatgtagaaactttggctatgcgtggtaccattgaagagcaaatgcttaagcttttgcaggattctaacgcctgcagaaaaatagtggataaaagaacaggcagcactgacaatgaaggagggcggtcccatcggagcctccatgattttgctgaaagcagctatctggcgcaactcagctctgtgtagacaggatctaaagcaacaattcacattggttgttggtagcactaactggattcgtgatttcggttccttccttctgatcattcctttgcaatagtgatagtatttgcttcgaagccagttgttgttctcgattccaaaccagtgttgatcggggttcttttgtgtaaataactgcgttccttttgttaaacgcggtattcccagttgaagaagccttatactgggcaatatcaggattctaccgtagatttgtgcttttactaataaccttatgaactttgaacagtttaagttgaagctaacgtttatactccctctgttataaattacccttcgttgtcct

SEQ ID NO: 32614 - DNA, 565 bp, Zea Mays
cgcggcggagccatggccggcgcactcccaaattcggctccatcaatcgaacttcgatccgaaggcaatatcacgcaaaggataacgatgcgatacgatggggaggttgctcaccgtgattccaagagtgccccgggccatccacggggagcggcggatcccagcgttcgacgatgaatcccggccgccacagggtcaatccttccctatccggccacgggtgttccaccggccagcacatgaagcttctggactcatcgcagacccccaaacgtcagtcgtggacggggacgatgctgacggcgtccctgctctcaactctctcttctgctcaggcgctggcggccgagaagtgcgtcgcgggtggattcgatcgtggaggccgcgcggtcagtgacaggacggatcgatttgaggtccgtgatgccggagttggccgcggcggtggtttattatggccatggcgacccgcacagagggatgaagcctcggcttccgcacaagataggagagggaatacgcggtggggaaatcgtttggaggagagcgagatgtgtggacgcat

SEQ ID NO: 32615 - DNA, 3480 bp, Zea Mays
aaaaatcaagccttttcttttcttttctttttttttctttcgttcatggggtccaatggcccgacctttctccctcgaaaggtgaagggctgaaggcgagaaagaagcttcaaaacgaatcatccatcatcttgccaacccagcaaccctgccaagccatcgcattccagctctgcctttgcaagatcgccgccactcgcagccagcaagcaaccattccaccacatacttttttcctccggtttcgtccggcggcgagcgagcgaggtagcgcttgtccatgccgcggccgtgagggtgatcgaacgaggactacttcggcctagcgcggggagccatgtcggcgtcggcgtcggcgggtaagctggcggcggcgctgcaccggaggacgcgcagggtcacgtccgcgctggcgtgcgcggccctggagtgggtcctcatcgcgctgctcctcgtcaacggcctgctggcctacgccgtcgccaggttcgcggactacttcggcctcagcccgccgtgcctcctctgctcccgcgtcgaccgcctcttccaggccgaaggcggtggcggcggcgacgctagcggcgccggcgcgcggtggctgcgggacgccctctgcgacgcccacgccgcggagatctccgcgctggggtactgcctccgccaccgccggctcgctgaggccggagagatgtgcgtgggctgccgcccgtcgtcgtggaaggagaggacaagcgacgcaggtgcgtgcgcctgctgcgaagctgctgctgtactgcgcgcttctcctgtgcgcgagctggaagatactacaagggatgcgcgtgtctcggagaaagaggtagaagatggcgaccagggctacgttctgctggctcaagatgatcacgaggaggagccggatgaggtcgaaaaccgacaacaagaaccgcagagcgaggtggatggccgacaacatctggaagacgaggtgatggctgccgttcaggacgaatccttggaattcatggatcaggtcgaagacatcacgatcgaggacgaccggttggtgtcggtggtggcgcttgacgagatgaccatcgccgatgattcgggtctccatcgggatgtagaagaggtggacggaacgaatcatgtagtagaagatgagcaggatccgagggatgtggatgtcggagcggttctggaggagaagaggatgttggattcctcggttgcaacgccggtcgatttgaccgaggactctgtcgtgcccaccagccccgtaccttgtcctgagacttcaacagacccatctcatcctgatcatagctccgtttcccaagacgatggagatgttcttgaagatacttccacggccgaggaagaacacatctttgtgcctcaagtatcggaagccgtttccgaggatgacaacagaacagctgctgaggtggacacgaactgcgaagtgtcaatcgggagcgatatatgcgaacgggaacaagatgagcatgtcgttccatttcaagatttggcagcatttgaggagctggttgctccattggcaactggagatgatctaccattgccatcggaggtcctagagccacctgaccaagaagcaggtgaagttgaacaggaggacgtgaccacaagcacgggattagacctccaaccaaatgaacagaacgagatcgaagaagacagagcacctgagacgccgacgaacagcgtcgccacacaacgctccgacagaatgttcttgctcgagaggaaacggtcgctgtcgctgtctctggatgggagcgtagcgagcgagatggaaggcagcgagccgtccaccgtggaccagctgaaatcagcgctgcaggccgagcggaaggcgctcggcgcgctgtacgccgagctggaggaggagcggaacgccgcggccatcgcgaccaaccagacgatggccatgatcaaccggctgcaggaagagaaggcggcgatgcagatggaggcgctgcagtaccagcggatgatggaggagcagtcggagtacgaccaggaggcgctgcagctgctgaacgagctggtcagcaagcgggcgagggagaagcaggagctggagagggagctcgagctgtacaggcagaaggtgcagcactacgaggacaaggagaggaggaggacggcgagcttcaaggccaatggggtaagccccagtggcagtggcacttccgtgtcgtccagcggcgaggacagcgacgggcactccgacgactactgcgagctcggcgactctcctgacggcggcaacgtccagagctcatcggatgctgcccttagctccatgagggaccaggacgacggcacgaagcacctagcggctctggacgattccttgacgtacttcgaggtggagagactctccatcctggaggaactcaagacgttggaggagaggctcttcacactggaagacgacgatatcaacaccagcaaagaagttactggccattcctcgagtgacatggatttaccacacgatggccttcagtcgccggagtacattctcaccggtgacaggccaagattcggaggaagggcctctatcagcagagggaagagccttctgcctctgttcgatgcagtcggcgacgaggcctgtgaccgaatgccgccatctgcaggagcaggagaggcagaccaggccgacgatgcagcaacgaagccggcatccgtgcttgtcaaagagcaggagaggctggcgatcatagaggaggtcgaccatgtctacgaaaggttgcaggcgctggaggcggacaaggaattcctgaggcactgcatcaagtccctgaagaaaggagacaagggcatggaccttctccaggagatcttgcagcaccttcgcgatctccgcagtgtggagcttcacgtcaagaatgccggtggtgccatggctgcaaattcagcctagcaagttcatctatacgcggtaacgatgacactactagcttggtatggattcagtcgattggattgtaggactccaaagcactgcattggtgatggtccctgcaaggtactgccggagttatagggaggctctgctcattttgcctgtgggccggaagcaagccctcccttttgtgctggtccagcactgccaactttttctgtcgtggtggtcgcctggtctggtcggtcggtcgtaggaatcattagcccttccaaagctgcacaaagctgaatcacggtgacagcttctgcagcatgcacggggcaaaagaaaaaagatagccccagtggagatgtggatgtttttttttcttgtctgatttaatcttttgattaactttggatttgtttgtgcgctgaggtagggagtcctcgtgtattttttttttggtgaggatgtagcttgaacggttggtatgtgcagtttgtgctttctcaatatccaggtttataatgaaaggaaaggcggtctcacgaagaaatccctgtggtaaa

SEQ ID NO: 32616 - DNA, 4799 bp, Zea Mays
tccggtatagactaggcctcgccggatgccggatcaccctaccccaccccaccaatgcgatgaagtgccactctgtggccgcgctctggtcgccgttgccgccgtcacaccacgtcaccgccgctgccacaaccccggtcgcgctcttcaccggcgccgccgacggcaccgtcctccactggccactggcgctcgcctcagcttccccatctccgcgcccgtcttccctcctctgcgcccacgctgctgccatcacctccctctgcccactcccctcaccggcctcccttcttgtcgcctgcaccgcgggagtgctctccctcttctccacctacgcacccctccgctgcctccgccgccgctccctcccgctctgggtcggctcaccctccctcatcgcctcgctcccgtccatcacctccgccgaccctcgagtcgcgatcctctgccacgctcccgacgacggccaccgtcacgtttcagcactcgtagtcgtcgacgcacgcaccctcgccgtcctctacaccgtcttccatgggattctctcggtcgggactccgaatgcgatcgcggttagtggcggcggtgatgatgcagtcagcgttgtgttggctgacgcgcagggtcgggtgcaggtgatgcccgttgccgagggcgcggctgtcgaagtggacccacccaggcgtctcatcgtgagctcggtggccagcgtcgcgtcggcggagttggcggacgagagggtggaagccgtggcgttgtctcatgatgggaagaacgtggcgttggtgctgaagactagatgtttgttgaaatgtgtcactgagggggttgtgctcggtgaggtatctctgctgggtacttctctttgcaaggacaaaaacacagtagacaaggtatgcactgctggagcttttttcctcagcagtgatgaatgggatgctcatgtttcagacgatggcgttgtggttaggaatttggtgttgtggagtaacaatggtgctgtcacaatgtacaggattgctcttggtagctcatactttgactctgagatagtgtgtgaaattcctagcaacttatctatgcaaggagagggactagaagttaaattttgctggtcaaatcagcatcttgttagggtggaatgttgctcctataaggtagctgggtcattgttgtggaaaccaacagtcgccatttggtgtatggatcagttcgaactgagtaaaacagtgaatacacaaaaaccacctatgaggaaaatgcttggagaaggtggtcttcagggagaagaatttagaccagagccttctcattctcaatacaatatcaaccgagggtcggaagtgatttcacagatgtgctcattagaaaggtatagagggacagtgtcttcgtcaatgttactttctgaggattcttatgctccatatgctgtagtttatggtttccataatggtgacatagaagttatccgatttctgaacttgtcacctgctgctgcaaaatttggtggtcgagggctttacccacatatttccgagaggttatttttggggcacaagggagcaattctttgtttggctgcacattacatgcatgcacaccctgactctagaaacttccaccgagcactcatatcagggagtttagattgtacagttcgtgtctgggatctagatgctggcactcttctttctgtgatgcatcatcatgttggctcagttaagcaaatcgtactaccacctccatggacataccacccttgggatgactgcttcctttctgttggagaagatggccttgtggcgcttgtttcacttcaaaccatgcgggttgagaggatgtttcctggccatccggattatgcatcattggtagcttgggatggagtaaaagggtacatagcttgtttatgcaagaatctccactcttgcaatgatgcaggtagtggattatatatttgggatctgaaaacgggtgctcgagaacgtgttatcaatggcactgcttctcagttagcgtttgagcacttctgcaggggtatatcgaaaaacacagttactggtagcatcttaggaggaacaacttcagcgtcttccttacttgttccaatttttgaagacatgagccacattcggtctcatgcagataaaaatggtcatgacatttcatccgtgtcaaccaaccttcacaatggatgtacagattctgtgactgtaaatgcccctacaacatatgattttaagggaaagacgccagctccagatgaagctcatgaattccatggagataattctgtatacaattcaggaaaggctgtttcttcccacagtatccataataaaaaaataaagtgccctataaagtgctcttgcccctatcctggcattgcaagtctgaggtttgacctcacggcaatcatgtccacacaaggcatgacaaacagcaatagtgataggcatttgaaagatcatctccatagtgagaatcctaaagaaatgttgcagcctggaactttagacagtccttctcgtgttcatgaaatggatagcccctctagagagtcattggaagggtgtttacttcgatttagcctctgttttttgcatttatgggatgttgattgcgagctagacaaattacttgtagatgagatgcaagtttgcaagccagaaggctgccatatagcaactggggtggtaggagacaaaggctcatttacattgatgttcccaggcaaagaagccactcttgagctttggaagtcttcagccgaattttgtgccatgaggtcactgtctataatatctcttgctcaactcatgattaaattatctcgttcttgtacaaattctagcagtgctttggcagcattttatacaaggcattttgctgaaaaggttccagatataaagcctccatccctacagcttttggtgagcttttggcaacacccttcggaacatgtgcgaatggctgcacgttccttgttccactgtgcagctccccgttctattccacaaccactacgagtaaacaaaaataaagtggtcaatgcccccttgtcttcatcagataatatgaatgttcttatatgtgctgtgcagactgcctctgtatccaatcatggagagttgaaggaagatgatgaaaatgttgataaagatgatattgacactgctaatatgatcttatggttggaatcatttgaaaatcaggagtggttatcatggataggaggcacaagccaggatgcagtggcgtcaaatatcatagttgcagctgctttggtcgtttggtatccaagtgtcgtgaaagctaaactttcaagtttagttgttagtcaactaatcaagttagttatgtcgatgaatgatcgatatagttcaactgcagctgaacttctagcagagggaatggaaaacacttggaaggcatgcttgggtgctgagatcactcattttatgagtgatatccttttccaaattgagtgcctaagcactgcaccttctagcaatgctatcaataaaactgcagtggccattacaatgcgagaagcattggttggcacccttttaccaagcttggctatggctgatgtaacaggattttttggtgtaatagagagccaaatttgggctacttcgtctgattcacctgttcatgtcgcttcaatcaaaaccattatccgtgtagttcgaggtgcgccgaagtccttggtcccatacctcgacaaggcaatcaactacattctacacactatggatccaagcaatctaataatgcgaaaagcttgtattatcagttcaatgatggctctaagagaaatggcacgtgtatttccgatggttgctctcaatgagtcaatgacaaagctagctgttggtgatgctattggagagatttatgatggtacaattcgagtctatgacatagaaagtgtcacaaagataagaattcttgatgcaagtggaccaccaggccttccaagcttacttgcaggatcatcgaatagaacaacaaccatactgatatcagttctgagtttctcaccggatggagagggtctggttgccttctctgagaacggattgatgataagatggtggtccttaggtagtgcctggtgggagaggctgagcagaagccttactcctattcaatgcacaaagcttatctatgttcctccatgggaaggattttcacctaactctgctcgcttgagtataatttctagcattttagatgataaacctggaaggtcagagaaggaactaggcgaggcggataatctgaagttattgcttcataatcttgacctttcataccgtcttcactggattggtggaaagactatcaaacttacgaggcatggccaggatttgggtacatttcagttgtgatgggcttacccatgaatattgagttgctttgtagtgttgaaagacagctaattcgatggctggcaagtctaacaagaatcaccagtacattcatatgtcatgtgaggtaccttgatgtttctttgactgttaaaagcattgtctggtacagttcataaattggatccctatttacagaactgcattcacatgcagcgcccaggatggggctcatctgtcacacctttgagctacagagttcaggatgcttttagtttagttgtggttcgcttgatatcatcacaatcatatacatattttgtggatgattggctatacttcatactttggagtttttgcacttgttctgaggttcatccttcaacttcaacactcctcaagtgcagtctaagtgtt

SEQ ID NO: 32617 - DNA, 2104 bp, Zea Mays
tattacccggccaccctctcggattttgtttctactccgattcaaccctccacaacatctgattgtttttattccctgcattgggtggtctccttttcggctatgatattggcgcaacctctggagcaaccatctctgtgcaatctcctgatctcagtggcactgattggttcagcttgtcatctttgcaactagggcttgtggccagtggttcactttatggtgctcttggcggctctcttcttgcataccgcattgcagattttctaggaggatagaattggtcacagcagctgcattatatatccttggtgctttagtcactggatttgcccctaattttgtagcactaatcataggtcgtgtcctgtatgggattggtattggtttggcaatgcatggtgcccctctttatattgcggagacttctccttcacaaatacgtggaacattgatatctttgaaggagctgtttattgtgttagggatactgttaggataccttgtaggaagtcttgaaattgacaatgtaggaggatggcggtacatgtttggttttagtgctccgcttgcagctattatggctattggtatgtggactttaccatcttcaccaagatggctacttctcagggcagttcaaggaaaggcttctttggaggataataaaaagaaggcaattcaagcccttagaacattgaggggccgcacagcaagtgaaaaggttttggcagatgatgttgacgatacaattgtctctattaaggctgcctacgcaggacaggaagctgaaggaaacgtttgggatgtatttgaaggagctagcttgaaggccttcactattggcggaggtctggttctgtttcagcagataacaggtcaaccgagtgttctatattatgctgcttcaatacttcagactgctggattctcagctgcatcagatgctgccaaagtagcaatcttgattgggttgttcaagttgctaatgacaggtgttgcggtatttaaagttgacgatgttggaaggcgcccattattgataggaggtgttggtggaattgctttgtcactcttcctactggcagcttactacaagatcctgaacaacttcccctttgttgctgtcggcgcgttacttctatatgtcggtgcttaccaggtctcatttggtccaattagttggctaatggtatctgagatctttccactccggacaagagggcgtgggatcagcctcgcagtactaacaaatttcggctcgaacgctctggtgacatttgcgttttcacccttgaaggagctcctcgggccagccaatatatttttcctgttcggcgtcatagcagtgctctccctcgtgtttgtgatcctcgtcgttccagaaaccaaaggactgagcctggaggagatcgagtcgaagatcctgaagtaattaaaaaccgttcgtgcgatcataagccccatttggagatattgtaagtagcgatgccattttcaaaacgggcgctcgctcactcgtaggatcggagccaaagctttcagacatgggagtacatatgcaaagggcacgtctcggtgtaaagcttggacatctttctcttttattagcgtagtgaatatttccgaacatacttggtaaattacatttcagttgagtcataatcacgcttctgtagactgtagtccactgtgacctactgtagtagtatgcatgtcactagtaaaagctggtaagctgtgtgatggactgatggtgtagacttgtgcagttgtgctcgcataaggctggccatcagatcgtgtatatagcgacataaaacactattttgcactatagataatactgttataatttacagaatggagttggaaacatgagataaagataagaggtgggacatgagagcttcggtagactatttttaatattatgcagtatgagataaaggtctttgagtgagtggttgtccatccatggatcttctcaaaatcttgtttgtgatctatcattaaaagcttgatctgttatttttaccgaacccctccagaaataagagccattgcttttgacatggacttgtgagatagattttgagcttag

SEQ ID NO: 32618 - DNA, 2052 bp, Zea Mays
ccttgtttatgccacatgattgatgcttgtttcgtcacatggccgaaagtggagaaataagatacatagtggaagatgagatcagttgttcggtcacttcgccagctccgccgatttatccagcactatgcagaggggaactcacaagcaaccagattgttcgggctgcagaatgctttaatcatgtgcggatcgacaccccgttcactgagcatgttacgtcgtaatggtgaaattagcagatttgcaagccctggcatggagttgatgaggtccatgttctctaatgtagcggctggttctatcaaagatattggaagaggtggcccgatggtggaatatgagaggagaatagcatcaggagacctagtagatggcgatagctttcaggttgatacaattcaacaattacaagggctctatgaggagttgattgagaatggagaagactgccagctggatagatataagtcatctgagaaatcaggacggtaagagcagtttccgtgcactaagatgacatattttgtattatcttaagcttagtcttttctttggaaaaaaaataactttagtctttgatattgaaggagtcgatggctatggtcccgcctcattactcagccttctagctttgctccagttaagggcctttacctctatggtggtgttggtacagggaagacgatgcttatggacttgttctatgaacagctgccatctaattggagaaaaaaacgtattcactttcatgatttcatgttgaacgtacatagtcgtcttcagatgcataaaggtgtttcagatccccttgatgttgtagcagctgagatttcagatgaggccatcatattatgtcttgatgagtttatggtaactgatgttgctgatgctatgattctgaaccggctgttcagacaattgttcagcaaaggcattataagctttatgaaggtggcttacaacgggaccttttcttgccatttattgacaccttgaaagaaaggtgcatcgtgcaccccattggatctgcggtggactatcgtcaactgggttctgtatgttaccatctgctgcgagctagtagtccttggtttcttgccccttcccttctttgacatttttgaactgatgtctgagcaggctgaacaaggtttctattttgtcggaaagcattacagtacgcttctgaaacagaagctccagtctttaattggagatgaggaacccagcccacaaactgttgaagtaattatgggaaggaaattacaggtttctctgggagcaaatggctgtgcatattttccttttgaagatctctgtgatagacctttaggtgcagcagattactttggactcttcaaaaaatttcacaccctggcacttgatggtgttccaaagtttgggtctagtaacagaacagcagcttatcggttcgtcacactgattgatgttatgtacgagaacaaagcaaggctgttatgtacagccgaggctggaccagtagaactgtttgagaatatcatgactcttgctgaagcacagaaggtttcaccaagatcttcgcgctcacagaaaagtgacgaccctgacctatgtgtggacaatgagcttggatttgccaaggatcgtacgattagcaggttgacagagatcaacagcagagaatatttggaggacttcgaaatgagattagggcaacagcagctgctgcccttgcaagctctagataatggtggtgatgttgtactagcataataagtagaaggcttctgggcctcatttgaaattcttgtattcgcgcccacctggcttacataggcaactgagaagctatgcttttccaaccgtggtgcatgtaaatgtgcaataaagctatgaaagagtattttttgctaataggtgggtgatctataaaatggctcaatctatagggagacgtgtcaatattgatttttttaattgtgttacatatttccaaacctttagagagacataaaactcaaaaacagcaattatcataactgcagtttaaatccggttgcggcttgc

SEQ ID NO: 32619 - DNA, 2659 bp, Zea Mays
atttttacgagttcaccgagaggcggtgtatttcgcagagcgcctgttttgccaaattcctcgtttggttccacgccggacgcatcctcccacgctcgggccgggcgcgtgaacccctcgccgccgtcgcagtcccgttgccggagggcgagagggacgagaaagaagagggcaagatgaagacgaccaaggggggcaaggcgatgaaccccacagacgcgttccgcaaggagcagcggaagaaggagctcaagcggaacaaaaaggaaaggaagaaagtgcgggatgttggcattttgaaaaaggatccggaggctatatgggagcagattgagaaattggagaagatgaaggctgatggtgctctggacaaggctaggaagcataagaaaagacagcttgaggatacatacaatcttattgttaagaaacgtaaggaatatgaacagaaaatgaaagagaagggtgaacaaccgattatgttcagccatcttgcaccaccaaagaggcggcctacaggagatgaagatggtagagctaatcctaagcccgaggactctgtttactatcatccaaccttaaatccatctggagcaccgccacctggaaaacctccgatgtacaaatcatctatagggccaaggatcccaccgccttcctcatccagcactggggcctcatcttccatgtcagagtctgaagcaggtccaacgaccctgccaccccctccaccaccaccgccattgccagacacctcagagtccattgatccacctgctcctcctttccctttgcctccactcccgccactgcccccaccaccacctaaacctaacagtgacgcagcattgccaggcttacctctgcctcctcctggtccacctctgagagaatctgtatcaggtcatacagtacttccgccgccactgcctccatcacagaggtcttcaaatccaccaccagcatctagtgcgaatgaaagcaaaacagattctgcttggcccttagttgtgttgcctccaccacccccgccacctgggttgtcaccaaaatcatatgacatggaggctgctggcacttcaaaggacactcctggacttaaagaagatactgcagcgagagtcttaccaccaccgcctccacctagtttgccgcctttacctccaatgcaatctgatatgctatctcctggagtcatgagattaccaccacctccgccaccaccagattcaaggccatcgcttatggctcctggtgttagcaggccccctccacctcctccaggattcccccgtctcaaatgccaataccaccatatgcatcctgtttggttcagctttttttttgactagcttttccgagaatctagctgtggggagaatctggctgtgtagagaatctgagtattattaggattatgtgcggaggaagataaagttgtccatgtggctcaggatctatacagtgacagattactactattgcgacgactcaaccgattatatgtttatgttgattttgaatggtttttacccaaacgaattttatagaagctggctgaaaagctgagtgtttagcagtccgcagcagcttttggtggtcagaagctgcgaaaaaccgaaacaaacagggacatggtgtcctccctggtccgccaccgatgcttaggcctccatttttgctaggaccctctatgcaactagatgagcttgctgcctttgccccaaggcctcagttacctcagcagccatcatatgtaaagtcggctgccccaacagttgttaagagaccattagcacagcacactcctgagctgacggctatggttcctgcatcagttcgtgtcaagagagaatctgcgctccccaaaccaaaaccaaaggtgcagcagcagcagcagctatcaacagcatccatttcaaggccttcagtgaccctcataagaagtgatgctcggccttcttcagcggcacccaagccgccaagtatggacgactcctacttggcattcttggaagatatgaaggaactaggggcacttgatgggtaactcatagagtaactgcctgagtgcacttaacagcttaattcatggaaaacctggacatgggaccttttttttttgcaatgtggtaaatggatagtctctgctcagtcaaccggagctgccgcggagaaagaaaatcatgcagtagtttaattgaaaacccgggaaaacgattgtagtctggctgctggagacctaaaggctctttgtggcccaactgtacacgtttgagatatttggaacttgaatagctgctggctctagcgaaggatatcttacaggtgctctttatgattcatgattgcactggctgatttgcagataataccattacaccagtcgtggggaggactactgttgtgccttaatttttgtatggtgcatttgccttgaaaaccatgacggagttgctgtcctgggaccccatgtaaacttgtgacattcacaaatgtcggtattggttctatagactatagtccggcgacattactggatacgagccacggcttctatataaaagtttcgtgctttctgtgctgaaatctgaaattaacagttttttatttggccagatgggaatatctgtttgcaaactgtgtaacgtatgatgcg

SEQ ID NO: 32620 - DNA, 2272 bp, Zea Mays
cacttgcttgctccctctcttctccccttcgtccaggcgccggatctgacacctctcccaccaccaagcttggctgcgctgccgcgcctcgcagatcccgatctccccatgcctcctcgcccccgctgaccccactgcggctgccgacagccacgatggcgtcgcgcccgcccctccgcactacctccgtcgcctccgtcttttcctccaccgactcctccacttccaccggcccccccggtggcgtcccgcagtccatcaccgcgctcctcaacaacccgctcccctcctccgccgcctcctcgtactcctggttgtcgtggccgcccaccaccataacgctacccgatgcggctccaccgccgccgtcgcacccctgcgagatcacccgcgccgacttcgcaccctaccttgccgccgtctccgaccccttcgcgcgcttcgccgacatccgcctccatgcccacgccgagcttgccgcctcttctgacgccgagggcgcccccgcggcctcctccggcctcgccgcctgtctccgtgaggtgcccgcgctcttctttaaggaggacttcgcgctcgaagacgggcccaccttccaggccgcctgcccgctcgacgacgatgcgctgcaggagcgcctcggacagcacctcgacgtcgttgaggcccaccttgtgcgggagatagcactccggtctgagtccttctatgaggcgcagggccggctgcgcgggcttgatggggagatcgtcacggcggtagggaggatccgcgagctcagagaggtggtccaggttctcacgggggacctcgtcggggcagcgaggcaggtgcaagagctcaatgctacccgaggcaaccttgtggcgctgcagcagaagctcactgtcatcctctatgttagccaggcgcttaccgcgctgaagctgcttgttgcagctgcagattgtgctggtgcactcgatgtcatcgataacttgcaaaatctgctagatactgatgaacttgctgggctttattgctttcggcatattcgagatcagctgggaacatcactagattccgtgaacagaatttgtgcatgctgctgttcctgatggaaaagctgtagatgctatgattttatcaactgtgaaaagaaaggcttcgagcccattgaatgggacagaccatgagggtaacatagacgaggaggaaagttttattctcagggaccggctcctccccctcattatttgcctactgagaacggacaaatttcctgcagttctcagaatttaccgggatacacttataactgttatgaaagcttcaatcaaagcaacagtagcggaattactccctgttttaactgccagaccaatagattctgattcagtaactggaggcagagctaccgatgctgacgctggaggccagtccttggcaaataagttgcggagtctttcatctgaaggatttgttcaacttttatctgccattttcaggatagtacagggctgatgtcttgagagaaaacactgaagcagttttcgcggcttgtgatgctgcccatggacgatgggctaagctactaggtgttcgtgctggattacatcccaggttaaggcttgaagaattcttgatcatctacagcataacagaagaatttatagctgctacagaaaagattggaggcaggttgggttacaacattcgtggaatcctacaacaacaatcaaagcaatttgttgattatcagcataatgttcggatgacaaaaatcaaggcagttcttgaccaagagacgtgggttgctgtggatgttcctgaagagtttcaagcaatcgttctttcactttcatccacttactcttctgttaatggcatggagatgcctagcactgatgataactcaaagttcagtgatcatcagcctacaagtcaagaactgacatattctgctgaaaataatgctgataatggcaaagtaacatccgggactggtgaaaaccaggttgaatccacttctcagagtgcaaataatgttgccgggaatctgaaatccaccttgcaaacaattgtacatggaggtgttggctatcatatggtaaactgcggtttgatactgttgaagatgttatctgaatatgttgacatcagtaaatgtttaccatcactatctttggaggtggtccaacgtgttgtggaaatattgaagcttttcaacactaggacttgccaacttgttctcggtgcaggggccatgcagaacctgagctgcatacattga

SEQ ID NO: 32621 - DNA, 958 bp, Zea Mays
tcatttttctgtgtggtagtttaggttagctttcacttgcttcaattgaccctttcaagagctgaaaatttcttgttaggaaaggggaagatctcagttctatatccaaacaagactaccacccccaagtcagttaaagaccttgaatttgatggtttctccttgactactgaccttcgtgagaatttgcaggacggacctttcaattttgttttgcttgatggcacctggagcaattctgctgcactgtacagaaggttgaaggagagatggactgcagtatggggagatgaagctctaccttgtattgcactatctacacttagtgcctcagtgatgcataaactacgaccgcagcctgcctgggatcgtacctgcactgcagcagctgcagctggcctcctctgggagttgagctcgcggcctgagctcatctcatttgggttggaaaagcaagccgaggcggtggagtgctcgttagacaacttgctggatgctctcactgccaggcggcttcgtctgggccgatcgataactcggaaacagagacatagtaggaactgcatatagggaaagaagaaactcacagtaacagaggagcatggtgtgccatcaagtggaaggctgatttcattcttttttgtagaactcaggagctgatcattgtcaacaagttttctcccctttctatataggttactagatcttcagttcagtgctgtagattacttttaatggtcattgacatgagctgttaccgctgctactgtcgaagaggagggttaccaaatattagggtgctaaaacttgggttgtattctgacagattttgccataccatgaaatcaagttgttttctcatgccaataggttacagctgacaaacaatccctcccatcctctcttttccagtcgcgtattgtatggtatcgtgcccagtaagggcttattcggtttt

SEQ ID NO: 32622 - DNA, 1866 bp, Zea Mays
agccgtcgcctctccttgctctgctcctctctctcccaagcggctctccctctatctcctcgtttctctcccctcctcttctacagccgctgccaggcaaccgaccgccgagcagcgcagccacccgagccccacgcccgccgcgccaggaaccagcgcccctgctctcgccaggacgccaggaattgctctttctatagcaagtttatgagttcagtttatattccattgaatatttgttgcagtgaagagaaatgagagaaagccttcggttgtagccttcagtttatattccattgaatatttgttgcatccgactcatctctgtttcgattccatccggtttggctcattttttaatcgagtgtgttgtagttttgtaccctaatgtcgtgggagtgctaccgaagtactgatagcatcactttaatttcattagctccgtcctggcaatcactttgggaaggtggtcagtggaataactttgcttaaaaagcttgaagcagttggtagtgaaactggaaatccttcttatcaagtgaaaattgtagactgtggtgaagtttccaacacaaattctcaggatccgctaaagggagataaagtaagctcaaagacagataacagcagttcagacagtgaaaagggtggccatcgtaccaagcgttccttgacgaaaggttggaatggctgctacactagcttcagtctgttcagtcccattgacttcagtactgcttctctttgagctgacaaaggattacaggattttgcttcctctcatgtgaacaagggagaatattgtgaactgaaggtcatgtatcagcgaaaagcaggctttcctcttgtagcaattgtgcactgaaaaactacagtgcccttatgacaccacaatagtcgctcgaatgcaactgtccggcctagcatccaatcgacctcaaccactctgcatcccacgtgtgtgtggagctgatgaacatgtcgatgtgttctaagcatgagcaagctgggttatgatggtgttgtggcactgctggttgctgatatatcactttcaatcggtcttgaccagattgaagctctgtatcagtatgcccaatttcagtttgagtgtggtaactactcaggggctgctgattacctttaccagtatggtgctttgtgcacaaacagtgagcgaaatgtgagtgccctctggggaaagctagcagcagaaatcctaatgcagaactgggacctagctttggaggaactcaaccgcttgaaggaaataattgattcaaaggttctaacttcaatgttttgttctgtgttctttgttctttgtgtacactatatcaccaatcatgttccttcctgatctttgggtagaacttctcatcacctctgaatcagctccagaataggatatggctgatgcattgggctctgttcatcttctttaaccatatcaggtacttgaatgctatacagacaaatgcacaccatcttattaggtatctagctactgcagttgttgtcaacaaaaaggagaaggaatatgcttaaagagttgattaaggtcattcaacaggagcaccatagctacaaggatcccgtaactgaatttttggaatgcttatatgttaactatgtagttgtgggcttttgaacaatagctggagtgatatgaaacattagtgatgtagttgtgggcttttgaactgcttcaagcaggagtgatgccgttgtggtgcttttgtgactgatcatctctggagcttttgtgaatgatctagctagctatctataaatgatctagttgtgaatgatattataattgtgatgcttttgtgaatatataattgtggtgcttttgtgtttatg

SEQ ID NO: 32623 - DNA, 1629 bp, Zea Mays
tgtatctgatatgggatgatatgtcccctgcctggagtatcgagggaaaggagacaccgacaaatccgaatccctgagagttcagaaaccgagccactgcggggcaagaataacagtggcaggagtgatgctcctgagcatgaagcgaggccaccacgacctaagagccgaactttttcgtccaaatgaaagaaaaagggcatattaggaggtatatggtagacgctgagacgcgcaatgtgggaagcaggaaatctcagcttcgatacatgacgacacagattgatggattttttttcgttcttggatgtgatgcttgacaatacatttttgtgttccttgacacatgtacagtggcgtgtggtagttgaagggtgtatagttgtattacttagttcctagttcgtaaaaaaaaacttcaaaagaagaatgcattcctaccaaaaaagggaaagggaaaaaagatgggcgtctgtggtggtcggttgcagcaactgttgtctggttgctatgaactccaaagtgcatgaagagatcaatgtaaccttggatgatgtttgtgtttgtttcgtttactcgtagaatataaaggggagatagaagaattggcttcactttctgggctcagtgttgatgatgatgactgtcacgttgatgaatatgggagggcatgttgatgagccaacattgctccaccccatgccaagagcccagtttcagtggcatcttaaacctctctgattcctacaggcttctgggcctgctgctcattaggcaaggttagttccttgctatcctggaaagagctttggaactcaagccacctgcaaacaagttttcctcagttctcctttaccgggaaacacaaactgctgcttagtaagaaactatcttggacagccctcctataaggtcgtgttcggttgcatacggatcggagaggattgaaggcagattaaatccctttctattcatttttgactagctagtgatttaatctcctccaatctacatctaaccgaacaagtcctgaaaagaaacttccatttgcatccctcctcttaaaactctgaaacatctagctgaggttcaagccctatttcatgacagggaacaggatccctcctcagaagacaagtgggaaaatatggggttatggcactttcagttccaagaaactacacacacatgcagttgcacacagctaacatgctctttgctggcatcatgtctcttcaagtggctttggaattcttgtgttttttgggaacataggctcttgtagcttctaaccagagatagattatacaccaggagcttgcttagaggaaagaataaacgcctggatgactataattgtgttctctggagctccaggtgtggagagaccagctgttcttgaatgttcagtcagctgtcctgggcctccgtccacattgtctggaaattaaaatcttcaatcccttgatatgattatggaagccagaaatagctttggaagccgtatcttcagagaactggttataactacctgcttggccatttgggagctccgaaatagcactgttttttttacaatggtctactcttcatgtttggaaacattatttcagagaggatttgtcatgg

SEQ ID NO: 32624 - DNA, 1746 bp, Zea Mays
ctccccacatttcgttgtgtaccgcaaacagcagagagaaaacggaatcccagatccacccctccccatctccatccgcggccatggcctccgccgacgccggcacttgcccgtgggatgccctcccgttgcacctccaggagcgaatcctctccctcctccccatcaccgaactacttcccgttgccgccgtgtcccgcgccttccaccgccttctgcgctccccgaccttccatgccctcctctccccgcatcgcctcgacgccttcttcctcctttccccacggctcgccgtccacccgctgtcccgccgcgtccgcactatgcccgcgttcgccgcgctctctcctccttcctacccgctcgtctcctccccgtccccatcactccttatcacctgcgcctcactccagttcctcccgccgatccccgacggagcctacctcctatccgctatcgtcccatcgcgcggctcctccacctcctgcacccttgtcgccgtcatcaccggcgcagccgcgcgttcttacaccctggacaccggcgatccctccccgcagtgggcgtctagaggcgatctcccgctgtctctcacgctcctggaaaacgccgcggtctccggtgaccgcagcaaactcttcgtcctcggccgtggccccgaggcgctcttggtttttcatctcgtgacggggacatgggaggtgctgcatgttgtgatgccacaaggtctcactacggcgcacctgtttctttttgatgggagcctattcttagtaggtggtattgagagctttggagtagtggatcgggtggtggtctggcggttggacgacgataaggtggaggaggtgtggtggagggaggtgagcgtgatgccgacggaggttttcgatgagttgctagctggtaggtttggcagattctggcattttcaggctgcagacagattggggattgtttgcttgtacaatgctgtggatcggaggctggtcatgtttgatgcggctgatggcatgtggacagtgctgccacgattgtccgcgttggatgcatgcgagagcttcaggtggtttggacatgtcttggagccaggagttgaaatcttgatgggactacgttggtgaggctttgctcttaacttgtagtatttcagttgagtcctggcagattcagctttatgctccttgagtcttaatacatcccgatgaagatttcatgctaacatcattaaattcataaagctagagttactagaagagctgtatgcaaatccctgaaaaagaaggaaaaaaaactggtggagcaaggaagtctcataatccgaaagataacaagtgatatctacaacaaagctcatggatggaagccggtcgatagacgcattcagtgatattttggctgttgttctgtctttttgggttcatctgttttgttagatgtaatctggctggctctttagtttggtaaaatcttagctaagttcgtcgctgaagttgtcagaaccaggctgcctttggttgggttgttttggtcccttcggttgaacatcagttttcaggcggtctgaaaacatttcctgctatggaaatgttcctctattttagctgatagttgcgtatgtcttgtcggcttgtagttgatgttggcttgtatgtgtatggttaactggatttcagagtgatgtatagcgtttcagctaatgtaaatggattgtatgcaacatatagtgaaaagctaacagcgtgt

SEQ ID NO: 32625 - DNA, 947 bp, Zea Mays
gattccgtagctctgctgagaatcaatcttgcaagaatagagaagagtgctgaaaaacaagcaaaatcaggtgcagaaaatgctgggtggtatgagaaatggtgggagaaatatgatgccaaaggctggacagaaaaaggtgctcacaaatatggaaggttgaatgagcagtcgtggtgggagagatggggtgaacattatgatggccgtggatttgttttgaaatgataagtgggcagagacagacttaggcaccaaatggggggacaagtgggaggagaaattctttgcaggaattggttctcgacaaggggagacatggcatgtatctcctggcagagaacgttggtcaagaacttggggagaagaacactttggtaacggtaaagtccacaagtatggaaagagcacaactggcgagagctgggatttggtagtcgacgaggagacatactatgaggcggagccccactacggatgggccgatgtcgtgggggactcgacacagctgctgtccatacaacccgtggagaggccaccgggagtgttcccggccatcgacttcagctcggcgcccccgccaaaggacgctccgccgggcatgcctccttcccctctggatggagggaactagagctgccagcacaagcgaattttttctttctagaggctccaaattttgcctgtaagggaacagcattctttgtaggaagttaatggacccaatttcctgcgttcattggttggttcactctctgctacgctttcctttcctcccaaacatgccgttgcgttcctctggttggcgaccgggtgaatgcaataatcaaacggcccacccgtggtttgtattgctcgctgaggataaagcctttgttctgccttcaaggcagtgttggaaactcggccattttcctcgcgtaagggacagagattttcactccgaa

SEQ ID NO: 32626 - DNA, 877 bp, Zea Mays
ttcctatctagcatttttatcgccaacgtgtgactattaaatctacgccatatttttctaaaccaaaatcatcgcgtcgattaacatggaataacacggtgcactactaatcgtatatttttaacaaattccgtagcgcacacaaatacataaattggaatcacatgtgttcatattacaacaaacgaactatacaacacatgaatcgaatcgaaagcactttataaaatacataaaataaatttgggtcgccaacaacctcgggttcgtgcgtgtgacggggacggatcgacgggtttcggccggacggagagcggggctcgactacggacagctagtacgcggctccggcgaactcccggcgacgaacggcacactccggcgacgaacggcaacgcactagcgatgagcgaggagtgctagagggagaggcaacttcgagtaggcaggaatggggaggctctgctgtttcccttttatagagagagggaggggagaggaatggtctgccagaggagggagagaggcgccgacgggtcttcatggcgccatagatgcgtcggtttctctccatggcgtcaatggagagcaatgggaaaggaaaaacggatgctttgatgttccattaactcggagacgaagaacggtcgcagcacttgggcttcggggtcgcggctgggcagtcgatgtcgcgccctggcgttgctcggcggcttggcgcgcagcagcaggggcgcggggctcgcggctcgggtggcgcgctcggcgcggctgcctagcgcccgcacgcgagagagcagagagaggagagagtgggagagagagaaacgtgagagagagagacgtgagggagagagggacgtgagggagagaggcg

SEQ ID NO: 32627 - DNA, 661 bp, Zea Mays
ttcgtgctgccgtgctgagcgtcagaaaaagacttgtttctctccccgcgtgccatggcctcgccggtcgtcgcggctagctatttaacctctcgccgcctcgtccagccaaggaaaagactcagatacgcacgtacgctccggcggtttcgatcgagcgaggtgggcggaaggagaaggcatggcgaggctcctggtgatgatcttgctcgctctgtttctcctcgccgtcgcgcccgctcaagcggctcgcttcacaaatcacgcagggggcttgagagcgaggatcggcgaggctccggcgctagaggctgcgcaagtttcagcagagcgaacgacacaggaggggcagatctggcggtctttgcttcgaatcgtcggtgttgacgcctctgttttcttccggatgccggtgaagaagaccggcatgggagcggccggtgaatttacctacgcttcattggagaagaccgacgtgggtttggagggaggcatcgcgcgctccgtcggtggacgagggggcgggcacggcggtgggatgggtggggtgcgggtgagatttgctggggaggctggcgcaagggggcagggctggggctgcgggtgcggggcgggggcaagcgggggcacggagctatggacaacctccttagcttcttaa

SEQ ID NO: 32628 - DNA, 2693 bp, Zea Mays
gtcatgtttgcaaaattctctgtgatgatgtgaacgaaggtctgaaaaaatcacagaactcactcgaacgacggtgccgccgcttgcctcgccggaccatggccgctgtgccgtcggggttcctcctcatcactggcccgccgggcgtggggaagacgacgctggtcatgcgggtgtttgaaaccctcagaggctcccacccgaacctcaacattcgcggattctatacccgagaggtgagagagggcggagaaaggatagggttcgaggttgtcacgctcgacggtagaactggaccactttcctcatgcaaggtttccaggttgctattatgcatttatgcttgttctaaattctgatattaataaggtaattgttggtatttgtttagcaccgtgtatttgggtatttggaattttgaaatgcgttatctgatactggagattgtcagtagtttaaattgtatctaacagcagcgcgaacacacttcactgaaatgtccacttcttaagtccatcttgcagaataagattcacaatatgtgtagcacatctcatatgaaggtactttcctacaagtatggtacctttactattatttagttgtttcttcagatatgataaaccactgttattagcactagcattatcaactgttactgtcataatttttcctaacccattccatcaagcatctatgtaagttcttcccaatgacatcccccttatgaccctttacttggaagaagctaatgaccttcttatgcaaattccaattatcatcaacgaagtgtgcagtcactgtaatatagtagtcttgttgttgagaagtccaacaatcagtgtgcaagtccatcgggatggaggctcaaaacgagggcaagcaatggacataaactttctaaagcctgccttctcaccaaacgcaaaaggaagttcatcttgtatgaccatttcattaaaagcttgtctaagcaactcaggatcataccttcatgcgctaacaccttgtccatcagtagcttgcaaagtaccttgcttattgtccttgttcagtttatggggattgcgcttacatgtattaaagtgctttcgcattctagatgtaccattggttgttgtatcagcccaaatattatggctgcaatacttgcactgtcccttctttaccatgttgtttgcatcctttattttgatgaaatgctaccacatttcggaacggggagccatcactttcctttcacttcctttgttttctccatcactaacttgaacaacctcaacagaaccacctgtatctcccacatttgaagcacaagcaccatcaacaacaggtttcagtgcagatgacatctacaaaagaataaaatgggcaacacatgatacacatcaacaatcatgtacatagaaccgaatccgaatttattatttcggttttctggattcattacctgtacctgatacccgtttttttggttctttcggtttcagtctcggttttttcggtatttggatctcggtttttatgcccagtcctaatagcagctagttaatatgtgagattaatacagtgttgcgtccacatattcttgcctttttgccattctaatattttttagctatcctagttctgcatggttgtcattgcttatttccacaatgctaccttgacataaaaaacgtggtcgggagggaatgaccgccctcccggtataatactaagaagagagcaaaacattagtcccgactaagaaaatctccaaagtctggcctcccatcactaacggcccgacgtcaaccgtccactgtgcaacggtccaaccggagggtggcgcataggacatcgtaaccagagagcggatgaggcataacgaggggattttttttaaccaagccggaaaattcgccgtgagggaatcgaacccggttcttggatgtttgatgaatttaagagtttttgtaacctagatatcctcacacataccattaccttttggttcttttgcagcccggagtctgttagatggcctaccgtcgggaaatacaaagtagacgtagcatccttggaatcattagcagtacctgagctgcaggttaaggaagaaacagatctcttcatcattgacgaagtgggtaaaatggagctgttcagttcagcatttttccctgcggtaatgagagttattgaatccaatataccagtgttggccaccatacccattcctaggcagggccgggacattccaggagttgcgaggttgcggaatcatcctggagcagctgttttcaccttagacactggtaacagagatacgatgagagatactatatgcagtcagctaaggagtttgttgcagaggtgatctgctaacctccctgtgtctatgtagccactgctttttttgacataagataacaagcaaacgatcaagagtagaagttttctctcagaacctcgagtatctgttttcaagtttagctctgaatggatgataagcatgtcgttcagtttgttcttagttccgtatgtggttattcaatcatgtatttgcattcggtgggggcaaggttttattgccacaataactctcgcttgtatggatgcggttagcatgtagtgactctacaacaggtatcacatgatttgcacaactaatttgctaataggccattattgcctgaatcctacgggcc

SEQ ID NO: 32629 - DNA, 658 bp, Zea Mays
aaatgttagaaaacattcaagtaccaagtatgtagctccctactcaagtttctatggataagtttctttatctatatccacatccactatactctgaacggtggtggttcgttgtaatggaatcccaatcgtcggtaggggtggtaatgaacgatctaaatgttagaatccttaataaattttagtttaaaaataaataaaaaacagtgaccgtgatttgatttttaaattttatagcgtaaaatttagaccttattatcatctagtgctcatacaagatagatgacgcgtatgtcatgacatcggcccgaccaacgagacgtctgcgaaaatgacaggaagcatgcacggcagcagggtaaaggacgccgcagaagacgcagatggcacaaacagccattctccggcgtcaagtggactaccgactgagaccggcgttggaactttcccctaggctcaccgtggctccggcgccaaagcggcagctgacaccaaacgcatcggcttggtgtctctcccccggcgggcaacacgtacgtctcggcgcatccgcgtcggcgtcgccaatcgcgcgagccactagctactgccgcggccgcgcacgggggctgtgccgtgcatggcgagtgtcgacaccccatgggtgaaggcgtgcgtg

SEQ ID NO: 32630 - DNA, 4092 bp, Zea Mays
ctttcttatatcaaatccctctgtgagaaatctccacaagttggagtctctcacgctttacacgagtgatctcaatcaaagcaaaggagtaaggagggagtagaaacacacataagagtacaagagcagcaacaccacgcatacaagcaaaagtgagaatgcaataatcaaaacgacagagtttctcttaagaaaacactcaattctctatagcatgagtgtgtggttgcattgaatcggagtttaagagtgctcttagtatacttggtaacaactctatgcacctagaggagtcctttagtcatttcttctttgtttggaaggccctggacgccttctgtccgtgggcgcaccgaacagtctggtacacgttggacagtgaacattgcacgatttccttccttttcctgcgaagccaaccgttgccggtcgttactgccattgattatgagaaatcaatataaactctagaacagagctactctacacagagttttggaatagagctgtttttggaatggaatggagccataccaaacatgtccttattaaatgtggggtatgtctaaagcatatctctactactatttatgaacatagtgtaggcgtgcacgattgcatggcgcacggttctgccaactccggacgcgcctgtcgcgccgcgaatcgcggccgccgcatcctcagatcaataccgcggccgtcgtcttctctccccccgcatggtggcccgtcgtccccttccaaccctcctccctcgcctgccggtgtccctttcttcccccgtgtggcggctcgcacccgcacgagatctagactaccttcccaccctcctcccctgcccgctcgcctgtcggcgtccctttcttctccccgtgcggcggcccgcgcccgcacgagatctagactagacgccgagggcacgacgctttgcctgcctcgcctccgtcccctcgtcgcctccacgactccacctctacctcctcggtgagagagagagagagcgggggagagagggcactagaccaccagcaagcatgaggcagaggaggagcgtggcggcgccgctacactctaatccgctggctaccccatcaggagagagagagaggggggagagaaggcaccagacaccgccagtaagcatgaggcagagaaggcaccagacatcgcgctatcctccgcatccgccgcccgtcggcttcgtccgctgcgagaattctcgtgtcgcccatcggcgacaactggtatgtactgtttcgcaatccctggcttcgaccagcccgtcctcgaatattctcgatgtgtgctgcttccgataggaatatatgaggttcgtggtagtagctcttaagaaatcacgttgcgtatgaatcgaagcgaagtgaagacgaaccgcttgccttcccttccctggttaggtggggaggcattggtctccactgtcggcatgcttttccactggtttcggatagtagattcggccttgttgctgcgccagaaaggtccttgtgtttattttcccttttgggctcactatgtacagagatgctttgacgccttgttgggattggattaaatactcgaggttgaggggaattaatccttgaatcttaagcaggagagatagcacgaagcatggtatttggttcaggcactgcaacgctggactgcaggccatatgccagtttcggtgcttcttttccatggctggtagcatgtgcaagctcgttgttcgtggtcacaccctctcgttgtgcaagtttgcgtatactaataaattaacaatcactgaaccacatgcaacaattagcctactttttgccctaatcctctcatggtttcttggacactaatttctatacatactgttgattatgtatatatctcaaaccctcaaatggttcactttgaaggagaataaaattggtctaatttattaaatatactttaacaccccgtagttgtagtgggagcattgtagacgattagactgaaagaggagcagactaatttctgctgatctgaatctcgtttggttatctgctacaatagtatctaagttatgcaggttgaatgcttctatgaaaagatcatttggatgggctaaagcatgcggaagtagtttgcatggcgtttacaattacatactagatcattagccattaccattatacttactacttttgtgaagttaattagatgatacttatatcattgcgatacctgtggaattgtcaatctgtaagttagtttgaacctaattgatggctattttattcatttccagacacaaggatcttagatgacctattttggtttcaatcccaattgtcgccatgcattctcatgatcttttaaacttccgacctgagtacctgactagatgcatttgttttgttcctggtactgggattagttctatggaattcatatgctgattgtttgtgatatcattacaattacctcaacatgtataagaccttttcagcacaggtatcagatacaggcatcatgagtcgccaaaaacaatcagcagtccatgccttgatggttggcactttcttggcatgacacttgcttggcaccgctccatggttggcatgacctgtaattttgttcatcttcatcatgcctggacgtgtcctgtacgcctgtgttcgcgagacagagggcagcggcagcagcaggcatgtgccatgtgggccggtgcatggaagcatgtagtcagccattgtttgactccagcttttgtccctccaatacgatagtcagacagactgcaggaagcttatgtgtcatactacttctacttgttccgattagttaacgatgttgtactgggcagtccgggtgctgcaagccaccgacggtgtgcgggtacgcgtacgcgagcccgacggcgtggacgagcccggcggcggacgcggactgcgtggcgtggagcaacgaccccgacctgctctgctacgcctgcgcctcatgcaaggccggcgtgctgggcggcttgcacgagcagtggcgcagggccaccatcgcgctcatcttcgtctacgtcgtcggctgcagcgcgttccgtaacgcgcagaccgaggacctcttccgccgctacaaatggggaaattattaacgatctctcccactgatctactgcgtacgtacgtacacgccgacttgaaacgggattttcagcaatccggttcaccaagatttgagcccaatgccccatcccattcgtggcgtgtgctcgccaaattggagcacgccagtcggaaggacgtggagggtcgctcttagtcatcaagagaggtcaatgtattaccttgtcaggcagcttcaagatttctaaaattgacaaaaatggttggaagatcaaacatcgagaattcactttctacaagtggaacaattgcatatgagggcattgatctattgacatgtgcccatatttctatttatttgtcttcaagttctagatatctctcttattctgatttctagatatctctctaaaatttatggttgtgttagatatctctcttattctgatttctagatatccctcttattctgatttctagatgtgcttggtacaggtcagttttacctgatattctgtttttgttccttgtttgtttgaactgaggttgatttaggttgtgaacttgtgatgacaaaaataacatcctgctgataacctcaaatggcctgtctacgagatggaaaatggcctgatgataacctcaaaattttctccattatgggcaacaactattgagcagccaagatatcaacaacgaagaataaccaatttcgaattcacatcaatcaacaatagaacctctccagttgccttaacaagccttccaagaactgcacgcgagtcgcccaggtttgcaacatagagaggcccagcacagattacaccaacaaggcaacaggagccaattgatgcaatttgaggcttgaaagaccattccttgatgactagagaaagaaagccctcagtttcttggaaagcttttcggatcacgtttgctaacatggacttgtgctcagttgcaaaccctggaaaagaaagatagttttaat

SEQ ID NO: 32631 - DNA, 1162 bp, Zea Mays
tctattctatctagatctcactctttatttcaaacctttaagccataaatagtgaaaaacatctatacgcagattctcctggagatgagcttattcactcattcggaccaagacgacgaacttcgaatttcctcaattttcacgcgagcacctcggccgcctgcgccatccatgtcgtcgcccttctccgccgcttccgtggccgcggggtcagaggcggcagccggcacgaggaagctgcctgtgctgctgttcgacgtcatggacaccctcgtccgggacccgttctaccaccacatccccggcttctttcaaatgtccatgaaggaactactagaagccaagcatccaacggcttggtcagaatttgagaaaggactgattgatgagaatgagctggccaaaaagttcttcaaggatggcagatcgtttgatttgcaaggtctaaaagagtgcatggtgagagcatatgaatacattgatggcgtcgaagatattctttgctgtttgaagaaaaataattatgaaatgcatgcttttacaaattatccagtatggtaccaattaattgaggataagctaaagctctcaaagtatttatcttggacattttgttcttgtagaactggaaagcgcaaaccttcgcccgagttttatcttcaagctgcagatcaactcaacgttgatccagcaagctgcgtttttattgatgataggatgataaacattgaagcagctcttagtgtaggaatggttgggttgcagtttaaaagtgctgaggcactacagaaggacttgtgtgctctgggagttgaattatctcctcttgtttgtgaaggtgaagcacaagtacaataaggtcgtgtgtgccctatcttatcttatgctcaaccaaactacaatacgaatgtacataatgtatggtgcccttgctttgtgagctatgtcaataaattattgtgctaatctgaatcgtctatcaaatataactgatatgttaactgcacatattctctcctatgaagagctttttgttgtcagttagtagaggtgaatttgttttatcacaaacatgtgctgtcaagcctcagccaataggccctgtaacttcaattcaggttaatgttcgtcgagtttgaggagtttttatcaaaagttataa

SEQ ID NO: 32632 - DNA, 4210 bp, Zea Mays
cagctcgtccccttccccccacttcttcctcagataaggagaggccccaggccagagaaaaaagcatcgaatttccccccgttaattggcctgagccctcagccgtctaccagcagcagctagagatatgccaccaagagtacaaccagccaacatgtatattccttggtgttcaagctggattgtctttgttgacgtcagagctgactatgatttttggcatagcactcggattcaacctcctgtttgaatatgatgatctcatcacagggatatgctttgcaacagtggtacctaatctgctaccatatgctatatcccacctgggaaagaagatggaagggacaataaatgcctgcatagcaggatttgcacttcttagttatgtgcttggcttattggttagccagccacaaattcctctcacgatgaatgtaatattccccaagatcagtggtgagagtgcttactctctgatggcgcttcttggtgcaaacataatggcacacaacttctacattcattcatcagttgtccagggtcagaaaaagtcatctgcagttggtcttggagccttatttcacgaccaccttttttcaatattgttcatttttactggaatctttatggtgaactatgttctaatgaactctgcagcagcggaatctactaatactcttctcattaccttccaagatgttgtagagctaatgaatcagatatttgtaaaccctctggcaccaactatatttttagtggttcttctcttctccagccacatcatctcgctgacatctgctatcggtagccaagtgatttcacaccatttattcggtataaaccttcctctttctggacatcgtctcctactgaaggtttttgccatagttcctactctgtactgggcgaaagttgcaggagctgaagggatataccaattattaattatatgccagattattcaagccatgcttcttccatcttcagtcgtcccactttttcgtgttgcttcatcaagatcaataatgggagcccatagagtgtctttgcatctggagatactggtttttcttgcatttctccttatgctattttcaaatatcatatttgtggcagaaatgctatttggcgacagtgggtggatgaacaatctgaaaggatatactggaagccctgtggtgctcccatataccgttttagttttagttgcacttatatctgtggctttttcactgtacctggctgttacaccattgagatctggaagtcatgaagctgaatcccatgaatggtctgtgcattctcagagagaactcttgaatacttctcaagaaagggaagatgttaaggtggacaatgttacatatgaggaagatcaaagatcagatgttgtcccttctcccagggatgtgcctgacagccatccggaactggccttggactatattgatacttctgacactgctgtagaatctgatcacgactctcaacaatctactgcttatgcatccactgctcctgaaacctgctcctccccgtcgtttactcgcgaggagtcaaaatcagttgttgcagtcaactggccggagcctttggagaaggttcctacttctactgtgatggaggaaagcacagtagaaaatgtggtctctaggatcacgactgaaagagatgttttagtagaaacagatgttgtctcgggcaaggataaggaagatatccgtactttggagtctgagaagtcaattgttgatagcaccccatatgtgtctgatgacggtccgccatcccttactttcagcaggggaaagggctcagatgcaggaaatggcagtggtagtctctcaaggttatctggtttgggccgtgcagcaaggagacagctagctgctactcttgatgagttctgggggcatctgtttgattaccatggtaagctcactcaagaagctagcaccaaaaagtttggtatcttgcttgggatagaccttagaacacctagcacatctgtaagaacggataaacaagctgctgaaatacttaagagcccactggtgagagactcaatgcggggggcagcttttttgtcaagctcagtggacatgatgtcccctaagaatgaaacgtcgaatttggaacttgcatatgggcttcagaggggacctggcatgggattgtcaagctggtctcagggtatgcagctaccaaatacacagctgcagagctcaagcaatagcctacttgagcagagtgcaagattaaactcaaattttagttcatcttattcagacaacaatcagttctaccaacctgcaacaattcatggataccagctcacatcttacctgaaacagatgaatgccagcccaagcctttactctagcatgccgctggacccacaacggcttccaaaatcatctgtgtctgctgtgccaaactatgctgattccatgatgcatgctcgtaatcataacctgcttgcttcactgggtggtactactacacagcttcctgcaacatcccgcgtaggctcaatgatgcctgaaagatcgtattatgatccttccagcgttgatgggaatgaaaacgctggttcacctgcttactcaaaaaagtaccacagctcacctgatatgtctggaataatcgctgcaagtagagctgcactcttgaatgaagcaaagttgggtgctgccattggaccacagtcatacctcagcaggctggcggcagaaagatctcaatatgcaagctcaacagccaggcccgcggctccattagcatttgacgagctttcacctcctaagctccagagtgatatcttctcggcgcagtcaagcatgagaccaagtgctagatccctttgggctaagcaaccatttgagcaattgttcggcatgtcaagtgcagagctcagtaaaggtgacttcaatcttccaggcagatcaggtggcgtggccaaggatgatttctcttataaggaatctgagacgaagcttcttcagtccctcaggctctgcatcatgaagctccttaagctagagggatcagggtggctgttcaagcaaaatggtggttgtgatgaagatctaatcgaccgagtcgctgcagccgagaagctattgatgcaagggactgccgagaatcaactgctgcttcatggtggtgatctccagcaacattcttccgaccaggccggcatccagtacatgcgcacgcttcccaactgcggggaggactgtgtttggcgcgcgtcactcgtcgttagtttcggtgtctggtgtgtccgccgagtgctggacatgtctctggtggaaagcaggccagaactttggggcaagtatacctatgtccttaaccgtcttcaggggatcttggaccctgcgttctccaagcctcggggtgctctgacaatatgcacctgccttcagaaagacaccagagtgcgcaatagcccaccccacagtgggctaacagccatgggcccggtccccacaccgatccggggcgccttcacgaccgcaggcgtggttctggagatgatcaaggacgtggaggctgcggtctcaggccgcaagggcaggagcggcacggcggcgggcgacgtcgccttccccaaggggaaggagaacctggcctccgtgctgaagcggtacaagcggcggctcgccagcaagggccagtagcgcgcgggtgtcagacaggcaggcgatcgcaagcaatgttaggaggagcctgactattgttctccaggggggctgccactggcgccggcctccctgagccctggattttttcgttgcacgacgttcctagggaccggtggttgcccgatggtcgtcttggtcccttccagcaggttttttttttccttccctctttctgttggtttctttttgttggctttgtgatgttttgtaaggggcaactagggtatgtgctcagaaggactcaagatgtacacgcgaagatgtactagtctgctgatgcagcgttgtaaagtccacactctgcaggttaaccctttttggggccgtcaagtgttagtgcgtgccctatgtatgttaatcacccctgcagagaggttgcgaatactgaactactcacagacctgcacctgtcgagatcgtttgtaatatccgacgtcttgttcagaattgttctcactcttttttgcccgttgtgtaatttaccctgaagggacttcaag

SEQ ID NO: 32633 - DNA, 4092 bp, Zea Mays
gttcgatagtgatttcatcttcctctaccaggcggctccgtggtccgtgctgatcaactgcatcaaggatcgtcgccggcggcgcgctggcagcagttcgcacggcgagatcggattgatcgagatcttctaggcctggacctgcgctagacctcgaagcctcgatcgcaccgcatcttctctctctgctgctggtccgctccgtcgccgccgaccccgccgccagcttccccttccacctaaaaggacgacctctggccgcccttgtcccgccccgacgcctcggtttccactgcataggcgtggtgcggcgatccgtccgggcctagggttgcgagagacactatagggtacgaccctaggagcatccgcctccacgtgggtgaggcggaagagggaggatgacatcgctcagccgtgagctggtcttcctcatcctgcagttcctcgatgaggaaaaattcaaagagacagtccacaagctcgagcaggagtccggattctatttcaacataaagtactttgaggacgaagtcctcaatgggaattgggatgaggtggagcgctaccttggtggattcaccaaggttgacgataaccgctactccatgaagatattctttgagatccggaagcagaagtatctggaggctcttgataagcatgatcggtcaaaggctgttgaaatcttggtcaaggaccttaaggtctttgcatccttcaatgaggagttgttcaaggagatcacacagcttctaaccttggagaattttagggaaaatgagcagctctcgaagtatggtgatacaaaatctgcaagacaaataatgcttgctgagctgaagaagctgattgaagctaatcccttgttccgtgacaaactacaatttcccagcctgaagacttctaggttgcggacacttattaaccagagcttaaactggcagcaccagctttgcaagaaccctagacctaatcctgacatcaagaccctttttgttgatcattcatgtggacaaccgaatggtgcacgtgctccatcaccagcaaacagtccgttacttggatctatgcccaaacctggaggtttccctccattgggtgctcatggaccttttcaacctgcaccaacacctgtcccacctctggctgggtggatgtcaaaccctccagcaataacacatcctgctgtgtctggtggtgccattggatttggcactccaacaaatcctgccgttttgttgaagcatcctagaacacccacaactggtaatcctggtatggattatccatcaggagattctgaccacatttccaagagaactagaccggttggcatgtctgaggagagccataattaccaacaagatgatttccacaaagctgttgcacggaccttgagccaaggatcagcacctatgagcatggatttccatccacttcaacaaactcttcttcttgttggtaccaatgttggcgacattggattgtgggatgttggtaccaaagagagactcgttgtaagaaacttcaaagtctgggaccttggtaaatgtacaatgaccctacaggcagcactggttaaggacccagctgtgtcagttaatcgcataatatggagtcctgatggaaccttgtttggtgttgcttattcaaggcatattgtacagatttattcctataacggtggcgatgatattagacaacacttggagattgatgcacatgttggtggtgtaaatgacatagcatttgctcatccaaataagcagctatgtataattacatgtggagatgataagacaattaaggtatgggaggccactagtggagctaagcaatttacctttgaaggacatgaagctcctgtttattctgtgtgtccacattacaaggaaaatattcagttcatcttctcaactgctttagatgggaagatcaaggcatggctatatgataatttgggatctagagttgactatgatgcaccaggtcattggtgcactacaatggcatatagtgcagatggttcaaggttattttcatgtgggactagcaaggatggtgaatcacatctagtagaatggaatgaaagtgaaggagcagtgaagagaacatatcagggattccgtaagcgatctatgggtgttgtgcaattcgataccacccggaacaggtttttggccgcgggggacgaattcatgattaagatatgggacatggacagcacgggtcttctgactaccattgatgctgatggtggcttaactgcaagtccacggatacgcttcaacaaggagggaactctattggctgtctccactgctgacaatggtatcaagatcttagcaaatgctgatggacttcggttgctgcgcacactggaaaatcgttcttttgatgcttctcgtaatgcatctgaggctgtaacaaagcctctaataaatcccttgactgctgcggcaaatgcagctgcagcaagcagttcaggagctggtgctccgtcagctataactgcaatgaatggtgatagcagaagtttggttgatgtaaaacctagaatagctgatgagtcacttgacaagtcaaaggtatggaagcttatggagataactgagtcaagtcagtgcagatcaatcaaactggcggataacatgagaacaagcaagatttcgagattgatttacacaaactctggtcttgctatcttggctttaacttcaagcgctgttcatctactctggaaatggccacgcagtgatcggaattctggaaaggcaaccgcaagtgtatctcccactctatggcaaccaccaagtggcatcttgatgactaatgacacgactgacaataatcctgaagaagctgttcactgctttgctttgtcgaagaatgattcatatgtcatgtctgcttctggaggaaaaatctctctgttcaacatgatgactttcaagacaatgacaacgtttatgcctgcaccgccggcagcaacttttcttgcatttcatccccaagataacaacataattgcaattggaatggatgactcaaccatccaaatctataatgtccgaattgatgaggtcaaaagcaagctcagaggtcactctaagagaatcacaggtcttgccttttcaaatgtgctaaatgttttagtctcgtcaggagctgatgcccagttatgtgtttggaacacggatggatgggagaagcaaaagaacagatttttgcagataccatcaggtcgccaatccaatatcttggacactcgtgttcagttccaccaagatcaaatgcactttcttgttgtgcatgaaacccagattgccatctatgaaactacaaaactagaaccagtgaagcagtggcctgttcgagagaattcacctccaatcacacatgccacattctcgtgtgatagtcaactgatctatgcaagctttatggatgccactgttggcatatttaatgggtcgagtttgagacttcaatgtcggattcttccagcttcgtatcttcctccaaatatcagtccgagcgttcatcctgttgtggttgcggcacacccttcggaagcaagccagtttgctctagggctgactgatggtggtgtttttgtgttggaacctttggaatcggagagaaaatggggaaatcctccaccagtagagaatgggtctgctagcaacttgtccacaccgcctcctaatggagcttcaagttctgaccaaccagaaagatgattaagaagttggaactggtagatttttcgtggcacgagtctaaccaagaagacagggcttcaaagggtggtgcgactaaccttggcagataggttccaagggagccggacaatgcgctcaataaaaataagttcaacagaagtttgtccgttgcttgtataaatatttgtattgactatcgagtgaggagtcctagtatttcatttttgctttgtttgcggtgctgtgaaaaggatcagtagataagctgtagtacaacaactatcagactggctgtacttacctatatttatgactattagttaatgtatgttgtttcatttgcctttttggctccgttcaaaca

SEQ ID NO: 32634 - DNA, 1193 bp, Zea Mays
gtgaggcatctcttgttggcatttatgcatcttaatgatgtggcgaacaatgctttatgctgcatgtgtacctgggattcttattgttgctgggatgcaatttgctgttgagagtccacggtggcttgccaaggtactctgagattcaattgatagggtcccatttttgttgtgtaagacctttttgcatcagaaagctccatcttgtaggttggaaggttcgatgatgctagaaaggttgtagagagcctttgggaaccttctgaagttgagaagtccatggaagagatcaaagctgttgtgctaaatgatgattcacggggcagctggtcagaccttctggtggaaccacataatagagtttgctggaataaatggtgttctttatttttcatcattgacattccgtgatgttggtatcagtagtggtgctttagcaagcttatatgttggaataaccaattttggaggggcactagttgcttcaaatttgatggacaagcaagggcgaaagaagcttttgataggaagctaccttggaatggtacatttttacttttgcaattggtgctggaccagttaccggtatcattataccagagctcagcagtgctcggacacgctcaaaagttatgggcttcagtttcactgtgcattggatatgtaactttctggtgggactatttttcctggagcttgtgcacaagtttggggttggagcagtctatgcaggttttggtggggtctccctgctgacagcactcttcgcctacaatttcatagttgaaacaaaaggacgttcgcttgaggaaattgagatgtccatgagcagtgctacccctggcaagcaagagtagaacatctcaactgtatggacaaactgaacaactgacgggaggaatttaataagagaagagggggcctaatcccatgaatcttcagcagcagcagtttgttgcaaacaacatcaactcctatagataatgagcacaatcaaattcagcttttctttggtagcatgagaatcgttgtacaatattaaaaagggtgaagaaaacgacccttttaatttgttttttgtacatctgatgtatatattttacgccttctgtagtacgtaaaataaagggaacagatctttctgatattacttgattgatgaatttggaatattcgcatcctttgttctggca

SEQ ID NO: 32635 - DNA, 2743 bp, Zea Mays
gccggtcctgatggctgctatactgtattcacaggcctagtgcagtttgggaaagagaaaaattctagtatcagctcagtgtttgtcttcgtttgcaacaggcaaaacatttctttggatctagaagtcatggctaactgttggcagcagcgagcggctaagccccgcgaccgcgagcgtgcaatggcgatggcggattgtcacgatgccggaagagcaagactcggcgcgagggaaagcccagttacatttaggaagggggatgacttgggtaaggtggtagcctcatccttgcattcaccaattcctgtaaactcccgaacttcgtgagaggagtgagctccggcagcggtggtggtgctcgtcatcaatccaaacagatcgatttcggttggaggagtgcgcgccacccgttcgacgaaagtcgtcatcggaagagcaacgtgcgcgcgtacgtcaacggctcaaaagcgcgtgagtcgccttcccattcgtttgtcaaagcccacagtttgtcaagagagagagagagagagagagagagagagagagagagagagagagagagagagagaagttgctgtccgcgagagacacgtttccagctcagcagtcagcatgctcgagcaaagaaaagattctcaaggttctccagctcacaagtttcctggcctcgcttgtatctttgagcgcctcaactctgcagcacatatatcctgtaataagctctgtcttgcatacactagctctagagtctttcaagatgagcaaacagatctgagctccagggacttgtggtacaggatctctctacagcctcttcggtgctcgaagcggtggaacttctggcacaagggacactttacagaaagatgactggtgtcgaagctgccgccatatctgctgtagcatctggaatattaaagattgtgggcaacaagttggcaccactggttataagaaagtatagctcaatcgtgggtgtggaaaaagatctccagaagctccaggtcctagttgaggatataaactcttggctagaaagcgcgggatatcaagcttttggtgatgatgcatcacttagttggttcaaacttcaaacagttgaaagatgttgcttatgctgttgacgatgttgtcgatgagtaccagctgaaggccgagagaaatgatgcttctggtgatggtgattttgtatccagatatatgcgtagaaaaccagaatcgttcatatttcagtgtaaggcagctaagaagatcaaggcaatcaagaagagatttgctgcaatcgtgaagcaaagagccgacatcaatataatagctactagtttaactggtagtggtcattctatttcccatatgaaaaagacagctgtggggctgccatcagtgcctaccatggatgcaacattaatactcggaagagaaatggagaagcaccagctaatatctaaattaactgaaaccaatgaccaacaaaaaaccatgatagtttccatcgttggacttggtggatctggcaaaactaccttggctaaacttgtttttaacgatggtaccactatagcaaagcattttaaagttagactatgggttcatgtgtcacaagagtttggttttgaaagtattgttgggaagctgtttgaagctattgcccatggcaagtctgaaagccataacttgcagcacatggtcagaagaatatcagacgagttgactgaaaaggtgttcttgcttgtactggatgatgtctggactaaggaccgaatggagttggaacaatttatggtacttgtgaggagcggtgcatctggaagcaggattttactaactactcgcaatagcgatgttgctgaagcggtggaatcttcatatctgatcaacctgccactcttgtctttgtctgacagctggcaactatttattcaaagctttggtacgacggtggaaggtttggacagagaattcctagatgttgggaatgccattgtaaacaaatgtggtggggtgccactagcaattaaagtaattgcaggtgtcctccatgacaagaaacggatacaagagtggcaggccattagagacagtaatctattcgatgctgagggcaaagagcgtagagtatctgcatgtttgaggttgagctatctgaacttgccctctcatctgaagcagtgcttcacgatttgttcactgtttcctaaaggtcacaagattgacaaggaacgtttgattgaccaatggattgctcacgacatgttcgctagtgcggatgctgttgattacttggagtacactggatatgagtgttttagttctcttgtgcaaatgtcttttttgtaggatgtggaagaaaattattatgggagagtgacatgcaagatgcacgatttggttcatgatctagcccactccatacttaaagatgaaatcttagtgacaaggttcccggaacgttgggaacgaggaacgggaacgaggaacacggtacgtctgttaaagcaacatggaacgttgaggggtatacagctgatccacgttcattcgatgcgtggaacgtgttcccaacgatttaggaacgcagttagggaacgattgtaatgaaacagggaacacagttctatttaaataggaggcagtacgcggctccctgcctaatcacttattacgcgctgcatgtctaatcccttcctcttcttacgggctccatgcctatcccctcagctgcgcgactcctccactg

SEQ ID NO: 32636 - DNA, 2194 bp, Zea Mays
ctgccaaagcgtagttctgcgacatctaaaggagtgtggaaggcggctgccttgtccgcccggcctcttccgtctcggagcgagaaatcagcggcatcgccgcgcgcatccgaagcgcacacgacaatgcagggcggatccagcggcatcgtctatggtggcctcaagtaccaggcacggtgtatcgccgacgtgcgcgcggacgccagctcgaccaccttcctcgccgggaccctcagcctcaaggaggagaacgaggtgcacctgatccggctttcgccggcggagagtgagctggtgtgcgatggagtcttctaccaccccaacgagatctgggatctcaaatcatgtcccttcgatcacagggtcttctccacagtctacacatctggtgagggctttggtgcgtcagtttggaagatcccagagcttaatgggcaatcaaactcaccgcagcttgagcagctctttgagcttagtgggcatacgggcaagattagacggtggactcctgtttctgttggtttttggctgctctagagatatttgatctacttactgtactaaattctcatatgttttgaatttgagactttgtgtccaacatttgttggatgaaatgcaactctgtggttaatgttccttcctgacccacatggtgtttatttgtagttacttgatgattgtggccgcacttgtgtgactgcattacttgttcttgcatcacttgttcactagtcactacacatgaacattgagataagagtatagttactaagaaagatgcaataaatgttctgtcctgtcttccatgctgcacctgtttcacattacaccagcacgttttaaacaatatacaaggattatgtcccacagtgctcatgaaggacataatggatgagaatattttatttcaacttctgctgttatgtctttctataatcttttaaactagtctcacttgctctatattcttaaaagctgctagcgatgtgtatcatctttattggttcttgacacctctaagctgctcattttgtagtgtgatctggtggccacttggaaagcatgataaactaattagcattgatgaccgaaatatttttctttggaacgtagacatgtcaaataaatcagctaaggtgatctcacagggatcagctgacatgcttccaaatttgagtggtggggcttgggatccacacaatcataattcaattgcttcaatatctgattcatcacttcatttgtgggatctacgttctatggaaaaatcatctgcaattgaacatgcacatatacgggatgtggattataaccccaagaagcaacacattattgcaacaacagaagatgactttggaatttgcttgtgggatctcagaatgcttaagcttcctctgaaagacctccctgggcactcacattggacatgggctattcagcacaatcctgagtatgatgagctgcttctgagtgctggaacagattcaactgtaaatttatggttggctaaagttagcaacaatgattctgaacctaatagcccttctggttcacccaatagacaagaagaaccattacttaactcatatactgactatgaagacagcatctatggtattgcatggagctcccatgatccatcattattcgcttctttgtcctatgatggaagggttgtcttggaatcagtcaagccctacttgcagagaaaatgaatcttgctggtctaacttttggattgtaagcaatggcagaaaaaacataataaggatgttgcagaaatcatcctgcttgacatcaggtcttcaaccctcttgattgaagccagcaatggctccaaaacactcagatctagcttcagttgagatattacagcacagttgagattgtcagcagtttcctttcctgtatcttcaaattttgtccactaggatttcatgttcagttgctagaaatttggctgtgaagatctgatctgtatgttaataactgttgcccatctgtctgaaatagttttctatacttgattcttaggatgttgtatatttgaaaagtgttcacaaaaagatattgcggtatatgatgaggtggagttggactgaatttgtaaaaccattcagaatttcaaattcccaggattagcttgttttatgaaatattctgttgcgcattgaaaattcggttcttt

SEQ ID NO: 32637 - DNA, 6544 bp, Zea Mays
cgacgttcctcgacgacaggcaaggcctatatggcgggtcgtgcaccggttgggtgggccctgcaaccaagaccagtttcttgctcttcctgtcaatctgctggccacgttgagtgcaagtggtgtgcaggaacaggcttctttatccttggtgacaacatattgtgtgaagtaccctcaagaaattcaaaatgtgtgatatgctctggaaagggcttcacaagttgtgctgattgccaagggacaggttttcgtgccaagtggctggaagaacctcctattgacaaatgaggaagtcaatcatactgtaaaatttaccatttcacagtaaactagctacttttatgcttttctgtccatatccttcaatgtaactctgataatattattttccttttcctgtaattgcatcaattccatattatgacatgttcttaattattcaacatacattttctgtaagaacatgagtatcaagaggtattttttgctctaacttgcaagttttgcctcagcatcctgcatcttttcttgtgcagtgcccaacatgcagaaaattaggatataccagtttctctctctcttgcttgttttgtacgtaagcagataaaaatgcatactaccattctgagctgtattattttgacaaaacggtcaggaaataaaactatttatgtttaagttattcataatcagtgtttcccgctaaacaatcactcacctaccgttagcctggtgaaacagccgtttaaatgggataaatggctgattaaacagacatggtgtaccactgtttagactttagagtttaatgggataaatgactatctagagccactttggtagagctctccttgattcttgagctttacttcttgtaggaccttgtacctttctccttattaatataatgatacacaactctctgcgtgttcgagaaaaaaaagattttctaatggactgattcttgtgaggagcaggcgagaagtgattctggtggtgaactggtgattgaatggggagcattttttagctcccagtttgtagtgtagattgagaagtgattcttgttagctccccactagaatccagttgcattttaaccatttggtgggagcccacaaaatccaccatgttgtttttgtttaacaaactacataattgtgagattagataatttataggagtagagatagagatatttcctttggtcatgacatggaaaaatgccatatatgtctaaaaatagtgaaaataaactgcaatttaaatttaaatttcatcatcaaatggtagagtggtctcatctcatgttagcacaagcaaataacttgacgattgaaggtaaaatgtgtaaaggccccaaagtaagatgaaaaagatagtagatagtttaacagctatgaatgccaagtttacttagttttatcttgtaggacctttcttttctctctctaatataaaagatgcacaactctcttgcgcattcgagaaaaaaacaaataagcccttgcagaactggaattctttggttaagtagtgatattcactcttgtgtattccttttacttgttgcttttttatcgaaatacctcagtgcatgttacaaccatggcgaaagggtctctagctgagttgattaggttatctgagtagcattcctcatgttttgggtttgactctctgtgggagcgaatttcaggctgtagttaaaaaaaccctcgtttgtcctacgttaaagcacaagtctaaggtctggccctggtcacggtcgttctcacatggactacggtgtcactgtgtatgggtggggcaagggtttgggggttttctcgacctgcatgagaaggtattcttcttaatataatgtcatggggcgatcttaccctccatagttattaaggcgtcacgctaaagtgatcaggcgagggccgcgaggctacagggcaagtcgtcgcggtcgccttaatcgtcggcgtaaggcgtcagccttaggctagagcgtcgcctttggggcgcaaggcgttcataaggcattggatactggacgccttggccttgggtagggttggtgacagggtacaaatggaggcacagactgcggacctttggtggtggcggtggcttttctgttgacggcggtgacccttctttgccttctgctgtggcgtgggcgcacagggtcttgctccgctcaccagtccgcccttccacgacggcacagctctaccctcccttccacggttgtgcggctcggtccttccttcgcggaggcgctggcacatgtcctcctctctctatctcttagacggtcaacaacctcccctcctccctctcctctctctggtggttgcaaggtggcagctcccctcccttcctcgaggggtactatggagcaggataagttaggtcaagtagtgggctggctgggccgagaaacagcaggccggtggcccatctcctttattttttcttttctttttacttctctattaaaccagtaaatctattagttatgtattcattttttcctaatattctactactatctattagttatgttggatttttaattctattatgttggtttatgttgaacttgtactcctatttggtattattatccctacctatttaagaatatgttcctatatttatatattagtaaggtgtcgcctcaccttacaccttaccactgaaaagataaaaagggggccggctcccttacccccttaactcgtccggtgggggaaagaccgcccccacggtattatattaagaaaaagttcaatcggagccccgatcaataaaaggtcacaaaagctagtcccccgtgcaacatgagggttcgccccccccccctatagatcagatttttactcgtgctttgagctctcccagcccccacccgaggatccgccctctataggttagtccatctcgtatgcacacaatcaggggaaccagtgagtgaccttttttaaccttagcctaaaattcgctccagctgggattcgaactaaggacataaggaatgctactcagaccaactaaccaactcagctagaggccctatgcttacccccacaggtcgagtttttttatgttacaaccatgaaatcttgtaaagtttttaagccaaatcatctttggaaacacagatgtgtcctttttgtaattgcatattgttctttgcaattgcagtattgaatcttgtttttcatttgaattgatgtgcagaaaatgttgctagtttagaacagcgtcagattagctgtctacaaatccttgtgctttgtagtttctacaagaacaaaatattttggaatttggaagggatatggtacttttgtattaagcaaacgaacctgtacaaagctgccataatacttttttgacaacttatctaaaaataatttgagtatgtgcctttctttgtcagtgtgcttgcacatattctgatgattatttggcaccatatttgcacatggctgtatttggtactttcttctcatatgggagggttaggttttatatgtattttactaggaacaaattttagaacccacttgatttgaagttcatcggataggaaccttggatgagctggcttgtagaaatgaaatttgatgagagcaaagctatccaatgtaaatagtcatggtgtattttttgtgttttgtgatagttgactatttgaagatgtcaaaatccctttccgcaccactttgaggtccacagcatatctttcgttaaatgaatttatgatgtcattaatggacttactgctgtgtgctgtgacttaaaatatagcattccatagctgtttcctggacaaaattattagttggctttggcactgtcacttaacctatacatcagggccaagtacgcaaaagacaatgtttctatgtaccctatgcttactattttcttcatttataagttaatgaagttatccgtaagatttgaagggatgacattgtcaagtacaaatcgtcaagcttgcaacattgttgtagcgctatggacaagcttgttatttgtccccagcaattatggcttttattctagggatgattttgtttacttggttgtccattcggttagggttggtttggtgacccggaaattggaggggatccataaagtagaaatccccttgatatattcattaaatagcaaagggattcctcctccatagacccccaccaattccctggtcaccaaactagcctttgggctcatttgagagcccgaaaaccgggattgaaggagctaaaatcaccttcttatttaatttgaataagaaggtgattttagcccctctaatccccttcagttttcggactcccaaactagcccttaatgtcttgtaaattccatggtggccatttaatatgagggttgagtactgcatattaccctttgtaattgcaatattcacagcgttaatgaatcaacaatgactgcgtttactgttcaaatttattttttaatgtagcttttgcttgtcctgattaacttgaaattgcaattttggactgtgtgcattgtatgtggctggtgcagtggtgagagctgtttcactaagtcatcaggttacgggttcgaaacagtcaatctgcatttgtgggagaaggttcgccccagtttattccttccctagaccttacttatgtggaagcctccgtcattgcatctgccattttttattgtatttggctttatgcattgactgttgcactgttgtaccatgccatcaaatttatctttgagagcattaccttaggaaaaactaaagaagagcaattttgtggaaaataagatgatgcattgatacctggaactccttgatatttcattgttttgtcatttctattttgttgtgggctattttatcttttctgttgggctcattctatctgtggtagagatgctgtcagcagttaagacaaaaaatgtaccaaggattggactgctttgagcaatacaacacagatcctccaaatggaagtagccaaagttgtttgtttatttgccattgctattgatagaacttacagtgcaaaacaaacgacaattgattggagttgtatgaattgattgtgacttttatggcatatttctgcattatcctgacttgttaaagttctaggttggatacttggaatttatgcagccttcgtgcaaaacaatgtatcagtatataggattatgtagttactgatctttggcaagggcttgaagttagatgtcttaatgactagagctaccttgattttttttcctgaaagacctgccttgatgattttttttgcagctttgcttctagatttgctgtattttagctttgtttctagattttctgtatccagaaaaaaatggtgtagtatcaaattatcaaaatttacacttatgttatgtgatgattgattgggacacctttaagaaatttatgagatcaaaataagcaagatattcaaggtcatttttaattagtcaataaatagttatgatgttacaagcctactcttcatatcttcaggtacattctcaaaccatccttgctccctgtcaggaataaaaagatggattgctatttattatttctttaatgttcctctagagaattggttgaaaatgacgtgtacattgggaaactttgtcatgcaccatatagcactttgcacggtccattagctcacgattcaaatacatgaatgggatccaattgcttgttggttagggaatcttgaggggttgtcggaattggtgttagcacttggcaaaataatggtgcagagttgggtttgcgttgcgtgtggtgctggtttacgctgcctagttcaaaataacaaacatgactagtccatttggtgcatgctgagcgagccatgctgaacctggttgatccctggaagctgctggggcgtcgtatgactgacgatcaggggttgctttaaagcacaggtgtgggaatgcggaactgtccatctacaaaatcagtggcagggatcctctcattataaagttatctatagagagcaaggacaagaaagaaaatagatatcttggctattcttttgtccagctgggcaatcgacaaggtgatgaacgcagcagttggacagaatgagtgtagttcaaaatcttcgttgtggagtagcttcacaaataatggagttggaatacggaaggtgtttggcttggagattagctcgagctctaggaatacaattcaagagggttttgtgggaattatctagtgtgctctgcttttgtatgtacgccattttgatgcacctaagcatttatgcatttgtaaatgataagtgctcctttggatagcaggaactttggagtatttgaatcattagaattattttttttcataaggaattcttctgggttgccattcttaaccccaattccatagagagatcaaacatgagcttgaacctcaaatttagagaagtcagctacattttcccctttttattggtctactctcttacaaattacaatgcaccatccctccaaa

SEQ ID NO: 32638 - DNA, 1406 bp, Zea Mays
tccatgactgttctggaagctccaagcgttggcgaaaaaagtaagatatttctgcgaggcaaggaatccctcccccgcttctactctttcggttcgccggttcgccgtctcgcacacccacttcctacaccgccaccgagcactcgctcagtttcatacccatcctcgaagtcgcctctgtctagttcctgctcttccaccaccgcctgtgatgtatccccgaggcccggatgggggacgagatgcctcgtctcgccctatgcttgccactcccgccggcaacgacacgcgcgaggaggatgagatcaccaccgcggaggctcatgtggagaaagacgccgcgcggatggacgctgccctcctcatgcggactacgcccaagatggacgagtttcacaccgggggcgatctggactcaagtggaagtggaagcggcatctcggggccaagcgcctccaaaagacagctacaaagaaggggatcgtggcggcaacgagtcagcaggtccagcatccatgcttatccttttcctttgtgtttctatttgatctgtttttttgcccgcgccagcaacagagaagaatgtggtcgtggctgtaatgggtcagcagtttctgcaattttttggacgaccgagaggtgctgccgtttatgagtaactttccagtgggaaaacagtatgccacaacatcatggtcagagtttggacattgcatgaagcacttgctggacaattgagaagaactcatgcctacttgcaggcatcatctcaaccatacaatgggattcattgaaatatcaggagggttgttgtacacgtgagtggaggtcgaacccttcttgtagggctcttaatgtatgaagtacgccatgctagctattgaatcaagttcaatgggattcgttaaaatataaggagggttgttgtacaagtgagacaaggtcagcccttcttgcagggctcttaatataagctcagcctgtactacacgttcatccacgtcgagctcgtcggctcccaacgcaaccccttcttctctcacgagatcagtggtgaggacgacactggggatagagacctagggttctccaagtgggcctagaaactccatggcaacgtctcaggtttcatgcagttctctaaatttattttgctcgattgtaagggaactgtgtcctctataagctcgcgctcgtgctgtaccgggagtaccccttcttcctgcaagtctggttcaattaaaaaattttgttctgtcgtgttgtaaagtacttggcgagctatgatatgtcattaccttagtgagaagactgcttctaatatattagtaatttttagctgtgcagatcatgtcatcatataaatgttgcaaacattataaaatagaggatccatttgaactctt

SEQ ID NO: 32639 - DNA, 2464 bp, Zea Mays
ttctacttcacgtcttgaccacgtccgcctcggcccctggtctcctactctcctccccactcctccctcggcctggagtccagtcctcgactccgcctgccgcctgctgcctgacaagccacgcgctgcggcagccgtacgggcactagggttttcttccacttcgaccgcgggctcgggatctcgcgccgcaccgcaatgcagcacacgtgccgctgatcccgtggccgcctccttcctttcctcctcctgcggtcctgcgccgcctctgctgcagcgggcagccgccatggcgcggcgccacgggtggcagctccccgcccacaccctgcaggtggtggctataacagtgtactctgtgctttgtatagcattctatgctttcttctctccatttcttgggaaggacttgtatcaatatatcgctgtcggtatttatagttttttgccaggctttatctgtgctgattctatatgtcagatgtactgcgattgatcctgctgactctggcatcctgatttccatggatgacatactaatttataaatcagaagcacatgtagacactcaagatgaagctggtaagccaggattgaggaacgatgaggatatccgaaagcataaatcatgctttggaagggtttgtttttgttgcgctatttttacaactggggactgtcgcggaggggatgaagctaaccatcaagaagattatggtgaagaggcactcttttgcaccctttgcaacgcagaggtgcgcaaacatagcaagcactgtcgaagttgcgacaagtgtgttgatgggtttgatcatcactgccggtggctgaacaattgtgttggaagaaaaaattatatcacatttttatgccttatggctgtgagtctggcttggcttgctgctgagtgtggagttggtattgctgtttttgttcgttgcttcactgacaagacagtcatagaagatcagattggggaaaagctgggttacggtctttcacgtgcaccctttgcaaccattgtagccctggctacagctctttcaatgcttgcttcagtaccactaggagaactatttttcttccatatgatattaatccggaagggcataacaacttatgaatatgttgtggccatgagggctcagagtgaacctcctggaccttctgtcaatgatgaccaacaaagcttggcatcttctccaatgagttctgcaccaacagcttttagtgggagctcgtttgcacggcactacaaaggcgcatggtgcactcccccacgtatcttcattgaccaggacgaaatcatcccacacctggagcctggccgagttccttcaactgttgatcctgataccacagacccaatggaaagaaccaaaacccatcctaaacggccagtccgcatcagtgcgtggaagcttgcgaagctcgattcaaatgaggccatgaaagcagcagcgaaagccagagcctcttcgtccgtgctgaaaccgatcaatactcgcaaccagtatgaggcagacagtgatagcctcagtagcagaaacagtgtcataagtgctgataccggacaccataggtaccctcggtcttgcgggaattcgcagtacaagccctcttatccaccaagcagagcaagtgcagatgacatcgagttgtacccccagacaccgagcagcttccagagcaactcacggacttcaactcccatagccgagcaccatccatccaagcatttcaacccaatctaccagacatcagcaaacaggtctccattctcagcaaaagcaagtgtcagtgaagctcctgtctctgaaatcaccaatgcagggaggtcctaccccccaccacaagcggacagatcctcccggtcatctgtttactgggatcaggaagctggcaggttcgtgtctgctcaggcaaaccagggatctagctctcgccctgcctatcctgatcttctatacaccgggcagaatatattctttggtggacctctgattgcagatcccgcagcaagaagcttcagagatcctggtggctcgagccaaaggtctgccgggcctcggtcgcaccagctcccggtgttcgttcccagtgacccccagaaagatcagctgtccaggttaccgtgaaatgctatatcttttttttttggggggggggggggggtagtagtcttccgaaacacatgttgccctgccgggttattaatgtatagttattagctcttagacctgacagaatagttcatgactttgtatcgggttcatggaaattaagacctatttaggcactatcaaccataagcactgaagttatggaagtgctgcggagtagtagtgaagtgaaactgacaaggatgttctgtcaccaaacctaattagcttcacctcgccatatactcaaaacaaggcgataactaccaacgtgctccttattaaaaaaaactacaaatgtg

SEQ ID NO: 32640 - DNA, 2165 bp, Zea Mays
ccaggattcacttagcagattgttggcagtggtgcaataccatcagcggatttgtgcatcaaggatgattttgataaaaggtttcaagaagatcttgatgaagcagtgcgccaaagccttgtgtatggcactggccttaaaaatgccgctggtgaatacaattgtttcttgaatgtgattattcagtcattatggcatataaggcggtttcgggacgagttccttaaaacatcatcactgcacaagcatgttgaagatccttgtgctgtctgcgctttatatggtatcttcattgacctgagcaaagcagccaagggacacggagaagctgttgcgcctacttcattgaggatcgctttgagcaaatcctacccgaacagcaaattctttcaggagatgaatgatgcatctgaggtactgggtgtaatctttgagtgtttgcataagtcatacacttcgcgtactgtctgccatggtaaacctcatgagaagaattctattggatcatgggattgtgcaaatatttcttgcatagcacatagtctttttgggatggacgtatatgaacggatgaactgtcacaattgcaagatggagtctcggcggctcaaatatacttcatttttccacaatattaatgctagttcactccgaaccgcgaagatgatgtgtccagattcttcatttgatgaacttttgaaggttgtcataatgaatgatcaactagcttgtgatcaagacgttggcggctgtggaaaaccgaatcacatacaccacatcctttctactcccccacatgtctttacagttggtaagccttttttggctcttggatatttcaggctgcaattattttgcatgtactttcatgtccagtcttgctgttgtttgatgaatatttgacctcacagtattctcttagaatgctttatatgttttattattcctataatcgtgtaggataggttgctgtattctcttagtcgaccatcttcaattgagcaattgtgatctactttgctttttggcacgttacagccttgtgagggggtgatcctgcactaacacttccatgttctatgtttggtgagatcatttgttggcattctcctctacttacctattgaactttcgttttagttttgggatggcagaacaacaaagagaatgtggatgacatatctgcaactttggctggtatttcaactgagatagacattagcatattctaccgtggcctagatcaaggaagcaaacacaccctggtgtcagtggtttgttactatggccagcattatcattgttttgccttcaaggatggacgatgggtcatgtatgatgaccagacagtcaaggttgtaggtagttggggtgatgtgctcgtgatgtgtgaaaagggtcacttgcaaccccaagtgcttttctttgagtctgcaaattaatcattcttcagagtcgtaaagtgttgtgcagtggttaacatgccctcaaatatagggtttttacctgtggccgtgaagattagaaatagagtagcaaattcgttttgagcgggggtatagagtagcaaattcaacagctgcgttggtctctgagctttggtcgagcccctcgtaataagtagtcacctgaggattaaaggagagctgtttacccctctgtttttttaacctttggtatacttgctgaacttcggatccttcatctgccaatgagatttcactgccgatcaagttggtggggacgcattcgacatgaactgccatccaacaattctagccggatctgcctaaagctcttcattatgcaccagttatgtatagaattttgtgcttacaatgaggtgacaggtataggagtgtgactgttttgaggccagaaggtttagagaatggaaggaaatggaattgttggtgcggtgtgtatctgtggagtactgtttgaaaagaggaacgatatctggaatacggtagactttgagaaatctgtagtacacgagtctatgtaaacagggactcgatgagattatgtgagatgagtatagcgatgaataccagactccttatcactactgtttttatagttaaattcttattttttttatttagctaaagattgcgcgcctaagatataaaagaaaccgttgaagtgacaaaagactcaga

SEQ ID NO: 32641 - DNA, 186 bp, Zea Mays
cgcgactgtggtcgtgttcatcgaattcgccaacgctttgttgccgatttgactgtcgtcgcttcgcgtgttgtcgagccgtcgtttttcctgtcttgtgctcgcacggtttcctgctcgccagcgtgccctctcggctcgctcggctttaatttccaatcacgtcgtcgatctcgtcgtttgccg

SEQ ID NO: 32642 - DNA, 1513 bp, Zea Mays
gcggcagcttctctcccaaccacactctcttcagtcttcactcctctcctctccccgctccagtcggtctctccagtctcctctcctcaccttgccaggaacccaggaggaggagggatacaggtgcaaaggcatggtgtggaatgtgcaaatctcttaaaagaatcccttcagtccgcagagactatagggaaaaatattggcattagcacgactccaaccaggttgtctgccatagttttgctggagggacaaaaacagaagcgttcctgactctacctcaaggatgagagctgcgtcctccacggtttaccctgtctaccttagcctccaccgccaccccaacagccaccaagcctcttttcgtccctcgagagcaaaccatgacaacacccataaatgtaccaagccacccaaagttcttagacggtctctcttctccctgcctgcctcatttcttctcctccacacatcctcctcccttgccgtagatgacgcaaacatgccatctacctcaacaattgacaccacgatcacagatcgcatcttcatggacttcagcgtctgtccaagctactttcgctcagacagacctctaggagctgagctttcctcgtgccctgattccgagcctcttggtcgtgtcgtctttggtctctatggccggcttctccccgtcactactgccaatttcaaagctacgtgtactgcagctgcatataggggcacccttgtccacaagctccttcagggacagttttttgctgctggtcgacaaggtcctcggcatgacaagggtgaggtccagcctccctctggcctcgttaggaattctgagactgttaaccctaaagcgttcgagctaaggcatgcaaggcctggcacgctttcgttatgccttggacagaatgacgatgatgacgacatcaagctcaaccccaattatcacaatcttgaattcttggttactacagggccaggaccctgtcctgagcttgatggccagaacatcgtctttgggactgtattggaaggaatggatgtcatcaccagcatcgcaaccatacctacctacaaaccagctgaaaggatccgcctcttcaacggctttgcgcagttgattggtgatggaagggctcaaactgcccgggctatgtgggaccgcccgcttaagaccgtgtatatcagcgactgcggggagctgacagtaaccaaaccatctctttcccctccaagcttgccatgactgccagtgtaatgacactacccacatagccagttttctgtctctgttgcttgggtcctctttctgtactctatatatgcagtgtatatattacctgtgttattaaacttatgcatgttccatgagctgtatatatatcgcttccgttgttaatttatgcatgttccctttgacaatgactgtacttgatgagtacatggatgttaattatatggtcaaggcctaatcaattatagagtcctaagcttaaggggagtcgaagtcaac

SEQ ID NO: 32643 - DNA, 2116 bp, Zea Mays
gggatcccccgtccgcctccatccaccgcccgtgggaagggaaggcaagggaagagcagcgagcgtcgcaggcatcggccccagctccggctccgcccgccgccgcaccgcccccctcctcctcccccgatccgatcgccgatcgccagcctttgcgtcgcctcgcggcaatatttggaacccctgttaccgatcgcctcatgccgtaccactgaccgatcccgtcccgtcccctccgacccccgcctttcgtctgctaccccgtcgagaccctacctcccgatcggactagggtgcgtacgatggctagcagcgccgacccgcatgctgccgttgccgcggccatggccgggacgaccccgtccgatagcctgctcggggcgaagaaggctggggcggcggccgccgtatggaagctccccgaggccgcgacggttcccgtcgcggtggtggtcgaaaaccccatcatggatgccgactcctggccggcgctgcccgggctgtcgtctccgccgccgccggctgcggggccagtggccaaggcatctccaaaggccgcttctccggcttccactggggcggtgatgtcgccgccgtctttggccaatcccggcgctccggatgctaaccctggtagtgaggctccggtgcgcaatcctgtggtccagcgtgccctggtgatgcctgcggcaaatgggctggagaagattgcccctgcaccggagccgtcccctgtttatgtgcctaacgctcggagcaacggtgcggatcctcatcagaatggacgttttggctcccatccccatggccgtggtggtggttatgttgggggaaacaggaggggtaatggtggaggtggggggcggcgtgggagtgagcaccatgggttttttgatgggcaacggcgtggaggtggccgcagagatggtcatggaccagttcatcatcagcgtggccaccagccaacatacattaggactcctactctagctgttgtagcaggagcacctcccccaccgcctccatttgttagccctgctactcctcaggcaccaccttatgggacacctatgggcttccctgcagacatggcaccacaagtttactattacgcggcacccacctcggagggcattcaaggcctgccttttatgtctcatccagcaagcccccaagctgttttaattgatccttttagaaagggtcttctggaccagatagaatactatttcagtgatgccaatttgtgcaaggacctatacttgcggcaacgcatggatgaccaaggttgggtgccattacccctgattgctgggtttccccaggtccagaagattactaacaatattcagtttatcttggaaacagtcatgctatctaacgttgtggaagtgcagggcgacaagctacgaaggcgtggtgcatgggagaattggctgcttccaaaacaaaattattctgctgggagttcttctggttcgttgccccctgtgacatctaacattgattctctgacgtctcagtttcgatttgttggactcgagggggcaacataccatgctaccatgccagtaatgcatggtgaagctctcttgacaagatcagcaacttcagttagtttaggttatcatgcatcaaccatgggtgggctaccgagcaacgggagtgaaccacttttggggccgaagtctgcaagaaatttactcaggagcgataccttttgaggctatatatttcaagatgaagaagtataacggcaggccgagttttcacagtgacggcctgcacactatctcgtgtgaggtgaagatcagttggtcaaaaaaaaaacaaaaaaaaagaggaaaagcataatataccaaaaaaatagagataggtatacacagaactgaaaaaaaacaaaaaaaggcaaaatacaaaaataaaaataaaataaaaaagcaagaggcaacttttgtgctggtactcatgccctttgtgttatgtggtcttagtgggtttgttttcgaatgttagcagtttgatggttctattgtgtaaaccggagttattgaagtgtcttggtatcattcggagactgctgagtggatgaagttatataagtacaagacattat

SEQ ID NO: 32644 - DNA, 1466 bp, Zea Mays
gcatgattctttccgtgcaggctttcctagctctcccaccttccgcaaacgggtcctatctggctgaccacgcgaacccgccaccccccaaccggtcaattcgtccagctccagccactcgatcagcatgccgggatccgaattcggagcctctccttttaccgattccctcttcttcttcctccagtccccgcacccctctccccgccttcgattacgccacgataaaatagctaaactactagcatgcgagtgggcgtgtccatgtgattgttcagcgtccaggtgggcaaccacggagttgagcgcgcgatggagaaggggagcagcgggccgtcctgccgcgccgccatctgtggcatcgtcgtgctcctctgcgccgtcgccttctcctgctccctcgccgcggaattccgcaaggtcaaggagaaggacatgaagctggacggcagcctctgctcgctgcccaggagctccgcgttcgagctgggcgtcgccgccatcgccttcctcttcgtggcgcagctcgtgggcaccacggcggcggtgagcaccgcgtgcgccgccgagcccaagaagaggcagagctccgccgcccgagggcgcgtcgcgttcgtcgccctcctggccctctcatggctgagcttcgcggtggccgtggtcctgctggcgacggccgcgagcatgaaccacgggcagcggtacgggcgcgggtggctggacggcgactgctacgtcgccaggagcggcgtgttcggcggcgcggcggccctggtcgtcgtcacggcgctcatcaccctcggcctcaccttcgcgaccgaatcggccgcgggggccatggcgacaacgcccgcgtcgtcaccggcgacgcgcgcgaggatacgtgtcgacgcggcgtcggcggacgcggaacaaccgggcgggcgatccaggcaatgaggcaagcaggcaggcaggctggcagtggcaggggcgcggcgcggggcgggccaaccggaggcggcgggtgagcggcaacgctcgttccggctgcaaaaggccacgcccgcgtggacaacggaaagtggcaggcgctcgccgccggacccgacgggtgggaccgcgggggggcggatggattatggatataccgctggttggttggatatttagcagccgcgacagagggtacatacattaccgtttactgtcctcttactgacacgatcgtctaacatgtaaatgacgctaagcgatcattgcaaaaaaaaaaattgcaaagataaaccatacggaaattaccactttgttacagctgagtgttgagtgtttgtgtgcatgtgcaccaacctggtgctagtggtggtggggaatgggcatgttcagcctggcgccttgattggatgacctggacactgtactgtgattggtgacaataatactacattgaaaatttgaaatgatcaaatggacattctttcatgaac

SEQ ID NO: 32645 - DNA, 1156 bp, Zea Mays
tattttttcatctcgtcaccctagtagaatcattgtcatcttcgttgccctgctagtcccgtagcttctctccctcctcgctcctcggctcctcgcttgtcgctcctcctcagccctcaccgcgttccccgagcacctcgtcatcatggtcaatggcctcgtcgggagcgcggacgattggaagttcgcggcagagcagtttgtgaggcggatgccggacaaggtgatcgtgcaccgaagtcagtgcaactctgccactcagacatttgatggtgttgatttaatgggtgaaaggttagcaaatgaggttctatcagttgtagagcaaagacgaggtgtgaagaaaatctcgtttgtggcacattctcttggtggccttgttgccagatatgctataggaaggctctatgaacctaatagtagaaggaaatcttctgggggggagagcagagatgatgttgtgcacttgaatggtcacattgctggtttagaacctatgaatttcataacatttgcatcaccacatttgggttcaagtggaaacaaacagctaccttttttatgtggccttcctttccttgagcgaagagcttcagaagctgcgcatttgattgttgggagaactggaaagcatttattccttacagacaatgatgatggtagacgcccacttctccttcgaatggttgatgactctgatgatttacagttcagatcggcgttgcgttctttcaaacggcgcgtagcatatgctaatgctaattttgaccgtatcctttaacagcttcatccttgtctgtgtactaattattaatgctgagttacacttcttacctctgacgtgtttccagttaactaagcaaacagatatggttggatggagaacatcatcaatccgacgtcagcatgagttgccaaaacatcgtcttcttgttcgtgatgaaaagtatccacatattgtttatgttgaaaaggaagttacagacaacaatgaaacgaaggcccatgctgatcattatgatccagaagaggagatgataagaggccttacgcaagttccgtgggaacgtgttgatgtgagcttccagaaaagcacccaaagattagttgcgcataacacaattcagcatctgaagattctgaactttccttaacc

SEQ ID NO: 32646 - DNA, 1904 bp, Zea Mays
ctgggccacaggtggttggaaatcatgtaggctcaaaggtaaaagtagtccagttcatagccgagccgcaggagagaagagaagcaccgcaaccctaggtcgccgcctcttttcctctccactcgtccgcgggacgcgacgcgacgacaccggagggttttctgcggggatttgtttgtcgccaactcgccggcagccaagatgaggccggtcttcgtggggaacctggactatgacacccgccactcggagctcgaccgcctcttctaccgctacggcagggtcgagcgcatcgacatcaagtcaggtctgcctgcccttgcattccctccttttgcccacccccttgtttatcttcgtcttcggccggttttagattcgatctcatcttattgtgtacctagccacttggtatatcttcatgtttaaatttcaacgaattgaagaaaaaaaaggtggtggagtaagatactctgatactttgcggttgttgtgctgctccatgcgatgtaactgcagttgcaggcacagatgtttaaatctttactctggcgcaggaactaccagggcaaaacatagcttccccagggctcttcaactccttccattcaataacctggccatcatttccttcacttgaaaccatctgttcatgtgccctgatgcaaactgttactgctgctcgagcatgtttagcgggatcgtgccatcagtaccatcatgccttaccatgccacgactagaagtatcaccaacatgacaacatgctatgtgtactacattgataagcaagagttctatttatggcgaagcatgtccaatgtctccggtcattctttcttactttggatataagttgttcaacaccatgcttaggtcttatcatgaatggaatctaccactctagtgctcttcataccatcagaactatgcaggctatgcttttgtctactttgaggatgaacgtgatggcaatgatgctatacgggctcttgatggttatccatttggccctggcagacgcaggctttcagtagagtggtcacggggtgagcaagctggtagacgtgatggcaacaaaccagaagcaaatactaagccaactaggacactgtttgtcattaactttgatccaatgaacacaagagtcagtgacatcgaaaggcacttcacaccatttgggaacatatcaagtgttcggataaggaagaactttgcttttgttcagtttgaaactatggaagaagcaagaaaggctcttgaagctactcatgctaccacccttttggacagggtgatttctgtcgagtacgccttcagggatgatagtgaagtgagtgataggtacggcagcccaagaagaggtggtggctatggtaggcggggtgatagcccagtgtaccggtcacgtcctagtccagactatggtcgcccagcaagtcctgtatatggttcatatgacggtcctggtcctgttcgtgatcgctatcggagatctcctgcttatcgatcaaggtccccacctgcgaaacgaagagcatatgactaatcgagaaccctctgttatgccatatatggcctaggaacaccctgtagcaagaacttactgtacctgtaccggagcgtcaccttaatgtccttaaattcccgtgtttaatggtctgtacatggttatgctatgcgactgtcaggtttcactgcatgcaatattgtcatttggctgctaccctttgtttggccttgggatgctcgatctctattttcagatttttaccgtccttgtcatccgctgctatctgttaatagagtgcattggcgatttcatataccggccaagcgtgctagttccaggtttgttaatgggagaaaaatcatgcactcggctgtagggtagccctgttgcc

SEQ ID NO: 32647 - DNA, 648 bp, Zea Mays
aaaacgggaaggagatcaagaacgtcaggccaagcttctcgcaaggaggagatcaagaaacccggcctagggcaatccggtcgcaagtcgcgacgacggaatcatgggtgttcttggcacccttgctagaaatctggacgcccttgttgggccagggatcatgctactctatcctctctacgcgtccatgcgcgccatagagagcccttcttccctggacgatcagcagtggctcacctactgggtcctgtattccctgatcgccctcttcgagctctcatgctggaaagtcctgcagtggtttccgccgtggccgtacatgaagctgctgttctgctgctggctggtgctgcccatcttcaacggcgcggcctacatctacgaggcgcacgtccggcgctacttcaagatcggcagctacgtgagccccagctacagcgagcgccaccgccgggtgctgcagatgacgagccttgacgcgcgcagtgcagacatggtacgcgtgcgtgtttgtttgatcattacgtctggccttgccaacacttcaagaaaagaatcaaaagatggcatggggccatgagagagagagcatggtttgaatgaagctgcaaatctggtggtgtacttgtggaatctttcgcggaattc

SEQ ID NO: 32648 - DNA, 1526 bp, Zea Mays
cgggtttccagtgaaccgcccaaaggttatttcggtcaagtcgcttctctcagtggaaacccaaaaaccctcttcgaagttcgatcccagggccgctccggcggcggcggcgcgttgagatggctgacactgacagcgcggagaccgagaaagagaagatggtagcggatgatgggggcaagcccgcagagctctcgaagagcgcgaggaagaagctgcagaagcaggagcggcaggcggaacgtaaagcggcccgaaaagcggcggagaaggagcgacggcgcgccgacatagagcggcggaggcgtgagtgggaggacgctcttgccgccgcgccgtcggatgaggcccgggccgagatggtggcggcgcggcgggagacgcggcgcgagcgggtgggccggcgggcggaggagcgcggggcgcgagctgaccggctcaggcgcgcggctgagggcgcgggccagaaggtggtgctggacctcgagtttgcggaccttatgaggcccaacgagattcatagcctcacgcagcagattatgtactgctatgcagtgaatgggagatctgcaaacccagctcacctgtggctgacaggttgcagtggtgaaatggcgacccatcttcagagaattcctgggtatgataagtggatcattgaaagggcggccaggccttatattgaagcatttgaagaccgtaaagaaaacctcgtgtatcttacagcagatgctgagacagtgcttgatgatctagacatgtcgaaaatatacatcatcggcggcctggtggatcgaaacagatggaaaggcataacactgaagaagtcagctgagcagggaattcaatctgcaaagcttcctattggaaactacctaaaaatgtcaagttctcaggttcttacagttaaccaagtgtttgagataatgttgaagtttgtggaaacaagggactggaagacggcattcttccatgtgattccacaaaggaagcgaggagaagctgagaccagagatgacgtggaaaaaggaggcctggatgacaacgatggcgccgccgaaggggctgcagatggagaccattccgaggaagacctgaacaagggcttcggtgaggaggaggacgatgatggggacgaagagctggaagaggaagaagcagatgtctccaacaagaggcagtgtgttagagttgaaaacggggaagctggggatgccaccgtagcagaggtggaaccaaacaacggcggcggcggcgggggcggggaccgctgaacagtgaacagcaccaccacgtttgtcgctaactcgctattttcacaacagcatcgttaaagcaggccaatgaatcgagcaatggtgacaggaactgatgaacagcgaagctcacgtttgtttctctttcgtatatgacagcattagtttttgttttccttttttcagcgttttctctggtatttatgtattttaaacaatttatgttgtgtatttggaactggcgatcttgttgctgtcattttactatag

SEQ ID NO: 32649 - DNA, 2573 bp, Zea Mays
cccgtgtttaccctagttcgacacgctccaggggctacatcgtcgtctccccgcctcaccacatctcacctcgtctcctcctccggtccttcccccatctcttcgccggcttccatttcttgcctgccagtcactctcgtccgccgcagatcgagaagccgccaccaaaccccccctccaccaccgtatgaccatgacagcccagcagcaccggcaccccaagcgccgctgcgtcgccctctccctttctccgtccctcgcgcgcatccccggcgcccccacgccgccgctcgactcgctggccgacgagcttctcttccttgtcctggaccgcgtggcccaggccgacccgcgggcgctcaagtccttcgcgctggcctcccgcgcctgccacgccgcggagtccagccaccgccggacgctccgcccgctccgcgcggacctcctgcccgccgcgctggcgcggtacccgaccgcgacccgcctcgacctcaccctctgcgcgcgcgtccccgacgccgccctcgcctccgccgccgtctccgggtcctcctccgccctccgcgccgtcgacctctcctgctcccgcgggttcagcgccgcgggcgtctccgagctcgccgtcgcctgcccgggcctcgtcgacctcgacctctccaatggggtcgacctcggggacgccgcggcggccgaggtggcgcgggccagggcgctccggaggctctcgctggcccgctggaagccgctcaccgacatgggcctcggatgcgtcgccgtcgggtgcacggagctgagggagctctcgctcaagtggtgccttgggctcacggatctggggatccagctcctcgccctcaagtgcaggaagctcaccagcctggatctctcctacaccatgatcacaaaggctagcttgcctcccatcatgaagctacccagtcttcaagagttgacactggtggggtgtattgcgatcgatgatgatgctcttggtagtcttgagagagaatgcagtaaatcactacaggtgcttcatatgtctcagtgtcagaatatcacaggtgtgggagtttcatccatcctgaagtcggtacccaatctattggaactggaactttcatactgctgtcctgtcactccttctatggtgagaagcttccagaagcttgctaaacttcagaccctgaagctggaaggctccaaattcatggccgatggactaaaagccattggaacctcttgtgcttctttaagggaactaagtctgagcaagtcatctggagtgaccgacacagaactctcttttgctgtgtcaaggctaaagaacctgctgaagctggacattacttgttgtcgcaatatcactgatgtttcactagcggccataactagttcatgctcttctctcatctctatgaggatggagtcttgtagccgtgtttccagtggagcactccaactgatcgggaagcactgttctcgcttggaagagttggaccttactgacagtgatttggatgacgaaggattgaaagctcttgccagatgcagcgaactttcgagtctaaaaattggtatttgcttgaagataagtgatgaaggtcttacccacatcggaaggtcttgcccaaaactccgcgagattgatttgtacaggtgtggaggccttagcgatgatggaattattcaaattgcgcagagttgtccgatgctagagtctatcaacctatcatactgcacagaaataacagaccgctcactgatttcactatcaaaatgctcaaagctgaatactctggagattcgtggctgccccagggtttcatccatcgggctctcagaaacagcgatggggtgcaggctgctttccaagcttgatattaagaaatgctttgggattaatgatgctggaatgctttacctttcccagttctctcatagcctccgtcagataaacttgtcatactgttcagtcaccgatattgggcttctttccctttcttgcatatccggcctgcagaacatgacgatcgtccatgtagcgggtataacgcctaatggcttggcagctactcttatggtttgtggtggtttgacgaaagtgaagcttcatgaagcattcagatccatgatgcttcctcacatgataaaaaatgttgaggcacgcggctgtgttttccaatggattgataaaccattcaaggttgaggtggaaccttgtgatgtatggaagcaacagtcgcaagacgtgcttgtacgatgagaattgagttgaccctcgagcatgtggctatcgtggaaatcatggcatgcatcgttatggatggatgggttgttggctggcaatgtcatccgcgcaagtgattcctgtgtttgagcataggtcttgatgttgttgtatactggtataagcaagtgattcctgtgtcatccgcaagtgaagttgctgtatagaatactaccatgtaaagatgtcgatacggaagggatgagaaaatggttttgaaatttagtacgatatgccttttcctatgttcgtttagttttaatccgtactatcttctactgtttct

SEQ ID NO: 32650 - DNA, 1525 bp, Zea Mays
aaaacccgctcgaacaaataggaaaaaacggaagccgtggcgagatagaaaaacccacacttgagccatcatcccaagtccaacctacccccatcagcatcacgcattcacgcgcccgccccagcgccgtcatcggtcgccatccctgcatcgaccgcaccgcatcgcaccgtctccgccgccatgcgccgcttcgcagccgacagggcgcgccgcgcggtggccgcgtctctgcacggtgcagcgtccagatcagcagcgccgtcgcctcacgctccggcgccacgtcatccagcctccccggtgggggcggcggcgatggcggccgccatggtgaggaccatgtccacgacggccgcgggcacgcccccagtgtcggtcgccaccatcaaccccaaggtcttgaagtgtgaatatgcagttcgaggagagattgttacacatgctcagaacttacaacaagaattgcagaaaaatccagaatcacttcctttcgacgagatactctactgtaatattggaaatccccaatcacttgggcaacaaccagttacctatttcagagaagttctctctctatgtgatcatccagctctcctggacaaaagtgaaactcatgctttgtacagatgctatagagagagcatggcaaattctagagaagataccaggtagagcgacaggagcatatagccatagtcagggtataaaaggtttacgtgatgaaattgctgctggaattgctgcccgtgatgggtttcatgcaagtggagataacatctttctaacagatggagcaagcccagcagtgcacatgatgatgcagttgttgataagttctgagagcgatggcattctctgccctattccacagtacccactgtactctgcatcgattgctcttcacggtggttcccttgttccttatttccttaatgaagagacagggtggggactcgatgttgatgagctgaagaaacaactggaggaggctcgatctaagggcatcactgtcagggcgcttgtggtcataaatccaggaaatccaacaggacaggttcttgttgaggaaaaccaaaagaaaattgtcgaattctgcaagaatgaaggacttgttcttctcgcagatgaggtttaccaggaaaatatatatgttgaagataagccattccactcattcaaaaaaattgcacggtcactgggatacactgatgatgatcttcctttggtatcattccagtcagtttctaaaggctactacggagaatgtggaaaacgaggcggttatatggagataactggattcagtcctgaagtacgggaacaaatttacaaggtggcatcagtaaacctgtgctccaatgtttcggggcaaattcttgctagccttgtaatgaacccaccaaaggctggggatgaatcctttgaatccttcatgtcagagaaggatggtatcctttcatcgttggctcggcgtgcaaagagtcctaatatggaaatatcaaacaagaataaaagctatacc

SEQ ID NO: 32651 - DNA, 2341 bp, Zea Mays
cgggtgcatgagccgggtccactcgggaagtgaccgggacctcgcagcatctccctcgccccaccccaacctccacctccaccgccacccattgaaaagcagagcggcagactggcagaggcaggcgctctcggctctcctcgtggacaaaaccaccggctcccgatatccaaattggaacaggggattctgaacttggggtttgttccggggaccgattctggcatcggcagacgggatgtcagcccccctcgaccgacttgctaggccatgttttgaagggtttgtacataacgatgaaaggaaagagagcagatctgatgcagacaactcagaaggagataagaagactaagatcggatctttcaagaaaaaagcaattaacgcggggaacaaattcaggcattccctgagaaggagaagcaaaaagaagaccgaaaggggggattccatcaaggatataagggacattaaagaacttcaagatgttgagacatttcgacaatgcttaattgacgaggatttgctgccgccacagcatgacgattatcacatgatgttaagattcctaaaagcacggaaatttgatgttgagaaagctaagaatatgtggtcagacatgcttaaatggaggaaggaattcggggttgacaaaatagaggaatttgagtacgccgagttagatgaagttaaaaagtattacccacaattttatcatggggtagataaagagggaagacctgtctacatagaattaatagggaaagttgatgcgaacaagctagtacaagtgacaactctagatcggtatgtgaaataccatgtcaaggaatttgagaggtgcttccagatgagatttcctgcttgctccattgctgcaaaaaagcacatagattcgtcgacttctatttttgatgtgcaaggcgtgggtttcaagaacttctcaaaatctgccagggaattaatcacacgattacagaagatcgacaacgataactacccagagacattgtgccagatgtatataattaatgcgggccaaggcttcaagatgttatggagcacaataaaatcattccttgatccaaaaactgcttccaagattcatgttcttgggaataagtatcaacataagttgctcgaaataattgacgagtgtgaattgccagaatttcttggtggcaaatgcaagtgtattgaaggttgcgaaagatctgacaaaggtccttggaaggatcccaacataataaagagagtcctcaatggcgaggcgaactatggcaggcaaattgtgaccatatccagcactgatggaaggatagtcagttatgcttggccagtgcacccaaatagaaaaggcagtgatgcatctgccgagtctgggtctgaagtggaagacgtaacatctcctactgcatcaaggaacctgattacacatcctattttgacccctgttcacgaggagtcaaaattgtcggcacatggttcttcatctgttgttcatgcttctattggagaaaacattcctgttgtggacaagattgttgatgatggatggggtagtcccagatctagtccacaagctgcttcttcaggttctttgtccctgaggaatttgcatggcacatttgaaggactcagagctcaaactatcacatggctgacattcttgatgatgaccctttttgccatgctttgttctgtcccaagcaagatggctagaaggatctccaaccaatctgaaaatgatgtgatttcatcgatgctgagacggctgggtgagttggaggacaaggtgcaggtgcttgaaacgaagccgtctgagatgccgtttgaaaaggaagaattgctcaatgcagccgtccgccgtgtggatgcattggaagctgagctgatttccacaaagaaagccctttatgatgctttgatgcgacaggatgagctactcgcgtacattgataggcaggagctgatcaaatttcgtaaaaagaagttctgcttctaagatttgaccgtggagcagctgttcatgtccggagccgtttatgtgtatattggattgcggctaatatgtagtagaatgtaatgtgtccatctttagaagtgtgtaaagtatagtaggaaagaaaataggtgcgttgtggtgtgcgcctctcctccccgaggtgaatgtgtggtctagcacttgtgtgctaccctaaattgtaatcttggaagttggtgtatagctgattgcgtgctaatacgtagttgtaaatgaaatcgcatgtgctcgtgtttacatgaaaaactaaatatagcagcaccaaaaataaaaccggttatttggttagaatcatat

SEQ ID NO: 32652 - DNA, 1398 bp, Zea Mays
gttggagttgaatatgttgtttttttgggggtatttagatctttaagaagatctcaatataacaatattgaaagaaatacaccaatttagcacttggatacctcgtgttgggcctcaccactctgctactccttctgggctcgtgctcgtcatcaccagttcaggacacgacgttgaagcagacgacgctgggttgctaacattcagaccgttcgatcttcgatctagcactagatcaccaactggaaaaaataacacgcacgcaagaggagaaaacaatccgcaaatcggcgctcggcttccgtcctttccgtgcctccgccgatccgccgcaaccgcgtcgtccgtccccccgttcggtcgccgccctctttcccgcctcccttctcggcctccgtcctcctccgcgtccgcggcctcctcctcgtgcttcatgtctgcgctcttcaacttccactcgtttgtgacggtggtgctgctgctgatctgcacttgcacgtacctcaagatgcacttcccctccctcctcatccgccggacagggttccgtggtttcttttggaaggctgctaggataggtgaacgccttagcccctgggtagccattgggtgctctgtgatgggcatatcaattttattttggtgaaattggaagatttgtatggccttctttgcttacgattactccattgtaagatagcccgttacttgcttctttcataagcatgtaagaaactgcacagtccttaattgtccttttatcacatttcagaagagaagcatcagaattttgcagttacagtctgattcttcgagatgtcgcatgcttgtaatcttgtagctgtggtgtattattgtgctatgttatgcattttgactattgggcaccatcatgttatgttgttttattgtattgtcagcatgctaacaaatgtggcttggatattcaggtaacccgttattttattttattgtttgatgtataagaagcattgtagcaagcttttgatttatctactgtgtgtttggtcggcctgaagcttttgaaaatatgtttggaatggcaaagtaggcaaagtagcgttcacacattgacgagaaactttatcctttgacctgggtgtggattttattggagttgttaaaggtggatttgttcatatgttttggccttcacgaagaatctcgaggccagcctggtgatttatttgttcttatgtttttaatagtcaattatccggtttttatatatcatataaataggtatttgagattattatttaaatataattattgtttatttctaaacactgtacgtgtggtctgttggttaactctaaatttctgaagcaagggttgtaggtttgagtactcactttgcagtatttttatatataa

SEQ ID NO: 32653 - DNA, 1663 bp, Zea Mays
gagcgccgcagcccgcagcccgcagccaaacgccgccaggccggggaaggggaacggtggaagagaagtggagcaccagcgaaccgcatatgctcggggttcttcgtcgcgcagccctcgccgcagcgtcatcgccggcggcggacctccgacagtttcagtgtgcttaccatagaagcagtgagagattatcacctatccgagaccaagaagtttcatatggtcttaattgggctattgctggaaaaggtgtcattgtgaaagataaggtcctccataacttggaaacatctgagcttcagaaaggtggcgctacttaccctgactttttgtctggtataccacttcatgttagaggagatgttattggtggtgtccctggtgtttctaaagctcaatttgcaaagcttctaaaactggtgacgttccatctttcatccatctcgtgtctatatgttcaagatggcgccattggttcctcagcagaatgtgatgcaaaggttcgggtcattagtgataatccctctgctgttatgttactgtcgaatgtcctttggaaaataccagatcgtgcgatttcccatgacacatcccctttgactatatatgctaccagttcaataagtaacaacgttaagactgttcttggttctggaacacaatatgctaatggatttgctgtggcggatattgaacgatcatctctaatcctatgcggtaaagcatttgctgattcagctatcgtgaaagatgcacttactgctatgacagccccaatattgtctgcaagaggaggcctccctgttccaggatggattctgaactttggtggttctactgtattattgtttgccccagtggaaatcatgatgtcctgcgtagaaatccacaatgctctattgtccattgactgtggtgcagtcatatcttccaaggggtctactgtgcttttcccaacaaaggcaagcagggagcagaaactgcttaccaaaccaactgcagtaattatcgtatcatctgatagctctggcgccataccatctgtatgtaagctctctcctggccaggctgcctaccatttcttggctggatatcacgatggaaaatttgtcccagcatacaacagagccccctctcctgctgacccacttgcacttgcaagttctttattctcacatttgaaagaagatgatacaccatcgtatctgatcaacgctaagcactctggaaagtacattgacggcaatgggtttatgaaattattaaagctggcactatctcacgatcttcctgacatcaaaactgaaggctctagagttggggaactcaaggggaagtacaggagctttctatccagcaagtttggccaatgtttacccgaggaattctctttttaggagatacaccctgaggttgcaatgaacatgtatatttactggcataggtttacattttggtttgaaaaggtgtcagtattcccattctgtctcagtttcaatgtaatactctattaccttacattgcatctttccgcctcctggtgtttggatatactgacgtaacgacaatgtagctagtacctacatgcatgaattgtcttgtgcactccgcttcagtcaaattttgttaagcagcagaaaattggaaactctcagtatacatg

SEQ ID NO: 32654 - DNA, 2716 bp, Zea Mays
caggagcgcccagtccgagtaattggtcttggtgagtgtgggatatccactccctgcactcacctcacgaattactcgctggaccactgctccatctttggaggtgtcgtcgccgggcttcctgaatgtcgcactgctatcaacagttttcgacatcttgctcctcctcagctccgataccaattgttggaaactgcgccggagagacaaccctgcaggttgccggcgagttcctacctcccaggttatcaccaaacgggacagactgctgactctgaagcttggtgtttctgaacataacttgccaaatcctaataattttggtgagctaactgttcaggctgaagaaagttcaggttcaaaagcaataatggagatgatattccgctgttcggatcttgaaatcaaggatcttctaacaaagagtgatacttttttgctaatatctggaatatcagatagtggaatgcctgttccaatttgcaagacagaagtaagaaagaatgatctcaatcctaggtggaggccagtgagtctgaatctgcaacagattggaagtaaggagaaccctctaattgtagagtgctttaacttcagtagcaatggcaaacatgacctagtcggataccctttgtaattcgacagcaagatagtcaagtcagttgcagaattggaaaatatgtaccataggaagaatggtgaaaatttctttgttcctgccagcaatgcacatgaatgtcacagtaaggaggtgttgaagagccagctatatgtagagaaatatgttgagagtaacagacatactttcctagattatatttctgttgggtgccagttgaattttatggtaggcgtagatttcacagcttcaaatggaaatccacggcttccagattctttgcattatattgacccctcaggtcggccaaatgtatatcagaaggcaatactggaaattggtgatgttctacaatattatgacccaccgaagcgtttccccgcttggggctttggagcaagacctattgacggtcctgtttctcattgttttaatttgaatggcagcacttatcaacctgaggttgacggaatacaaggaattatgtcagcttatatcagcgctcttcgtaatgtatcattagctggtcctaccctctttggtcagttgataagcaccgccatggcgatagctagccaatctcttgctgagaatcaacataaatacttcattttgttaatagtcactgatggcgtggtaactgattttcaagagactattgatgcgatcataaaggcatcagattttcctatatccataattgttgttggagttggaggggctgatttcaaggaaatggagtttctagatccaaacaaaggagagaaactggaaagctcaaccgggagagttgcatcaagggatatgatacagtttgccccgatgaaggatatgcacggcactgggatatccacacttcaatcacttcttgctgaggtaccagggcaattcatgacatacatgaggacaagagaaacccaaacagacagttagtacatgcatgctgccttcaatcagtacaagatgcaccttggaatattctttgttaatatcattttcgtccttcccgttacatagtggtgcaagtttcaagtcatgggtgtgagatagatagtatggacgtgtcaagtgtaggtgagacatcgatctcctggagacgccaacatcaaattggttagctgagcttgtttaaaatcgtcgccgttaaaaaaaaatgctgcttgttaagagaaatgaggacctccaccagcccaccttaattccatggcatctttttttttattattattctgtgtcaagttggattcctaggctgtaccgcccatctttctctacctgtttgtaagatatgactttaggggtttcggcctttattatccctagtaggcccattggaataggaacttttttggcattgcacattagaattttcaagtgttggcatggctgtttagttctatggtggtgactcgtgacctgtataatataatttagacaatggaatatacagcatttgtggtacagccatgtgacaatgtcagattaagatttgaggcatctggttgcaatacgtttatgtatcgttttctcttttaactatgtatagcaccgatggaacctggagtctgaactagaaattggcagtggctgttctcggacagtttccggaagagaaacccctagctactatgcaagacggtaggactacaaaggaacaactagacccccggcccaaattgcatcctggggaatgccgagggcggagggagatcgatcgatgctccggttccacgactatgtgcgtggtccttgtagaaaagaaaagaaaaagtatgcgtaatctgggtgaaagcaccagcagagtagttaatttggttcagacgttcagtggacaatcgaatcgagcaagcagtggaaggaatccatttcgatacgctgtggaggcaaaggcgccactccaacgatcccagcgatatctacgagaggaacttttcagaagatcttacgtggacaaacatgccaataagccaatcaggcttcggttacggtctcactcaggacatttccctgtgtccacccaacatccctagttagggcttgttcggttattcctgtcgcatatggattggatgagattggaaaaaaatatgaaggatt

SEQ ID NO: 32655 - DNA, 2777 bp, Zea Mays
gcgggtgtgctctctgggctgcaaaattccggactgggctacggcccgtccgccgcacggccctttctgtccacggttcaccacttcaccgccccgcaacccgcagcgttctgtctccgacgactccgccgcccccgtcgtacgccaggtgcggaggcctttgctggtctcttcgccggcgacgaacacccaccagcagctgctgtagatgtgcacattcatctccctttactgggtccgcccctggagcatatcatttgactgccgtggccacaactgcgctagttttgctttgatcatccggccttaataatccagcagatatctggtatatagattaacatattcagtacctgagatcttccttcaactagcaaagggaattgggattccactccccagtcctcatcaacagagcgaagtagtgcaatattattcaggaaagatggttgccagctgccctagtttgaccggagagatcaaatatgaagtggctagcagttatttggttggtatggtgattagtgtatatgccaagcttttacagataggcaagaattgacagtagcaaattcttgactagctccgccacctacaggaaaatctagaagaataaaagaaagtcagagatggcgatgtttcttggttgctgtcattagctgccgcttgacacctcggcgacgaaaaaggagccgtccactcactgagccttttgtccccctggacatgcaggtgagtggcatgtaaccaacctgaatgacaggaggatcattgtggtggcaacgccaggaggcagttggatattcaagatcatgacatgaaagactttgggaaggggagagggcaatctccatggatcaaggtgtctgcacatgatccaagcgcacaactgctcaaagcacacaagagatcgtgttgtgtgttgtgtttttgggccgtaccaggaccagagcgggcccctatagctatagctatagcagcaatgagctgggtcgtactctctccacgacaacactgaaccgtccgtgtgcgttcctgttgccgtactgaaatccacagagaggatagctgggctctgatccgggatttatgtcaggcccattggggaggtcatgtgactcagcaggtcagtgcgtttccgctcaccagctaccattgcgagatcagtaggatgtgtcactctctctctgctgctcttttggattcttggcgaggtttcagattctctccagtacccacttgcattgcagctctgatggtcgccaggtaccaagagcacgcctctgcgtaatccactgtgctaataggcacctttgaattgatgcatgcatgatctatctgctgccagtttgctccatcggcaccagcagcaacagctcgtcacgtcacacatgactaggcatatgtattgcaacagccttgttcagttcaccgcagtgagatgtactgatcccccctcacagctgaaatcctgcacacagcaaggtccccaccccactcatcataaactcatgcggtgaaatgcaatgcgatcctccggccaccgccgccaaagctctgtggctccccaggtggccctcctctgacatctcccaggatcaagctcagggacggaaggtaccttgcgtacaaagaggatggagtacagagagacaaggccaggtacaagatcatcacagtgcacgcatttgatagcaccaaggacttcccctcgcctgtttctaaggagctcgtggaaggactgggaatttacctccttgcttatgacagagctggatatggggaaagtgaccccaatcccaaccggcatgtcaagagcgaggcgctagatatcgaggagcttgccgaccagctgggccttggccacaagttctatgtgctaggggcctcaatgggaggatactcggtttggggatgcctccagtatatacctcacaggcttgcaggagctgcgctggttgtgccaattatcaactactggtggccttcgttcccagctgaattatccaagcaggccttcaacagactgattgtgccagagcagagaactctttggattgcacacaacataccttccttgctttacctgtggatgacccagaggtggttcccttcttctgcagcagccatgcaccaccctgaaatatttagcaagcatgacatggaggttcttcagaagatgatggcaatgccaagaaccattgagaacaaatcaaggcagcaaggcatttatgaatcgatccaccgtgatttacttgtcgcttttggaacttgggagttcgatccaatgaatgtcaccaatccatttcctcaaaatgagggctctgtgcacatctggcaaggacgcgaagataggttggtgcttgttgagctgcagaggtacattgccaagaagcttccgtggatcaagtatcatgaagtcccagaaggtggacacatgttcgtgatggtagatggatggacagaccgaattctcaaggcactcttgttaggagaagagcccctagatgtgtgacagtagttccattttcaaaatgtcaaaaactgcagctgccagctgttattttacttaattttattcccaatttgtacacttgtattcctacaacaccaagactagtctaattcataatccgatagactttccatcatgtcaactcattacaacagcagtgataccattgtactcatcccatacgcatatgcctttggtccaaaattgatgtcaacccagaaagcacgtagtcaaaacattcaaattggagagaggggtgttt

SEQ ID NO: 32656 - DNA, 1155 bp, Zea Mays
gggtgacaaatagcgctgccctataaacacacaagctgcaacactgtttattctgaaatgtctagcattcaagctgcaacatcctatcacttgatgacagaatctaagtgtactgaacttcatgtagtcttgttggatatattttcttgctcctggtgctaacccagcattattttgcatgttcatgtggatcatgtaacttggcacatgaaggcttttttaacttggttgcgactgcagccttgttcctggcagcaaaggcagaagaaacagcatgccttttgaatactgttcttagggcttcatgtgaggtttctcaaaatcaggaattcaatcttcttccttacatgctatgtggtcaggactggtttgaacagtacagagagagtgtaatacaagcggagcaaatgatacttacaacacttgattttgaactcgaagtagcccacccatatgcttccctatcctctgctttgggcaaactaggactcacacatactgttctgtttaatgtggcttggaatctgatcaatgaagggctacgaagttcactttggcttcagttcaagccccatcatattgctgctggagctgcattccttgctgcaaagttcctccactatgacatcacattccatccaaatttctggcatgaattcaagacaagtccatatattgttcaagatgttgtccagcagttgaaggagctactttaggatacaacattcaatgtatttacataatactcagagatcctcttggtttatacgctgtagtgagtagtgatcactgccaaaagtacgtacacattagcatgtggtcactttcatcaattactgaacatctttcatgtaggtttttacaaccacagtgctatgtacaaaaggggaagatgttattcaaaagttgcccttttagttttggggaggtaaaagcaaacaatctttagaagagatgtgacgaacaacaagagataaaaaaggcaaaaaggtgtaagagatgtaaaaagttgatgaaatgttggatcccttaattggttgtccggttgtgattatctgatatatatagaggatggtttatcccaacaataaacgagtcgaaatcgtaaccttcacattatctttagtccaaaattgatttaaaaaccgatctaga

SEQ ID NO: 32657 - DNA, 2517 bp, Zea Mays
caagaatgtccacaagccacagccttgtcttgtcttctgtatctacatcctctcgcaattccccatcgtcttctacccttctgtcctccgatccccaccctccggttaactcctcaccaagaaaaaggaaccggccgtcctcgttcctgtcgtcgctgttctttcctcgccattaccggcgtataaaaccagccctcggcctgatcgcacagcatccggccaagcgggagtagtccctgtcgtctgtccaccaccctctgcgagtacgtctcctcctcccgtctgtctctctctgtgtgtcggtctgccgttcccgccgccgccgccgcagatgggcctgttcagctcgccggccaaggtgtacaagccggccgccgacgtggacctcggcccaggcagcgacgagctctacatcagccccaatgtcaaagctcctcgggtcgccgggctcctggtgaagatcttcgtgtggatcctggagatgcccatcgtcgggcagatcgtgctctacatcctgaagaaggacaacctcatcaacaagctggtgtccgacgccgacatcccggagccgccgctgttcacggcatcgcacagctgggaagacaccccggagcagagcgtgcggctgaccaagcccgacctgtcggcggcggagcgggtccaggaggccgtgggctgcctcccggcgcggctggaggccgcgctggccgccgacgcgcgcggcatcaggcgctggaccgtccgcgacttctccgacgcgtacaggtccggcgaggtgacgcctgtccaggtggcggcgaggttcctcgcggcggtgagggagagctcgggccctggcgtgagcaatatggccttcttcatcagctgcgaccccgacgacgtcatgaggcaggccgaggaatccaccctcaggtaccagagaggggcgccgctgtccgcgctggacggcgtgctggtgggcgtgaaggacgagatcgactgcctgccgtacccgaccacgggcgggacgcggtggctgggcgcggcgcggcgctgcgaggccgacgccgcgtgcgtcgcgcagctgcgcgcctgcggggccgtcctcgccggcaaggccaacatgcacgagctcggcgccggcaccagcggcatcaacccgcaccatgggtcgacgaggaacccgtacaacgccagcacgatcgccgggggctcctccagcggctccgccgccatcgtgtgcgccggcctctgccccgtcgcgctcggcgtcgacggaggcggctccgtccggatgccggcggcgctgtgcggcgtcgtcgggttcaagcccaccgccgggcgcctctccaacgccggcgtcctcccgctcaactggacggtcgggatgccggggatcctggcggggacggtcgaggacgcgctcatcgcgtcagtcattctcattgatcgccacctactcggcgatcgtcgaccagtcccagccgtcctacttgcggccggaactgaatcttcctcagctcggctccacactctccatcggcaacatcaagctcgccagatacggaaagtggttcaatgacagcgccgaggacatcaggagctgctgcgacaaggcgctgcaggcgctgcgcgcgaactacggctggcagaccgtggacgtgaccatcccggaggtggaggagatgcggctggcgcactacgtcaccatcggctccgagtgcacgacgtcgctcgccaagtacctcgacaagctcaagaggtccgagatcggctgggacgcgagggtggcgctcagcgtctacggctccttcagcagcagggcgtacctgaacgcgcagcggctccggaaccgccagatgtacttccacaagcagatcttcaaggccgcggacgtcatcgtctcgccgatgaccggtgtgactgcgtacccgctgcaagacgacgcgctcagcaccggggagctcgactacataaacggagccgcgctggtccggtactccatagccggcaacttcctcggcctgccggccatcaccgtcacggtcggctacgacaggggcggcctccccatcggcctccagttcatcggcaggccgtgggccgaggccaccctcctccacgtggccttcgccacgcagcaggcgtgcgccaaggggtacaagaagccgccggtgttctacgacctcctcggcaagcaacaggactgaggtcagcgacgcgccgccgccgccggcggcgagcgagcgaggatccaccgtatatgtatccgtgggggtcgatcggaggagaagagacgtatagcagcaggacaattgttgtcatgtataccttcattctcgaatcattatcgagtatttgtcgttgactactagttcattcttgaactaaaacacggtaaataaaaaataattgaggtcgttcataatctgagaagagagaaagaaatttcactcactagcggtacatcatcagactcggcggcacaaaatcctgtccggatacatattgttgtaacaattacgcagtaaagcttct

SEQ ID NO: 32658 - DNA, 1104 bp, Zea Mays
cgcaaccgtgcggccagtctggcagtcccgctgtcctccaaacgtcgcctatcttcccgcgcccgctcgtgtatccgtctctaagccaactccagcaacaccgtcaccgtgtgtgtttagactgatacattgtttgtagagagaattttgaaatagaaagtttgataaagagtgaaatagagagtcgctggagataatagtcgcccgcaacccatttgaaaatcacgccgtgttggcgtgtaatcggcgattcggcggccgccgggcggtggcgatggaggtgggtgacctgcacaaggtgtgggaggtccgtgcgctcaagatcaagcccgacgcgaccgccgcgcgggcaaccctcgaccgcgttgccaggccgcggaacccgaggctgctggggctcaatgtcggcgcgggcgtcgaagtcaagctgcggctacggcgcgccggccgcgaccatgacttcatcccgtacgaggaggtgctcgataccatgctacacgagctctgccacaacgagcgcgggccccacgatgcgcagttttacaagctctgggacgagctccgcaaggaatgcgaagaacttgtttcaaagggtatcactggaacaggacaagggtttgatggcacgggaaggcgagttggtggatttactgtacatccaccaccaccatctctgcggcaagctacgttagctgctgcacagaagcgggcaaggaatggagctctattgccttctggaccaagaaagttgggtggaaacagtgaaattatgagtgcacttagtccagtacaagctgctgcaatggcggctgaaagaagaatgtatgatgatttgtggtgtggatcacatgatcaatctgctattgatgattcggatgatgttattattcttcaagagtcgccaaatttgacaagggatgaaaaagacaagggtagctgctccaacacttctgcacagcccagcacttcttctagaattcacatagcagcacgagatgataggacaacaagtgatgcacttgatagttcaaagtgggaatgtggtgcttgcacacttctgaaccaggttagctccagatcttgaatgaagccagaaagggggaa

SEQ ID NO: 32659 - DNA, 1062 bp, Zea Mays
ctgattgtgtttccacaatactactcgcttctcgagtggattgaatcaatcaattacttttatcgtacaagtacacactagagactatggtgttgtcacttttagtagcagggtgctaaagagagattgtattcctgagttcattcatttccgtctctgtaactggctatctgcttcaagtgaactcttgacattcttttcctgcatagacagccttccagtcttcatctttctaattatgcattagttcaatgacatgtttagcatgaacgaaacactatttggatgtgcttggaaaataaattttactttattattacgagtctgcacaatggggtctaggatgcagtctatggtaattggctaattgccttctgcacctaactgctagttagtggtctggaacttgtttagcatacagtaggtaacttttcagttcaattccacacacacaaacaaatatattatgttggtccgagtgaccaacagagttacagaaaagcaattccatattggtgggttatgtctcattattatatctagttaacaggtaacccaccgcttttcctaaattatagtttggttgtgaaggctgttgaatacctcaggagtcttctgtcatatacttacaaataggactccatgtagtttcagtagtgcttcttgtagccattatatgtaaatttgcaacctggtttttattaaaccactccttaagttttaggggtgctgatcaccagtgggatggtaatctttttgcaactgttggtgctcaagttgatatatgggatcctgacaggtatttatgattcatttctagcaattccaattttgtttctatgtgttaccagcatccacactcattttatctgcacaggtcggagccagtaaatagcttcgagtggggtaaacatacggttctctctgttctatttgatcctggggattgtaatattttgattaaatcagtgatcggagtctaacactctatgacgacctgcccatgtcatcaccagctagaaagctaataatgaagacaagctaaggtgcaattcagtatgc

SEQ ID NO: 32660 - DNA, 2237 bp, Zea Mays
cccagcccactcatgcaagcatcctggaaacacgcacgcaccagccgcacaggaaacgaaggcgacggcccgcggcgtgcttcctcggagttttgggggattttgcaatgccaagacaaggcagtggggatttgagcagggatggatgtcgacgaagttcctgaaaggatctatccgaagaatgcttgtagagttgaggtcaatgtcaatgcatacttcagctttaaagatggaaaaaagaaaggtgtacgatcgagatagtcagcttattgacttactaagggcatctcaactagtgaagttcctaatgatagtgagcaggtgtgaggggaatgagatgcctgttgcagtgaacatgatgtcgaggacatacctagtgcaacgaatgttgttgaggatatgcaaattggggaatttaaatgggcagaagtagcagaatatggagaaacaactgcaggtccactgatggttgaagaggacgaaaaggaacacttcatgactgttggatgtgattgaaagaaaaatatgcccttaggtcatttccatattgttttgatgattggaagcacaacacacttggtgagaactaacaaatgttaagcaaagtgacaggaactcaattaagacaagtccaaaaagagcaaaaggagttcagctgaaacgagtactgcaccagctgcgggtgcaccggacaatgtacggtgcccaggctggctcagcaacaaactcgctgctctcgggaatcgccgaggacgctgatgctaaaattcaccggagtgtccggtgggcaccggactgtccggtgagccaacaacgtccaagccaacggtcggcagcgcgatcggcgcgcaattaacggggatgcatggccagaggcaacggtcactaggccgcaccagactgtccagtgtgcaccggacagtgtccggtgtgccaaggggaccgagggttcaacggtcggcttcgccaaagaaggaaacaaatcgtgcactgttcatgtccgttggatgtgatcctcatggagatgagccaactggaatagatgaagagtggatgtactacaaaaatttagattctgtgtttcatgatgcaaatccaatagaggtgcagaaaaaaaaagacatagacttcgatactgaatgtgttcctgaagatgagtttactatgatagatgattgtgttgtgcctcacacaacacatcatagtgagaatctaatcattaaggaaggctaaacatgaagagccgagggctgcactatgatatcaagaaaagtggtcccatgtcagctgaaatatcaggtacaataaaggaagggaagacttggaggtatggggttgaccttgccaaaagagaatgtggttctggataatgggagttgtcagggaaaccatggactcatgctatatacttatttgggacagtgaaacagcgcatgagacaactaaacattgaggattttgtgcatgactactattcagtagagaggttcaagatggtgtatcagtttcagattaatctaatgagtgacaagtctggatggccaaaggttgatgttgggattgaaatgattcctctaccactgcagagggctgctggtatacctaggaagcaaaggatcaaggctagtggagagccaggaaaacgaggaccacatcaatgcaaaaggtgctttcaatttggacacgttgagaagggttgtaatgcaactcaagctgaattagcttccaccacatcgtccaaaaaaggaaaaaacccaaggaaaagcaatcatgaagatgaagctgttgaagcctctagatatgatgctcaggcatccacgtcagttgttgaaccatctccaatgcctcattcaagtgcagggataactactagaaggatggcgtctctatctccaactagcccaggtgtaacaactagaaaaatggctactatttcacctggtggtttctgtcagaggctcatcattgagtagatgaattagcaaacttagtattccacttttgattttttttaatgaaaggtaacgtgtgcaactatggtgcttcagaatgcattttataggttgatatttgtacatgtcttgcttaagggaaatagggttggagtggaggcgttatgctctactgtaaaagagaatgtggttgtggataataggagttgtcagggaaaccatgtactcatgctatatacttatttgggacagtgaaacagcgcattagacaactaaacattgagg

SEQ ID NO: 32661 - DNA, 3275 bp, Zea Mays
ctccttccgacctcgccgcctccctccctaaactctaaaccctccaccagccgaagctactgccgcggccgcagcagaggtcgcgacgacgaacgctgaagaagcgccggcgagggagagtcctttactttttcctatgctgtagcaaaacaagcctataccatcttccaaatatactcgttccgtgccggcggcctcccctcctacgcccctgtcgattcttcaatcttcaccaacgtctgcgcgtagcaggctagcagtcggcacggcttcctcagatctgccggacgacttgttgttcgtcaccgactcaccagcaaccaatgtcggccatcagccggcagcaggggaagctgggcggagggtcattgcggcacggcgtccaggcgtacagcaggcaccagcaacagcccatggcaaacgccgcagatgaccctatggtagatgaagccggagtagaagatgccttcacacatgagatcaccgattatttgtacgtccctagataccatgtgttgagttggatggaaactgtggaggggatggtggccggtgtggcggcgcttccgccggtgtatttgatactgaacagagatcttcttgagacgggatggggatggaagaggctggtgccctacagacctggttatgttgagtggcatgtgttcaagaaataccttggggactatttcgaccataatcgtgaagcttttctttgtgccgagcagaagcctgatccatttggatggattattgctgaaaagagtgccctgattgctgcagccaaattgtgcctcaagatggagaaggcacttctcaggtactgtgctagctttctcactcctgacgacaaaaggctgatcctcgggatcaaggaccaggcaaagcaaatgatccaatcagaggtagtgcagagaaacctgtgaagcagcgtacgtgatgagtaggagatatgttttcataagctaagctgccatctcctttcactagacttattaattggtctgtcgtctatacacgtaaggaccatatatttaccggccggagaaactcccgctggtttttggaggcagctgcacacgggcacaaaggggtcgttgtattcaattagggttctctcacagtagctgagacgtacgtgtacgttggccaaatatcttttatacgagtcatctatcattgatttagattatctatcattgttccaaaaattcagttactaagaggcagactaagaaaaggtaaagatatttgtactttcttttataggagcagatgaaggcataatatccccacttagacaaatttatctccatattgcaatttaaatggtagcagtagatcattaatccagtatcagtcaaaatattcgggaaggattgcttgaagtattctatggagtttatgaaaaggatcctgacaaagttagttctcagggcataatatcctgcagatgatagtttataccctgtgatgttctgggaagtgttgaatcttgtattcctgcaggtgcttcaagcaatggttcaaatgggtgtccttgttcctactggagatatgactgttgtcagaagaaccgctcaatttttccttaatagctttcaagagtgcctaacagcacaaaggaaggagagagaaatggcaaccgcagaactgggtttcaaaaagcaattaactaaggaggagaagtttgaaaagaggaagcagagacttgctacaatcggagaggatcttttggcgattgctgctgatcaaccatttcgcttccctgccacatttacatttgtggtcagagcattctcaggtgtgtggagagacatgtgtattcctcctatgacgaattcctcaggctccatgaaggtaagcctgtcttaatgggcttgattgttgaacctgacttagtacttttatccatgtcacgacattgaaccagacagtcactcatgtccttaggatattaacggtatacatcaacaattcattctattttaattgcttgcaaaacttttttggcccttcaaatgagttccacgcatcaagaagtcaagattccaggaggcctaaaataggagaggagggcgcagcttgattcaatccatgtcaagtcaaaggctgctgcgaagtttgcacatgcaagtagaatttagatggtgaggttttgtctctgttcccatttttataacgactaggtgtttgaattcctaagattaaagtttatgtagattcttatttgtaattagatctctgttaggcatctaactgaataaatgatctcctaaagaattgacagattccatcactgagcagcccttcgccccggtggctgcggtgtcgcactggctgacacctgctcgcagttgcattacaagttttactgactatgtattttcaggtttattcaatttcggttctaatgcttctgacagcagttgtatcagtcctcttgttcagcttacatgtatccctcgcatccttccttggatccacataagtgttaataataattttgttgcatctcctctgctgatcagagctttcaaactcatgacagaataatgtactaaacttcagtttggtgtctatctcagtgtacctacactcagttggaaaacttcaaccacactgcaacaaggtttataaaaggaaaaacaaatttatgggctcaaacaaagtgtgatagtgaaagtcattttgcttccagcttaagaaccaagccaagaaaacagatatcaactgtgacgccacactcaaaagcttgtttggtgggagggacaaggttgggatgctggagatctccaagcttttgagtcgtggcttcccgaaaatctccaagcttttgtggtccatggagccagggatggctctttggtaaaagacttcgttgtggatggcctcttttatggtccatgttaagtcccaagtcccactaggtggttaagcagaaaaatcttgtgatggcattaagactttcagactttgtttttgggtctgatgcatgtaaaaaggattcccagtgtttctgttgctcttgcgatcctgtgaggacacatatgagagaaatatttagtttgttgatggcaaatcttgtcttatgttcatgtctgtgcctatctgatcaagcgttatgatatgatcccatgcgtggtactgtgttctttagagatgtacttaattatgtttctcttgcatttcatattgctttgtctaattgttaccgcaaattaagattttattataattccaatttgatatgcctcatcataaccatggttact

SEQ ID NO: 32662 - DNA, 337 bp, Zea Mays
ctcaaagcattgccaggacaccactctccatatctataccctaatgctcatgcacacacagctggccggaggacgcgcgcccgcgccgccagggaccgggagagagggcggagccgcgccgctatgtaagggcggactgacgggtggagcaggagggccgcgtgcccacgccaaagcggaagggagaggagggtcgccgccgccgataggaaagctgctgccgccgccgccgccaccaccaaaggcgtcatgcatttgtaaggcttggccccagcatggaccttgaaatgctcagcccggtcccatgaccacttgaaagccatattacaaccatccc

SEQ ID NO: 32663 - DNA, 851 bp, Zea Mays
tgacatcgatttaaatgctcaaggtcgggaagatgatgaaccaattgaagttgaagctgaaattactgcaaataattcggtatgccgtcacaaaagccttttgcattgcctttgtcatgaccttcttctctgtattcgacgttcctgtcttttggccaatacttctctgttattggattgtgctttttgtcctgacaatgaagcgacaaattgtgcatatgatcaagtacaagtatgtcccattcagcataggaaagcagaggtatggcggaaagaaaggccctgccgccagtgcatctaaggagtaaagacggagggagggtgtgggacctcgagagcagtgcatgtgctatctttgaggcatcctgctggcatggtggtattttgagtaccagggctactgatagtgaacgcacaccatattcgctagtggagagtggagattgcagagaagctgaccagacttttgcattggttgatgatttctgttttacgtgtcggtagtttatgtacaatggcatggagcatagctagtagatcaaatttccggatcctctgttgtactgtccctttgtggacaagttgtggacctgttggatccttgcaaacgcattgtgatccaggacctagaggacaaaatcaaactgtccagcgattgttacttggaccttccaacattgactgcatactagtaccagcgattcgtagctgctactgcctttctcatggttaccggcgaacgtttcagccattgtttatttgcatctagcaggcagttgtaagggagttattcgctattatattactcgtttgaagtggcttcttcgtaatagtattaacaactaaggcta

SEQ ID NO: 32664 - DNA, 1309 bp, Zea Mays
gagacttctaggctgcttccatatgcgtgcgagtgccagccgttatggagcaaaaaagctctgccagccttaccgtccctacggcacgacgcctctaacgtcggcgaccgcgacgacgatgaccccgcgtatcccctcctcgtgtgctccgttcgcaatcgctgcctccatctcctacaggttccatgttgacgctgtgtgccccggcctgtcccaagcttcaataggtccatacatgcatgcgcagagtttgccggccggacttgggatggaagaattatcatttgtgttttttatacagaaatgtagcttgtaaactattagtaaagttatatacaagttttattctgaaccaggacagagcactctgtaacaaattcggtgcatttccgttcctttcgctgatcaaatgcctttgttccctatggttcttgtagagcggttgtgtcgtccgagcattgatctgaaccagcacagtttatcagggacgtagcagtgagttggttatagagaactcagatttgatggctaaacataaaagcgacttagaaggattcaagttatatgtatactaaagtggtgaggactcgcaagaagttcaatccactgccagaaggttagatttgagtctcaattattttcaagggaagagatcatgctgataattcactccatgggtacgaggttttcaaaaatccgagcattagtgatgtcctgtgcacaacaacagcagaggctcttgcaatggggaaattcgtgatttgcgcagaacatccatcaaatgagttttttcatgtcatttccgaactgtttgacatacaagacttcagaggagtttgttgcgagagtgaaagaggcaatggatagagaaccctaaccgctaacccctgagcaaagatacaacctttcgtggaggcagcgactgagagattcatggagtactcagaccttgacaaggttctgaacaatgaggctgctcagcctaaacaaggctggcaaccgaagccattcctggtacccgggactactataagcagcactgtgtggatattagtctcttgcctccttaagtagcaccctgtatatggctggtgatatggctggtgatgactaatcgtaggtatatatgtacataatacaccatgtcgctcttatgtcgactaatgtttggagtattgtaattgtagcacgcatgacgacctttggccattgttttgtactctgtaataaggttctttctccttaaatttggagttttattgcagaaatttgtagtacatggatatcaaaagttcataactccagaaga

SEQ ID NO: 32665 - DNA, 1325 bp, Zea Mays
actcagaaaactgatataaacataagtttaacatcagttggacttttgtggactgctactgattttattgtgaagggattagtcagcaagcctattgagcaagctagtcacatgaatgatgatgttcaatcatgtgaaatgactgaagaggcaaacagcaagcaagttcctccaaaactagttgattatagtatacttttcttttcagttttctctgtcctccagaaattgggttcagatgatcgtcctgagctgttaggactctcttccagactctcagcatccatggccaaaagctttctaaaagtatgtgggaggattgtctttggttatatgttttccctatgttagagcatgtttcccacttggcatctacctcatctcgagatgagtggcaagggaaggaacttggaactcgggctggcaaagctgttcatatgcttatccatcacagtcgaaatacagcacaaaagcaatgggatgaaaccattgttcttgtacttggtggtattgcacggcttttgcgttcttttttctcttacctccaacaactgagaaaattttcttctggttgggtgcttttactcagttttataaaaaatagcatcttaaacggtagcaaggaggttgctattgctgccatcaattgcttgcagacgtttgtcggcgcaaactgtccaaagggcaatttggaatcctcgtatgttaaatctgttcttgatatttatgaacttgttcttcaaacttcatctaattttaagaatgactccactgataaagtgaagcaagaggttctccgtggtcttggtgatctttatgtccaagcacaatctctgtttactggtgacatgtatctaaggcttatggcaattatgcatctgatgatcaagactaccttgaatcctactgattatgatagtgaactgggtagtattcctgctgtacaacgaggtatattggaaatcattcctatgctacgcccaacagttgtattgtctcccatgtggacacatctgcttcttgagctgctatgctatcttaatgggcacgaaggccccctccagaaaaataatgaacaaacgcccgatcataattctcaagcactggtagacggtgcaaagcatgctcttgttgaaagaagcaatctcaatggcgggggtacaaaactggatatggtgggatctggttggggcattctatttgtagaaaaacttgtaccaatcattgccaaccttttcttggaggctccaccaaatgaaaggtttagtgtctctcctgaagtcattcaaggtcttggaaggtatttgctttttatgatttatatc

SEQ ID NO: 32666 - DNA, 2172 bp, Zea Mays
aaccctaacttcagcccctgccgcgcgcccgcgatccaccccgtttcgactgctcgcctgctgcgtgctgcctgctgtctacggcctcatacgactgccctgcgcccctcgtggcttctgcggttctgcacacgcgcacttgtccccaaacagcggcgtcggcgtcggcggcgatgagtatctcaggcgagcttcccggcgaaggatctgacggcgaggaggaggtcttcatcgacgaggaggacatcatccacgagataaccatcgacgaagaagatctccccgaccgcgacgaagaagatgacgacgtcggcgacgggattgttgattcagaagacatcattgatgattctacgtactcatttcttggccacaaagatgaagtcttctctgttgcatgcagtcctacagatgcatcacttgtggcttctggaggcaaagatgataggggatttctgtggaggatcggatcagatgagggtgccttggagctgactggacacaaggatactgtcggcacagtggctttcagttcagatgggaatttgttggcttgtggaagttttgatgggcaaataaatgtgtggaatacagctgcacgagctctcaagggaacccttgagggttctgggtcaggttttgagtggcttaaatggcatcctcggggacatttgataattgcaggatcagaggattgtaatgtatggatgtggaacgctgaccataatgccattataaatacatttgttggacatagtaacacagtgacatgtggtgattttactccagatggtaaacttatatgtactggatcagatgatgcatctttgaggatatgggacccaagaagtgcacaaagcaggcatgttattcgaggccatggttatcatactgatggattgacatgcttatcaatgactttggattcacaaacggttgttagtggctccaaggacagttctgtgcacgctgtgaatgtaaactcgggccagatcgttggctcactagtaggccacaccacttccattgagtgtgttggtatctcatcaagctatggctgggtagctacagggagcatggatcaaaagctgatcatatgggacctcacacaccagtccagccgatgcacttgtgaacatgatgagggagtgacatcactggcatggttaggttcgtcaaggtatgttgcgtcaggatgcatcgacggcaaggtgcgcatctgggacagcctctctggggattgtgccagggagttcagtgggcatgcagatgtagtacagtcgatggccatcacagctgacggcaacgccatggtctcggtctcatcagatggctccgcccgtgtgtttgacatctccatgttcaagtgaaggaaactgggacggagtagatggttgctgtgtatgctaatgcttgttcgcggtgcatgtgcatgaatgatgatggcatgccatggagagaagtaatctgttctgcacttctgcttatagtgatagaggtcaggcgggaattctgtcacgtcatcacgagggacctgctaaaattcagggttcttgatgtagaagatcctagaggctagctgagagagcctcaacggccggaagaagggtcccagcatcatgtccctcagcttggagggtctcggtctgagagccctggcccctgtgttagatgaccttatgagtacagactacagagctggctcaatttgaagtttctttctgctattgtgatctttgaaaataatgttttgccggtatccgagcatacgacctctttttttcccggacgccttaaaattccggttatgaactagtagacctatggagctgtttgattcagccattttagacctgtaaccattccctgtgacagctgatgccgttccttagagtttggttagcgcactgcgtaatggatagcagcgttatcggatacaagcatgtagaatctcattcccattccctacctatcgtcatccgataccctaaaaacagaaaatgttgcccacaacaaccaaacaaagggcggtaatcattactctgcatcggatgacaccggttgctgatcccactgccgttaccgctcctttcgtccaagcaaacagcacctatattgcatctcagttaagggtagcagcaccggggacgtatgaggggagaataagaaagg

SEQ ID NO: 32667 - DNA, 1095 bp, Zea Mays
ggctggtgttggtaccagaggaggaggcggtgagttcttgaaagatgatggaggggagacagacttggaccaccaacatatgcacgaggtggtgaatggggttccctatgagcttctccatcggctggcgtctcagctcccgtcagtcgcacttggaagcggatttcatttaccctttctcctcaaggtggccctcgatctagagacgccgtctatctccagcaagagcgataccgtcgaggcgcctatccacgccagacacaacgtccgcagtgatgggcgacctctaaggcctgaacggtgccaccataggcttctcggcggccggcggcccggaggaggcgactgaagaggaggacatgcggggctgcgagggatgcgctcgccggtggccgaagttggggctaagctggggctgtgcacagtcgagaagacgaaggcaaggcgagtcactccatcacgctatgcatgtcaccaaggcgcggcctcccaatctcgtgtaaccggcaacctcagctctgaaagaaccctagagtaaacactcacatcaagacactccactgttcactcttgtgctgctcctaccaatggagcaagagcatctccacctggcaatggtccactcgttgtattcatcactaagtcagctcgattccaccaatgggtgttcatgctgttggatggaaaatgacaacccctctttgcatcatgcactgttttgtctttctaaaatatttctgtttgctcctagcggcttgaacccctacaagtgcacctggcattggttaccaatctgcagattcataacatctcatgaaaaggatacgtgttggacaaccagataaggtattacagagaatatgaataatctggaggttctactgatgcatgtaaattatggaattatggtttcaattctagattatttgataatggcacctctatatgctcattgggcaatgatcagaaagttggaggtcatagaaatactgagaatggtgaattttgtttacatttatgggcacttttgaaaagaaattattttgtatggtagtattgttgaaaagatcaataattttagagactttgatgatc

SEQ ID NO: 32668 - DNA, 2858 bp, Zea Mays
ggctcgggcgccaccactagtagcttagcacgcgccatatatctaataagccggcgctgctgtacgtcgcttccgccatctacttgctagcagctatctaataggccggccgggcagcgcgaaacagcagcgggagctcagctcgctcgctcgctcgtctctgccgccccgcccgtcgcggtcgtcgcgcgagaggggtggccatcatccatgggcggcgtccgcggccacagcagcgccgccggcgtctctgaggaggcggcggcggcggcggcttgggtgtgggccgcggcggatctccccgtgcgcgtggactgggcgggcgcggcggcgcaatgcgcgtccctgtgggcgcacgcgcgggcgctgctggtcgtgccggcggtgcggctcctggtggccctgtcgctggcgatgacggtgatggtgctggccgagaagctgttcgtctgcgccgtgtgcgtcgccgtgcgggcgttccggctcggcccgcaccggcggtaccgctgggagcccatcgccgccgccgccgccgccgtggggtaccccgtggtgctggtgcagatccccatgtacaacgagcgggaggtgagtgagtgagccagctgagcatgagcatgggcatgagctggcgacataacgcgtagtagtagtagtagtgggcaagactgacatgagctggtggttgcaagcagagagtgaattaactgagcgagcgagcgagagagagagaattgattactagtgttttgaccgtgcgtgcatgtcgcgttggcgcggtgactgatggaagatgccgtgttgttttctgtgaaccgtgcatgtcgggcgccggcgaatggaatggaaggtgtacaagctgtcgatcggggcggcatgtgcgctggagtggccgccggagcgcttcgtgatccaggtgctggacgactccacggaccccgttgtaaaggacctggtggagacggagtgccagaggtggaagagcaaaggcgtgaacataaagtacgaggtgagggggaaccggaaggggtacaaggccggcgcgctcaaggaaggactgaagcacgactacgtcgcagactgcgaatacatcgccatgttcgacgccgacttccagcctgactctgacttcctcctcaggactatcccgttcctcgtgcacaacccggagatcgccctcgtccaggctcgctggaagtttgttaattctgacgagtgtctgctgacaagattccaagagatgtcgttggactaccatttcaagtatgagcaagaggccggctcctcggtgtattcattctttggcttcaatgggacagctggtgtctggaggatctcagcgatcgatgatgctgggggctggaaggaccggacgacagtggaagatatggacctggctgtccgtgcgatgctgcagggatggaagttcctttacgtcggcgacattaaggtcaagagcgaactgcctagcacattcaaggcgtaccggtttcagcagcacaggtggtcatgtgggccggcgaacctgttcaagaaaatgatggtagagattttagaaaacaagagagtgtcgctgtggagtaaaatccacctatggtacgatttcttcttcgtcgggaaagtcgctgctcatacggtgacattcatctactactgcttcgcgatccctgtgtctgttctgttccctgagatccagatccctctctggggagttgtctatgtcccgacagtcataaccctcttgaaggctcttggcacaccgagttcctttcacctggtgatcctctgggtcctgtttgagaatgtcatgtcgttgcaccggattaaggctgcagtaagtggtcttctggatgctggtgggcgagtcaatgagtgggttgtcactgagaagttgggcgacaccagcaaggcaaagcctggcaccaatggatcagacactgctgtaaaggtgatagatgtgaagctaacagaaccgcttgttccgaagctagtgaagaggcgagcaagattttgggagaggtaccactgctcagaacttttcgttggaacctgcataatcctgtgtggtttctatgacctgctttttgcaaataagggatactacatttttctcttccttcaaggcacggcgttccttgttgttggttttgggtatgtcggcacactacctccttgcactgcataagctgtcatggacaactgatattacctgctcaccagaaactgagcaagcaaagctcctctctcctgcacatatcaaactcttgaattcaatgatagttgagcaatgttcccccatcagtcttggcctgacatgatccaccgccgagaaggttgttcagatatcgccgtcgttctcctgtcagtgttggtcagatttgagccaaaccattctttattgtcagaaggccattcaaatagtgtcaccattgcaaattttataataacggtgtttaccgaagcatcatgaaaagaaaaatgattggtgcagcagcatttcgttcgcattccatagagatgcagttcacatccagtatttttttttggaaatctagtgttattactcagagttcagatccataatggaagattgttggcttcctcagttcataacctgtgtaggcttaaaacttgtagatgtaaattgttattaacactaatattttttattgaatccgggtattattgaaatgcaagtgtagcatgcatttcttttcctgtaagaagccaaagatgacttctgagtaacacgtctaatcagacattttacttgatgtggcacatggaatagtggatctattttaactatgtagcagcaaccatttggtcatactggtcacgcatgattgaagttgtga

SEQ ID NO: 32669 - DNA, 3452 bp, Zea Mays
ctgctccaccaccacaccgcttgccctccccgatctccgcacgctccggccagcgggacccaacggacagccagccgaacatatcccccctacgctggcgccgtcgcacgcgccgccactaggtgtcacccgtccttgcgccgccgccgcatccttcgactttcgatctgcgagctagcgattctccgctgaggagtggggcccatccctccggagcccaaccccagggcatccgcccgcccccgccgccgtggctcaggccccacgcgtcatccccgcgacggacaacgtagtcacgcaggtggagcgcggtccactcccccccccccccccccccccgcgcttcgcctccgctgagaccgcgccctgctggtgcgagtacccgggagcttccaaaccctagggccgggcatcgagcgagcgagggggtgagcgcggagcccaggcatgccttgccgcccgcggggatccaggcagtgatgcgcggatcggcgcggcgggggcggcccggaagctcggccgcatgaggtgcctcgtcggcggcggcgtccaggacagcccgcgcgcagcggccaaaagagtatcgccggcgtcgtggcggctggacgccgccacagcggaggcggacgcggggagagctgaggccaagggggtcaggttctgcgtcaggccgccggacgtcatggagacggtgcacgagatggtatcagatgaagattagtgcaatgtgggaggaaggtggcaacaaaacaccggcttcacctgccagggtcgtgcaatatgaagcttctgatgttggtgcggatgatgcattaggcatttggaaaatagatgacgtcgacaatagcttccacacacagccgtttcggatcaagtatgccagacaagatatctatctgtcagttatggtgtcgttcaacatattcaacattgaagaggaggttggcattttgacatatcacctttgatttgaattaacattactatagctttattaaagcctgctatatttgttcaagggtccagcagcctcggcggtgatgttgaagtttgagctgatgtatgccccaacactagagaacgggtctgagcttcaagcttctagtgtcacatcttcagcagctgtgcatgaatttaggatcccccacagagcactcctgggtctacactcctactgtccagttcattttgatgcgttccactctgtgcttgttgatctgacattacacatagtgtacctgaaagctggtgcaactaaaccatcattgaaggtacacaggtaccggaccaaggtttaggtcctacatcatatcatattgtcaaggcattattaacttctagaaagttgttgctggaagaactgaagaaaatcagtggtgctattgtaaagtgttccctgcaactggcaagggtgtgggacagttgactggagttttacatgatttcttggagaaaaacaacgatatggttaatggtacagatgattctatgctgtatactcttccccaggaagagttgtttgaactatttctaactctgagcggacaacttttcacttatatggaatgcatttttgaaatttcatagggtaaataaaacaaagatattggagtacttgcacgatgcttgggctattgacaggaaggcagaatggtcaatatggactgttcactcaaaaattgagatccctcatcgctatttgcggagtatgaatgatgaatcatctcaccgtcattcacttcttagagtttctggatcaaggaagttccatgacgatcctgcacagaactctgcttcacgggctgaactacaccggaaaagcatagcacaaatgaagatcaatacacaatctgttcaagatatgcatatatatgctgatccttcacatgttcctgttgttcttatagaacaacatgtcatggttgttccacagcatagttccagcaaggatttggcttcgaatgcttctgaacaaaaggatactattgtgctacctaaactacaaggagagcctctggtacccaaaagtagtgttggtaaaaaaagtgggcgcatcttgcgagctgtcatttttgtgcatggttttcagggccaccatttggatttacgtcttgttagaaaccaatggcttctattggaccctggagctgattgcctaatgtctgaggctaatgaagataaaacatctggagacttcaaagaaatgggtagcaggttggccggggaggtaattgccttcctgaagaagaaaatggataagctttctagatatggaggctgcaaagagctgaagttaagttttgtcggccattccatcgggaacatcatcattagaagtgccctggcagaacctgcattgcagccatacttgaagaacctctacacttacatgtcaatatcagggcctcacttgggttactggtacagttcaaattctttgttcaattctggactctggctgctgaaaaagctcaagaatgctcaatgcatccatcaactcactttcagtgatgatcaagacccccacaatacatacttctataagctttgcaagttgaaaacattggagaacttcaaaaatatcatattgttatcatcaccacaggatggctatgtaccatatcactcagcgagaatggagctctgcccagccgcatcatcggacacctcaaagaagggtcaagtcttcacagaaatgctcaacaattgcttggatcagatccgtgcgccctcatctgacacccggacgttcatgcgctgcgatgtgaattttgaccagtccaaccacggacggagcctgaacaccatgattggcagggcagcccacatcgagttccttgagaccgacatctacgccaagttcatcatgtggtccttccctgacctgttccgatgacagacaacgccgctcgtctctgtaatgtctctgtaatactgctgcataccaaacctacaaaccgatagcgcacactactgagtactgaccaggcaaggaaaagtaagcttgcataaaggctcccccagaatccaacaccgccacaggcagagtagcgctgtaaagatcctagaagcaacggtttttccagcttgctagatctgattctgtataaatagttgattctttcgtcattccattcatagtgctgtagatgtgcacctttgctgtgaatttataatcctttgtcggcttgtgtatctaacgcttcggtttaggatgtgctgacaatcagtgagcttatgtccaaataagccccctttcttaatgtttggttttagtcaccttggtctttgtgctgctgtaaatccagggtgttgtttctgtttggtgaaatgactgctacatgaatatctggttctggcatcttgccatagccggatcttgcttctgctaaggttattcctatcagggatatataggattggaaaaaaatatgaaagattttgatttattt

SEQ ID NO: 32670 - DNA, 2974 bp, Zea Mays
ctacattggctagattgttgcagctcctgaaaagtgaacctattaatgatgttggagagaggaaaattgttaatgccctgcaagactttatggaaattacgacacgtgatttcatgaaagatggacagagtttcaaagatgaggatgagagaaatcaaagattcatgaacctaaatatgaatatgataaaggaagattattggagggagaagtttgtccggctgcacttattgttgactatgaaggattctgcaatggatgttccaataaacttggatgctcgccatgaatggaataacttcctagaacgtattggagttgaatcaaataatgaagtgtcgataaaagggcgcatggatgacatccgtttatgggcatcttaccgtggtcaaacacttgccagaactgtgagaggaatgatgtactatagacgagctcttgaactacaatgctatgaagatatgataaatgaccaaggttatggcctagctgatttggatacagctaaagctgcaaggtccaaggccattgctgatattaaattcacttatgttgtctcctgtcaactttatggcgtgcataagacatccaaggattcccgagaaagaggtctctacgagaatatcttaaacctcatgttgacgtatccagcattgcgcattgcttacatcgatgagaaagaagtacaattacgaaatggtaaaatagagaaacagtattactctgttcttgtgaaaggtgatgatgaggaaatctaccggataaggctccctggtaaaccaacagaagttggagaaggcaagcctaataatcaaaatcatgccataatcttcactagaggagaagcacttcaagcaattgacatgaaccaggataactatctagaggaagcatttaaaatgagaaatctcttggaagagttccttcttacacatggaaagtcagagcccaccatattgggtgttcgggagcatatatttacaggaagtgtttcatccctcgcctggtttatgtccagccaggagaccagcttcgtcactattggacaacgtgttcttgccaaccctcttaaggtacgatttcattatggccatcctgatgtttttgatagactctttcatctgacaaggggtggcataagcaaggcatcaaagattatcaaccttagcgaagatatatttgcaggtttcaattcaactctgcgtcgaggaaatgttacacatcatgaatacatacagttgggcaaaggacgtgatgttggaatgaaccaaatatccaactttgaggccaaggtggcaaatggaaatggtgaacaaacactatgccgtgatatttatcgactaggacacagatttgatttctacaggatgctatctctgtattttaccacagttggcttctacttcaatagcatggtggctgttctcacagtgtatgtatttttatatgggaggttataccttgttttgagtggcttagaaaagtcaatactgcaagatccaaatatccaaaacataaaaccatttgaaaatgcacttgccactcaatctgtattccaacttgggatgttgctcgttctcccaatgatgatggagattggccttgagaaaggatttggcagagcattggcagagtttgtaatcatgcaacttcagttagcttctgtattcttcacttttcatcttggaacaaagactcactactatggcaggacgatacttcatggtggagcaaagtatagagctactgggagagggtttgttgtgcgtcatgcaaagttcgctgagaattatcggatgtactcccggagtcactttgtcaaagcactggagctgcttattcttttggttgtctacctagcttatgggagttcatacagaagctcaagtttgtatttgtatgtcacagtttcgatatggttccttgttttctgttggctgtttgcaccttttgtcttcaacccatcctgctttgagtggcacaagactgttgatgactggaatgactggtggaagtggatgggcaatagaggtggtattggattagcgcctgaacaaagttgggaggcttggtgggtatatgcactgtcatggctggttatagcagttgctcttgtgtcactaaaggttgtttcaatggggagagagaagtttgttacaaggattcaactagtgttccgcatcctcaagggcattgtgttccttgtgctcattggtttgcttgtccttttatttgttggttttgaccttgctgtctcggatgttggcgccagtatcttggcattcattcccactggctggtttattcttctggttgcgcaattatgtggaccgctgtttcggaggttgatcatagagccacttcacttgctgtgttgcccatatggtaccggtggtgcatgcagaggtccctgctgtgccaggttcagacagaggaccggtgctgcgcttcggaagatgggaccatgggactccatccaggagatggcgaggatgtacgaatacaccatggggctcctcattttcctgcccattgccgtgctatcgtggttccccttcgtctctgaattccagacacggctgctcttcaaccaggccttcagcagggggctgcagatctctaggatcctcgcggggcagaatggtagcggcacaaagagcgactgatgctttgacattaacggagttatccattccgttgtgccatgtggtatctcgttgctattgtccgctaccgttatgtgtagaatcaagtatgttcatcgtttgaaaaagtgtcgcgcagtttgagtgtgtatgtcggattttaacctcttaattcagttcatattcattggttgtttccatttgatttgcacgtatacgttggaatctgtctgattttcggtgttaaaagtaagtgtttgtttttagctagaactttctctactcctttaaagcaccaattttatatgtcatgctttgcgtacgaagca

SEQ ID NO: 32671 - DNA, 1790 bp, Zea Mays
cgacgcacctgtcccaagctccaaaatattcgcatctcctggcaatctgccatggcgccgccgctcgccgccgccctccgccctcacctctcccgcctcggccaaaccctctcgtctcgtcttcttcgcctctccacctcccattgtccctccgaccagagcgacttcgaaccagaccccgaccaccccatcctctctgcccctgacaatgacgacggtgagctcgcctccttcctccaccacctctccagcgcggcctccaatacctcatccccgaaggaggccctctccttcctcctttccatgtccacgggcccgttgccggcctcccacgctctcctagtccgcgcgctctgggatctgcgccgcgacccggacgctgccgcgttagcgctccggtacggagacgagtgcagcgccgtggatgggaccgatggggcgggtctaccgccgccgcctgaagcgtggcacctggccgtctgggccgcgggtaaggcgaggcggttcgacctcgcatgggagatcgtgcggcggatgcggaaccgcggtgtgctcacctgccgggtcatggttatcctgatggagagctgccagtgaagtaaataaagcaatcaaaacatttgatgtcatggagaagtttaaaatcgagtcagatcaaagtgtattctactcccttcttcacgctctttgcaaaataaaaaacattgaggatgctgaggagttgctttttctgagaaagaaattcttcccacttactgcagaaggtttcaatataattctagatggttggtgtaatgtgatcaccgatgtggctgaagcaaagagagtttggagagaaatgtcaaatcactgcattactcccgatggcatgtcctatactctcatgatcagttgtttctcaaaagtaggaaacctttttgatactctaagggtttatgatgagatgaaaaagagaggttggattcctggtattgttgtttacaattcacttgtctatgttctgacaagagaaaattgtgtgaaggatgcacacaatatatttagcaaacttacagatgaaggcctccagccggatgttgaaacatataacaatatgatagttcctctctgtgaaagttgtaagcttgatgaagcgcgaaaggtaatggaaagcatgatacttagaggcattgttcctaccatttcgacttaccatgcatttttaaagcaagaaggcattgatgaatcactgaagctcttgcagaaaatgaaggaggatggttgtggccctaagagtgacacatttgtcatgcttattgataaatttttcttgctgaacgagtcggggaatgctctaagagtgtggaatgaaatgagaaaatatgagatcagccctgtccgtgcacactatatgacactggtccaaggtttagtgaaacatggatgtataccaagagctttagagtactatgacgaaatgaaggaaaaaggttttgcctctgatacacaacttgataaggaatttaaaacctttttgttgaaaaacagagaccactggagaggagcaggcaaatacaatatcattccccagcgtggcaaatattttacaaagcagtcaagaatgcaataacaaatgtggggttaataaatttgcttctagtgcctttgtgatatgaggacttcatttcaaaaaatttcaatatggaccacaatgagggacaacaagacaaccttcagtcggaagcttctataagccaaagggagaaagggacatcttcgtcatcaggaattaatcatggtgtcgacacaca

SEQ ID NO: 32672 - DNA, 3508 bp, Zea Mays
ccccaacctctgaaccccgctctaataaatcttcctcccatctctctcgctcccaaccctcaagtccccaccaacccaaccctggtggcaccggccgcacacacgaaagcaagctagctagtcactattagagctatttggttgggagcggtttagctgagcaagatcgaactggcattgtcacacacatctcagcactcagctccttgggttcccctccatgagcagcagctgagcagccacacattgccgtcttccttgctgcacttgtagttacagctagatccattgatttttttggcaacaacaagagcaggagctactgagcaagaagtgcgtacgtgcttgcggcgtcggtgctacctgctggactacgtgtgctacaaggcgacggacgaccggaagctgccgacggacctgtgcggcgagatcatccagcggaacaagctgctggggctggaggagtacaagttcctgctgaaggtgatcgtgaactcgggcatcggcgaggagacgtacggcccgcgcaacatgatcgagggcggggaggcccggccggaccgcctccgcgagggcatggaggagatggacgagaccttccacgccgtcctcgacgagctcttcgcccggtcggcggcgcccggcggcgtcggcatccgccccgccgacgtcgacgtgctcgtcgtcaacgtgtccatgttctcgccggcgccgtccctgtcggcgcgcgtcgtgcggcgctacggcctccgcgaggacgccaaggtgtacaacctcacgggcatgggctgcagcgccacgctcatcgcgctcgacctcgtcaacggctacttcaggtgcgtgctcgacctagctcgttaattcttgctagtaattaattactactcgttgtcatgaagagataaaggtctcgttcacgcatggtgtgctcctgtaaatagacgtctgagtttgacaaactgacaatagattattgaccgcagccaagtctatcgtctctctggccaaataaatatttaatcacaagtttaggaaaaaaattgtaataaagaattctataactcacaaagtctaaagctgttttgttacgaaaaggcaaaaacaaaaaaaaacaaaaaagggggctagagctgaaaatgtatatatgttgcacaggtaaaaaaaaagcccaaagctgggcaaaaatttatgcctgatgggccctagctagctgctctggtaattaagggcatggatggatacacacccagctgtgaggcatcttgtttggttgcacgccattgaatccatcgtctgtgtagctactgagaccagataaatgttcagtactcccctcctactacttgtaaattaatgcctatcaatcggaacatgtaccgtacgtgctctacctactagctagcaacgtagtagtagctcatttttaagagtggtagtactcgtttggtacttgtgctcaccataataatgaacacaatcacaaggatttttttgttatgaacctatggtagttttgttctctcttttttcagcaagataaactaggaaacaaatatatggtggaaggtcttgtaaataaagcattaagcagcgtaaccattataagcttaggtcctacattaatattgaagagttaaccactataaagatccatatagtaagtgattgactctattattaaacttgctgcaagaagatccatcccgagatggcagtagccgcatcccccatgaacacgggagtaaatgtggccggggccagcaatggcatgaatgctgtgctgtgactgctgcatgtgagccagctacggctacggcctactctggagtctggactgtcctcctttaatgcctgctcaccaagtttggtttgcctttagatgggcatgaatggctcagccgctcaggcaggcacggcatggctggacctggacctgaccggctccgcttgtagttagtagacatgcttgtccattgggctgaactgtctggttcaggcagatctccatctatcccaggccgacgagaaagtcggcggtggcacagccgcacaggcaacgaccaacatagcatacttgaaaatggctggcgtgtgcatagcatacttgaaatcttaatgaacttgtttgtcagtcatggatgctggattacgtgtggttggttgcttgcaggacgcacgccgggcaggtggctctggtgatgacgtcggagtcgatcgcgcccaactggtacgcgggcaacaagcgcaccttcatgctgggcaactgcctgttccgctccggcggctgcgcctacttcctgaccaacgacccgcggctccggccgcacgccaagctccgtctccgccacgtggtgcgcacccacacgggcgcctccgacgaggcctacaactgcgcgctccagatggaggacgaggccggccgcccggggttccacctgggcaaggagctgccgcgcgccgcggtgcacgccttcgtgcacaacctccgcgtgctggcgccccgcgtgctgccgctcccggagctgctccgcctcgcctgcgccaccctctcggcgcgcctggcgcgcaagaagcggcagcgcggcgcgggccatggccacggccacctcaccatccgcatgaaggccggcgtcgaccacttctgcgtgcacacgggcggcgccgccgtcatcgacggcgtcggcaagggactcacgctcacggagcacgacctggagccctcccgcatgacgctgcaccgcttcggcaacacctccgccagcagcgtctggtacgtgctcgcctacatggaggccaagggccgcctgcgccagggcgaccgcgtcctcatgctcaccttcggcgccggattcaagtgcaacagcggcgtctggaaggaccgcatccaccactacccgctcaaggacgtctccaacccattcatggacaagtacggattcgtcaaggacctcatagacttgtgatcgccccctagctgctcaactcaacgtctcaaccccaccaacgcacatactttttatttacaccattattattgtattcattgtcatgttagtactactctgttctagtattgagcaactactagttaattaaggtgagcacaacaatgctagctgaggattcatagtagcttatgattcttttggtgatggcgggaagatcgacttttacgtagcaacggatatggcttcgctctttgttctttcttcagttctgtcatttcgtgtgtgtcaatttagatgccccatgtcgtcagtcaatcagtcagtgtcgtcctgttcctatttactatatcaaatgattatggtgcaatcattttttaaactaagttatttattatttattgtgtaatggtaaatgttgctgtaataaagagcatactctcactccaaagatgcatgttttatgatctgaaagtccactgcggcatagtattcatcagccctcatggcgatgtacatacgtagaagtcggttcttcgatttctaaataaatacaatacaaa

SEQ ID NO: 32673 - DNA, 2379 bp, Zea Mays
cacggccccaccactttgcaaacttccatccgacccctccatttcctcacgcatccccactgagcactgacccccacgccgccggcgatgagcgcgaagcagctctgcgacgccctggccgccgtggggttcgacgccggcgacgatcctctcgacgcggatagcctcgagtgggcgtttctccagggggaggactcccgccggatgcttgcgtgggtctgtgcccggctccgccctggcaacgtcctctccgccacagacctcgagctgtacgagcagcttgaaatggaaggcaagttattgaagggggaagacttagattttgcttttgatcgtatttcggctttctcagacaatatggagaatcaggaatacatattcttgacggaagaaagtcttgaagacatctgtgagtcaaagcttgctcttagagctgaagtttctgatttggaaaggcagcttgcttctctggagtggaggcttgatatacttacagcacaagctaccaccattaaccagggaaagaagtcccgctcatctgctaatactagagctaatggacaacttactggcttagataagatgtttgctaagagaagtttagagatgaatgcaatacttggaaaacttactgcatccacacaagagttgtcttactatcactcagaagctgatatcggggtctacctatcatactgtgacttccagccttatgtgaggagtgccctggcttgtaccaaggaactaaacaaatggttctctaagaagtttgagaagggaccactccaacttgttgttcaagatgacaagttaagaggagatccggtaaactcccaccattttgttgtcgaactgagccgaattaactccatatttgctaaaagtaagagacagtacatagaagcacaagtagaatatgctaaagaagaagctatactatcagttctgagaactcagttggcatcccaacagtcatatattcatcaggatagccattctctaaggaggaaaaactccgaacttgctgaagagcttaaagatctttcccatcaagtgcaggaatacttatctgagactgttacaggcctgtgtgcagaccttgctcggctttcaggtgcaaatattttggaaggagatcacaatttaaagcttctgcgccaggactgctacataagtcatcagaagaagttcatcaaccatcttgtcaatcaacttgctgctcacctatttctaaagatagcctgccagctcgaagaacagataaaaatatcgagtgcctactcatttctgaaagctgtagaattggaattgcagggctacttctcagcttttgatggccgcctgggccggtacaatttaattgatcaagcagcatctgaaatgtttgaagagggatcagttgacgacagtgattcttatcttcatgctgtgagggatatccttagcagtcactcgagttcccaagcaacgtcaccagaatatgtgtcatcatatggtttgatcgggcagataacagagctgcaggatgagctccagtaccttcagcatgagaccgaaaatgtccttccacgtgagcgaggaagatgcaccgacgaactatgcaggatgatccaaacactggagcaaattctcgctgtgtccctttctgatgagcaaccaaagctgacaccatggccattggcgcattcacttgaagacctcgaaatggtcagccagcaggtctccgcttccgttagtgaggtgacactagctcgagacgaaaaggccgagaagctgaaacagccttcacgcaacgcgcagcaggaaaggcaggtgttctcagatttcttctgccacccggaacgactcgagaatcgagtggaagagctgctctcccgctttagagctctccctgagtagtaccgtccatttcatttgccaagatgggtggaggaacccttggccctccgattttcaaacgggcatcgtgtctcattgcctattcgtttctttttctcgtgtctggacgactggaagtgcagttttttgcatatatatattcaaaagcacgcggcacagttttttttttgactaagataagacatcgtctgtggtttacccggcccggcgtgttcagttgataaaaggaagtgtatcagttgataaaagcgtaattcgttcaaatagtttactcaaatctttgaagtattgtttgtcgccaaaatgagagagcgcttaaaaagagaagtagcacgccctatagactatactatagtgggaggatcaatcacctgcttgttttaaaaagataaagcctgctatttgaatagttagttttcttatgtcttagaacggttggagtaagacgaggacaaactattagggctggtttggtgtacg

SEQ ID NO: 32674 - DNA, 161 bp, Zea Mays
tccacggcgagtacagaaaggggcgtggggagcaagggagtgtacctgctaactgcaattgacatctcggcgaacctcccagaacacctgtacgagcccgatttaccgtagaggaggagcgacatcgaatggcggcccatggcctcagcactaaatttggc

SEQ ID NO: 32675 - DNA, 816 bp, Zea Mays
  misc_feature (816)..(816): n is a, c, g, or t
gatgttattttataaataagtttgcatccatccatcttgtctctcctttatttgacggtaacacaaatggctctctacctccacctcataacaaccttaggttacagtaacgttatctctcttccatcctttctctctctacctatctgttcccaagtatagaatataggaggagtatatttttttagagatcgttaacctctcacagtaatccctccttttgcccaaaacctaaaggaagccaaagtgggagcaccaaaatattcgcggcgggtgcatagttgtttgtttaggagaagacgaggttaagaggagatgaccgagccggcacctgcggcagcagcggaggagaagaaggccgtcgcggacacggctgcggctgtggtggcgaagggaaaagagaaggaggaggcggcgccaactctggcggccggcgccagggggaggttcgtggcctacccggcgcgggtgacggagcacacggacgtggtggcggacgccgcgcgcttcagggcggcgctcgaggggctgcacgcgcacatgaacacgaggctcaaggtgccaattattggagggaaagatttggatcttcatcagctatataaggaggtcacatcacggggtggtattgacaagttgaaggcagagaatagatggagggaagtgaccgcatcatttattttccctgccactgcaacaaatgcttcttttatgttgaagaaatactatatgtcactcttatatcattttgagcagctatacttctttagagtgcaaggctggtaccaacaagaaatagattccagaacgaattcn

SEQ ID NO: 32676 - DNA, 2865 bp, Zea Mays
tgcatatgtcaactcgccaccgggtttctcaagaccataatgggttcatgccaaccgagagcacagatacaccaccgtccagcctcttgccacggagggtacatgctaccctcgccatctctccactcccattgcgtggtggcctttctggtattggtccgactgaggcaaagcttacccatgacgaggcatgtggctagttaaagggtcctcggtcagcaggcccacatcgacacggtccttaatcgactcagacaaagacactacaccgagacttccttcttgtgcaagtcacccgcccggtctcgtctttattatttacaacccaaagtttggtacctagcagaggtacatcttttccgatgttgaactcatcacggccatgatggattcaccatcaagccttttcttttgaaaacttcccatccaatctgaaacatcaccttttgttttaaaacaaaacattttgtttttctagagcaaggctaagcatcataaaaatccttttcataaaaggtatcaaggaagggtaatcaattttccaaggaaggaaatacatcaattgtttagcacacaactcctatcacctaatgcatcaaacaaggtgataaagattttaaaacataaggaaggggataatgcaccggggcttgcctggaataaacactatgttagtgtttgttagacgtcgatcacttgatgaccatcctttgtcttggcactcgtttagatttccattttcaggttcatccatcaacatcatcttgtggagaagcttacacgcagcgacatcttgtgttcgactcaactttggtcctccatatcacgtaatcaataagcgtacctacatgatttgcataatgcacatgaatgcatataaacaggaatatcacaaacctaaataatgctacacggtagcgaattaaacacctaccggcgaggcgttgtaccatttcatacagaaacactagttatcgacacacgactaagcgcaatgattacgcttctctagattaaccgaatctaacgcaaacatcacgaaacaacaaactatacacatttaacacaattagcctaaacacaacttatcagctaattaattaaatgctaaacttatccctcgctttataaattataccactttgatcacaaagaactatcttaattttatttcgcatcactcatatttattcaatccctctaacaattcggctaacaaaatgcgcgccaataataaatttagctcagatccactacatcgattaacgaatactaatccggatttttcgtcaattacacgttaaataccacactaatactaaattcactcgaaactacaacatcgatagtgggttccagttcgagccttacctcaaaccaatagaatcggttactcgagaagaacatatcagctagtcattggaaacactaaacctattccatgcattatcgttatacttcatgtcacagacctataattgattccagcgtactagacctacacatctacctaagcattccttgtctaatttacactctcatctccctaagatgtttaatcggtcaccgaatatagaaaataatgactattagagccgagcatcgactacatcttaataaataaaactcgcattaccctaaaaaatatgatggttagccgataaataaaataccagacctaaccttcatgtcaccaattaaatatacatcgtatgtgacgcatcagcaaatgtctaatacagtcacaatgcatcctaaccacgacaagaaaactatcgcaactaatatatttaacggttctacttatccaccaaaaagcaggagtagcgatgtaactcacgagcatccaagcgattagaaatttcacgcgaaacgatgacttcctgcttcaagatttttaccaaacacacgacgatagcgaagggcggaccgacgagccaaggacatagatactgctccggcgtcctgctgatgcaccacggcgatgcgatgtccgagacgacggcgaggttgacgcaggagcaagctcgtgcgtccagttggggagtcatcggcgagtgaggcgactagcaccagcacggccgaccggcgagcaaggtcaaactccgagctccatgggagatggggttcggcgattcaacggcggccgcgaagagataaaccagagcgcgatcttgagggacgcggcaagggaagacagagcgcggccatggagaggaacctcgagggagctgcgcgcgtccatggtgagctgggcgtcgagcacagggagatgggcgcgcgcacgggagatgggagctcggctggccagggcgcgacgctgggcacgccgggagaaaacagaagagcgcggctatagtgcgcagacccacacacgacaagcaggaagggtgagacgatggcgaggagcatgactagacggtgccgacgaagttccaacagggagagccgagcagcagcggtcagcagaggagctcgcgcgccgcgacgctgtggagcttgcaggagaatccatccaaggagcaacgtccgacgagcgcaacaggaagccaaagcgaggtcgcggccaacagaggagcgcggtgtggagacgagctaccgtgggcgtggggctggagacggccgggagagctccacgacgatggggtgctgccgaggtcggcctccgcgagctgcgaggggaacgacggcgcgtaggaagacgagagctcggccacggagctggaagccgagcgagcagagaggggcggccatggctgggaggagctgggaggccgcgacgcgcagggagctcggcatgggcgcggcttgggctgaggcgagcaccagcagcgcaaatatatccgatggccggcggtgaagaaa

SEQ ID NO: 32677 - DNA, 2416 bp, Zea Mays
cacccacacaaaccaccatgccaccgcggaatccacccactattttgcactgtttgtttttagttccctttaaaatgccgcggccggcgcggcgcatccggctgcgtaccggcccccttttccacccacccgcccacccctcgtttcctgcaattcgccgccatcgttcgctgaacttgagcgcgtctgccgcctgccaccaccgctctctgcctctctgctgctctgttctttctcccgccggggcagaggagggcggggaggcccgttgagcgagcctcggtcggtatggggatctgcgcctcgtccaagcgcgtgcggcaggaggagcaggactccgacgagaacgtggtgtacgtgatggacgagcagggcggcgggggagaaggcgaggacggccgtggcgcccgcgcggcggcatcccgcaaggtggcctccctcttctcgcagaagggcaagaaggggcccaaccaggacgccgtcatactctgccaggtccgcgctcgcaccaccacccctcctgctgctgccttgcccgaggaattctctcgatgtctcagctttttcttcttcttcttctctcctatatctgtttgtttatttattttgctacacagcgctggtagatgtagatctgtactgatacagattttgtttggtactccaccgactgtactgcactgctccgtatagtctcttgcagaggaaaaccactagttttttttcctcctgggtactctgtccttgcaagggactttgacgtggtgggaggtcatgaaattccaggaactgtcctctgtattctgcaattattatcaggacatacgtacacagctgccaccccaccacaaccaattcaccatacagcgggggggaaatcgtgatggttcactttccaaaccacggaaacgagtttcgtcgtcctacggatttcctcgcggttttggtttgctacgacagcggaacagatcagaattatcattagttccctgttcttgccccctttattttcagaccctttttttaaaattcccccaagaaccaaccagtctcatctgccgtttgggctcaattgtcaacgatggccactgatgctatcatttgatattcatcacaagctgtcggcttgttgctcgagtccatgcaatctgaatgcgtgtaatcaagctattcggttcggaccacgattctgacgcccaccgtgcgctccacgtctccagggattcggcatggaggacggcgtgttctgcggcgtgttcgacgggcacggccggtgcgggcagttcatcagcaagctggtgagggactacctcccgttcatgatcctgagccaccggaacgcgctcctcatgggctccgacgacgacgacgatgatccggcgcagctgctggaggagtggcgggaggcctgcgccaacgcgttcgaggccatggacaaggagctcaagctccaggccaacgtggactgcaacttcagcggcaccaccgccgtgtgcgccatcaagcaggggaaggacctcatcgtcgccaacctcggcgactccagggccgtgctggcgaccatgtcggacacgggctacctcaaggccgtgcagctcaccaccgaccagaagcccaacgtgccccaggaggctgagcgtatcaagcgctgcaacggccgcgtgttcgcgctcaaggacgagccgtcggtgctgcgcgtgtggcttcccgacgaggactgcccgggcctcgccatggcgcgctctctgggcgactaccgcctcaagcgccacggcgtggtgtcggagccggaggtgacgcaccgccgcgtcgcgccgggggacctgttcatcatcctggccacggacggcgtgtgggacgtgctcagcaacgaggaggtcgtgtccatcgtctgcgccacgccgcggaagcagcacgcgtccaaggccgtcgccgaggccgcggcgcagcgctggcggaccaggtacccgacgtcccgcgtcgacgactgctccgccgtctgcctcttcctgcgggaccaggactgggccagcagcgtcgccgcggccagggccaaggcggccgctagccgctagtgctagtgctagccggggcggacggcggacgaagctcgctccgacgataagcctgcggacggcgatccataacggcagctaatgtactgggagtgtaattaagtgctgtaacatagtgttaattaagctctgatgtttttgcgaggagagaaaaaagtcgtttaattctcagttttgagttttgactcctgatcggtgaccagctgaccttgcatgttatggtgtcggacgaagcgaatggctggcaggaacgccgtttgtactctgtgtggcatgtaaattgttaccggttgaagaagagttaccagtccaagtgcctttttttgtcgatataaatgtta

SEQ ID NO: 32678 - DNA, 460 bp, Zea Mays
atataatcagagtacttattacatatcagaagtcttacaaaataaaagataaatataaaaggatctaaaatccatccttggccccagaaagtcaactggagacgccacctagatcgaatcgaactcctcgatgtgcggctcctcttgaaccacctgatcttctcttgggaggtgtgagacaacaagggtgagctctcacatgttcatcgctcaacaagttgtggggaataatgtggcatgaactcaccaaaggtggaagatcatgtgaagtgtaaggcttaccaaagagaatggttaaagctgagcattgcttttaaagttggtcaaagttttattagcaattactagatgtaagtaaataccaaaccataataataataatagaacaaaattaataacaaatgatcccatgcaacacatatgacagattgagtttaggttccataatttaatcatgcga

SEQ ID NO: 32679 - DNA, 2882 bp, Zea Mays
ccctctacctcttcgctggggggctcctttccctcccctcgcgtggcgtctgtggcggctatcctcgcctcgtctcccctcccccctccctagggagcagtcgtttggtgttggtagctgcggcagacgtctgtcctagatcgaattgactcgcgagaagaagccatgtcgacagttgctcctgcccctagcgctgctgaccagaccaccaatcttctgcagaagctgtctctggagggcaaggatggctccgacactgccaagaagccttctgggatgccatatggaggatctacccacgctggagatgcacagagcgctgcttcacaggtggacaggtcgataacacctctactacaggaggccatggatcctaatttcttctaccagcccagtgcatatgcctctccagcctattacttccctagtggttatgatggctcagccaatgaatgggactcaaggtatgctggtcatgaaggaatggagatgccccctaccgtgtatggagacatgtaccttggatatggctatgctccatacggcccatatccttcgggttctccagtaccaactgttgggcatgatggccagtcatatggttctcagcaatatcaatacccgtctcaatattatcagcaaccaacaccaacaaacgcaaaacatggtctaaatggtgccagttctcaacctgaaccgccctctgttgccagtcagcaggcacgagttttggtagatgcaacaaaagcaactccaaacgtgagggctaatggtatgacaattgctcacaacagttcgctgccacgtaagcaaacccacctgaatgtatcggtagcaaacagtggtttatatggaagaggacctatgcaaggcagtggaccttctgcaagcaattatggtcacaatggtgttcgttctccagctcaatggtacgatggtccagtttactcgaatgggcatcagataccaactgctagttccacatcttaccgttccaattcgtcttctatgagaagtcagagccagcatccaacaacaaacctcatgggtatacatgcacagatgccttcgtctggaatgggtctgacctcacctagatatccttctaggatgtacccagacaacagattatatgggcagtatggtcagtatgggaacacactgaagggtggccttggttttggatcaaacatgtatagctcgagaaacaatgggaggtggggagttgtggataccaaatacaagcccagagggcgtgcaccttttggttttagtggtgagaaccaagatggctttaccgagctgaacagaggaccaaggtctggtggtttcaagcaccaaaaacaattcggtcctactgtaactattgctgtgaagggccaagccctcccttcagtggggaaacagaacagtactcttccagacaaaggccaatttaaccaggaagggtttcctttaacctacaaggatgcaaagttctttgttatcaaatcatatagtgaggatgatgtgcacaagagtataaaatacaatgtgtgggctagcactcctaatggaaataagaagctggatgctgggtaccgagaggctcaggagaaatccagtgactgcccggtgttcttgtttttctctgtgaacacaagtggtcagtttgttggtgttgctgaaatggttggtcctgtcgactttgataagactgtggagtattggcaacaagacaagtggaatggttgttttccactcaagtggcacatagtcaaggatgtgcccaacaacactttgaagcatattacactggataacaatgataataagcctgtgacaaacagccgtgacacacaagaggttaagctggaacaaggtcttgaaatgttgaagattttcaaagaacatgttactaaaacgtcaattttggatgattttggtttttacgagaatcgccaaaagttgatgcaggaaaagagggcgaatcagcaactgcttcaaggccagggggccgatgtttctcaagagaaagacaaggatgcgactaatggcaaaccagggtcacagaaacaggcaacgagcaaggaaggcactcctgctgaggtggcggcggatgcctccaaaccagtagctgaaagtggaatatcaaatgacaactaagcatcatgcatactggtcggcaccataccggtgcaaatgctgcaggttttgcggtatctgcaaatcaaaacctattgattctgcctgaattctggacttctttcggtactggagttcgtgagatggggctcatcatgggagtgaatcagattttacttattgtcgctttgctagttgtgtgactggtttttggtgtcttggaacccgtgttaggcttcttacatacccctgtgacgacaccgagtttgttgtaacccttgtttttttttgcctttttgttttagttctatcattgttaacgaagcagcctatttcctatactttgaacaacattaaggtagttttttttgcatgttgcggtactgtggagagtaataagacaaaaagactctaggtttaaaccattttatccccgtattctgtattgattatatcttgttttttatccattttgtgttcatcagcggcctcagtttctgtgcttgtaggagaatgtcttaaaattggcgcgtaactatcttttaatggagtactaggtgtgtacctgtgcgttgcaacggaaacatataataccattgataacttatgtacgttggggataataagcatcgacacatctgaccggatgttttcttccttggggatctggagaaaagcctgctcgaaagccaaacaaaagtctgctcggaagtcaaacatgttaagacctgatcaggtgcttcccttatgtctctgat

SEQ ID NO: 32680 - DNA, 2062 bp, Zea Mays
  misc_feature (2062)..(2062): n is a, c, g, or t
tgaagtctccgacaatgtggcctcaaatttaactagtcagcgtgcggatatagctggtgataacagtgaggcaaaaattgaaccatcggcttctgtcggtgatcaacaagaagcagcacctcaagctggtgacgttaagaactacacccaaagtgttactgaagaaaacactatagctcctgagccaactgtacaagaagagagtgtgaaagcaactgaatctcttcccgattcatctggcatgcagattgttggtgatgtcggtggaaattggaaagcagtaatgcatgaacagagtaatcagtgttattactggaacacagttactggagaaacttcttgggatataccaaatggattagcttcaggagttgcaactgcatttgttccttctgatgtggactattcaaatgaagctcaaacccatgtccttccccacagcacactggaagcatatccaagtgatatgtctgttgggaacggcacaacttatcctaatttgggaatggcatgtggaagtgcacatgttactcaagatgcttatgcttatgctgctcctatcgccagtaatgagcctttggacattgatcccttgtatcttgcaaaatatggtgatggtttgctgcaaagattggacctgctggaaaggctctgtggctcgaacaaaggtcttgaattgataagaagagaaattgagatacggatgtcggacttaaatgcactttcatcttatggatcttctttgctcccattgtggttgcatgctgaggtgcacctgaagcaactagactcttctatttccaagctggaaatgaactatcatgcagattcagaacctaggaattcaaagacagaggttgctgaacacagggcacctgatgatgctgacttgataacaccctccaatggcgaggctttgaagtatgaagtttgtgctgggattactatcgatgcaaatatgaagattggtaagccagcttcaacgtctcagaattcacaaggtagggataatgcagctgttcctccaaaaattgaatctgacaatgatgaagatatggatgtggaaatggaagttgatgaagataatgtcgaagagcaggcacagtgcagttctgtacctgaaaaggagcatcctccttcagaacagttgagttcatctaatttgccatcatttgaagatcctacacctcctgaggataattctgttcctccacctccgccagaagaggaatggattccacctccaccacctgaacacgaacacgaaccagctcctccagcttccccagaagagccggctgcatcatatgttcaggtggatacaattcctcagccatatatagctcaagaaaatgttggctatacaatttcaggaatggagtattatagtactgaaggtacaaatgccaattactatatgcaagtgagtgagcctcatgtccttcaagcacaacattcttattatgcaccagtatctgggagtggcatatctgtttctgttgatggcacatctattgccccagaatcttattatacctatccttcagtcactgtggctgcaagcgctgtagcagctgaacattctggatactacgcttcatcagtctctgccatttatagcagtgcagcagatatcaaaacaagctcagcttctcttgtttctgcaattagcaattcggatctaaaaaatcatgataatgttatatccaatgatgcaagtattgtgcctttcacccaagctgtagtagcaacatcagctgcaggaacgacatctgttcctgaaagttctacacagccttctagcagtactacaaaccagatcaaagttattcgcaacaagaagcgggttgttggtattacatcgtctctgaggtctaataagaaggtttcaagtttggtagataaggttgctctctacaacgaatctctgtattctgttattattgcatattaggtgcctgaaatttacatttttagcatgttcctgtatattcatggaattaacaaatcctagtttcttactctcgatttgagacgttctctcaactctcaaccatctaan

SEQ ID NO: 32681 - DNA, 1439 bp, Zea Mays
caacaaaagatcatctgatgatgtgaagagctttggtgactgagatatgaacaaaacatatgggggaggaggttggtgcaacaccacgcagagctgctccgagcgcaaaatgaccaacttcggttcatctaagtatatgggagcagtaaacttcactgggatactcagcaatgatcacacagaaaatcctgatttctacaactggaatacagttgtcataaggtactgcgacggagcatcatttgctggggatgcagaggggggagatctggatggaaccaaacttttcttcagaggattacgtatctggaaagcagttgtagatgaactcatgggaaaaggaatggacgctgctaaacaggccttgcttacaggctgttctgctggttctctagctgcgctactgcactgtgataatttccatggacggtttcctcatgaagtttcagttaaatgcctttctgatgctggattttttattgacgagaaggatttatctggagaaagatccatgcggtcgctcatcagtggagtagttcaccttcagaatgttaaagaagttttacccaatgactgcctccaaaagaaggatccaacagagtgtttctttcctgctgaactgattaagggcatcaccacccccacgtttattctgaactccgattacgattcttggcagatacgaaacattctcgcaccaaatggatcctatcctggccaggaatggtctagttgcaaagcagatatccggaactgcagttgcgcacaacttgatgtactgcatggattcaagaagaaattagtcagtgaattgaaggttgccgaagataacaaggactggggcctgttcattgattcatgctttacccactgtcaaacaccattcgatatcacatggaattcaccgatctcaccaaggctcggcaacaagtctatctcagaggccgttggggattggtatttcgatagaaggcaaaacgcgaaacagattgactgcgagtacccatgcaaccccacatgcagcagtcttctgcctactgcttgattcgcaaagggctgcactgagatcaccaggcttttctcatttttcaaattagttttgctgaggattcaaaagggagctttgccttattggtaaaacctgcaattgactaaacacgacttgcagtagttgtgcttccatcaaaagcaatatgtcagaaccgttaagcaccaaactttcaggaactgtgcctcgtaacttccacgttcaaagaaattccagcagagcccacccccttagcctcttacaaaatcaccagttcgcatgaaaacccagcaatggaagctcataaggcctactaaatccacacgattaccctgaactcggcaccaagtcaaaccctaattaagcaaagaaagcccatccgcaaatataggactcgagaactcacctccac

SEQ ID NO: 32682 - DNA, 2413 bp, Zea Mays
atttacgattgcatctctaatcctccccaaccctcttccggttcttctcatcccaactgaccgactaccatggccggcggcggcggcggctctctgtctagcccctccgcctccttcctttccagtcccaccccaacaccgccccctcgtctcctccgcaggtgtagcacgaagtctgcctcacgagatagccccatcctcagaccaaaaaagccgcctccactcttctgcgcggcggcagccactcccacccccgctcccgcggccgcgtccaagtcggctgggtcatggagggacctgtgcagtctcaacgcctgggtggtgcgagactaccgccgccttgtcgactccgtcggcgcgctcgagccggcgcttcggaggctctctgaggaacagttgaaggcgaagacggccgagttccgcagccgcctaacgcgcggggagacgctcgccgacgtccaggccgatgcgtttgctgtggtacgtgaggcggctaggaggacgcttgggatgcggcatttcgacgtccagataattggcggtgctgtgctccatgacggctgcattgcagagatgaagacaggcgaggggaagacgcttgtttccacacttgcggcttatctaaatgcccttacagggaaaggggttcatgtggtgactgtaaatgattatttggcacagcgtgatgctgaatggatgggtcgtgttcatcgctttctcggtcttactgttggtctgattcaggcgggtatgaagtcagatgagagaagagctagctacagatgtgacattacatacactaacaactcggaacttggatttgactatcttcgtgacaacctatctcgaaacaaagaacaactagttatgagatggccaaggccattccattttgctattgtggacgaagtggactcagtacttatagatgagggaaggaatccattattaataagtggagaggataatagagatgcagttcggtatccaattgctgctaaagtcgcagaacttcttatggagggtgttcattacaccgttgaactaaagggcaataatatagatctgacagaggacggtgtagcacatgctgagattattcttgggacagatgatctatgggatgagaatgatccatgggcaaggtttgtgatgaatgctttgaaggcaaaagtgttctaccgaagggatgtccagtatattgtcagggatgggaaagctattataattaatgagttaaccggccgagttgaacccaagagaagatggtctgatggtatccaccaagcagtagaagcaaaagaaggcctaaaaatccaggcagactcggtaattgtggctcaaatcacatatcagtcattgtttaagctttatcctaaactttctgggatgacaggaactgctaagacagaggaaaaggagttttcaaagatgttcaagatgcctgttattgaagtacctacgaatctgccaaatatacgggtggacttgcctatccaagcttttgcgactgcaagaggcaaatggcaatatgtacgggctgaagtagagtctatgttccaattaggtcgccctgttttagttggaactacaagtgtcgagagttctgaatacttgtcagagctacttaaagttcacaagattccacacaatgtccttaatgcaaggccaaagtatgctgcaagagaagccgaaataattgcccaagctggaagaaaacatgctattacaatatctactaatatggctggcagaggaactgacattattttaggtggtaatccaaaaatgcttgcaaaagaaatagtagaagataacatacttccatttttgacccatgaacctcctaatattgacatggaaggggaatccacatcccacaagggtctctcaaatgtagaacttagtccatcatcagtaggtctgcttgccaaagctgcaatcatgtcaaaatatattcacaaaagcgagagaaatgaatggtctttgagtaaggcaaaatccactattgctgaatctatagaaatgggtcaaatgattgggatggagaaactgcaagagcgcatgactgaagagtctgagatgtaccctctttgtgatgcaataggacttgcttatctcagtgtcttaagggattgcgaagttcattgttcttttgaaggtgctgcagtgaagagattaggtgggcttcatgtagtaggaacctctttgcatgagtcacgccgaattgataaccaactgcgcggcagagcaggcagacagggtgatcctgggtcgacacggtttatggtgagcttacaagatgaaatattccagaaatttaatctggacactgaatgggccgtgaggctaatatcaaggataacgaatgatgaagacatagctatcgagagcaatgttgttgtgaaacagg

SEQ ID NO: 32683 - DNA, 2038 bp, Zea Mays
ccaggttcagtgtcctaaccaaggttgtgtactggtggggtatgagagcatgttagccacgtgttgaagtccatatgtgctggcgctctaggacacactgcttcactgcatgttggccatgtctagggacgtttgctatatatatggtggctctgaaatctagttcagtgaaggattcacctggccttcggattctagccctagaccagtgtaaaagtgtggaagtccttgtgctccagttgatgccagtctcttcccagccactaggtttgctctgcacaagtgttggcacaccatcggtctgccagtagtgaccacgccggtcagtttggccatgtcgccgtggccaagacaactcagcaagagctccgagcagaaggagtgtaaattcaagacgaagtggttgtggaagaggagtttgctccagtgcctattcagcaagtggatggagctatctaactggttattgggtagaaaggtcttaagcctcttcactgcaataaaggtgatgaggagtactctatgtgttcgtgaggctggagggcgctttcagttctagaggaggattagttaggcttgtgtataagctttggaggggtcctaccttcctgctaatgtagtaagttatgcactttgagtatatcaggacttgtaataaatgtaactcttcctatgtaataaacttcagttttagaaatgaaaagaatgttttgtaaagtcttccgctcttatctccgaagtgtgtgtatcgaatgtgattactgtagtatgcatgtatggtgggagatccttgggatgatgagttcaaattgttgaactcgtgatagccttattaagttacctggtacacgtgcatagccatctgaggccatcaagggaaggattggtgcatgtgggcccgataacttgggagggcttccacaccctttgcttttcccgagggcgacgagttcgccgcgaacgactcaccggactgtccggtgcaccaccggacggtccggtgatttttagccgtacgccgccgttgagtcccgagagcgacgacttcacgcggaccagcctagcgcaccggacactgtccagtgcaccaccggacagtccggtgtgccagaccgagctgaggattggctacatagagccaagcttttcccttttcctttcttcttctttagtcactgtttctagcacttggataaccatgttagtacacaaaacaattcaccaagtctagaaacatacctttttccttgatttgcacttctcactttattttgcacattagaactcaattaaatgtgttgggcacttaatcaccaaaacattatagaaattgcccaagggcacatttccctttcatgaagacatacctagcaccttcgaacatactgaaaatgaagttgaggcgcttgatgaagtaatagccgggcacggtgacctctgtgccttgctagcttctcgcggcacagctgcagcatttatgaaggctggttgcacgcacgcaaaaatagtaaatagaccaaccttcagtctgtctccaacgtacttggttgatatccccagtgaagcccggagcatcgggaacaggtttataactcagatttgggctaagggtgggcgagagttgcctggtgacgaagcccgaaacttgcttaagccggatggcggtgccgaagattgatagtccgaagcacgttccgaaggctgttgaagcttctcttaggcctgcctgtgtagagcttagtaacatttgtattaactttgtagaaaaaactgtaatcaaggattgaacaatgttatgtataactgtccataccttgtaatatatttttaccttttcatccatgtacaagttgctttgctgtggacgaaacttgtattttttgagccgaaggcgaaaaacacattcccttctttttgtacacaacaaagcatcctgttgcgtcacatgtatacgtttgaaacgaagcttctttgtgttcatcgaagcactgtcgtcgaagatggagtatctctgttcgtgcttcatgttatgatgatg

SEQ ID NO: 32684 - DNA, 2169 bp, Zea Mays
attttccgcgcctcacgcctcgcgcctcgttgcttcttatcctttatttttttccccaacccgtcgtcggctgccggctgcggcactctgggaggaaggccccaagcccttgccgccggagacgaaccgaaacgatggtgggcgccaatgaagtgggcgggctggagtgcgagcggaagccgctggcggaggtggtcggcgactgcgtccagcgctggttccaggacgcgtacaaggaggcgcgcaaaggcgacgtcgccaaccaagtgcttgtagcgcagatgttcttctcgggttatggaacccccaagaacgagtataagggaaaacaatggatggatagggcgtcaaggttcaggtcttcagctttgaaggttggcatgaaacgtccaggatacaatgcaagtgactcggactccgatgatgcaaatgatgatgccaaccaatgacagtcagttacaaattgagttattattagttaggagattcacaggtcacggctgcaggtagcagaagacgctggaggcaggaaggccttgaatgccgcagtgcatgtgaacgaagagctttcctttgcaagttacgtttggctgctgacgggtgtgtgtccggaggtcgcggctgacaccacacgcacgtctgctggtcagctgcagctacatctatgggtccatagacgatcccgcaagtggttgaaaagaagatactaaacgacttgagggcgaccatgcctcttctcgacggcgttccaactacatccctagcaccctcattgcaagggatcacggtgctggagagcggctaatccttaggcacttcttcaggcccaaccttgtctatccatccaacattttccgacgaaggtttaggatacgttgtcacatgttcttgcagattatgcaatcaattcaactggtagatgactacttcacctagcgagttgatgctactggtttagccaatctcggtcctttccaaaaaaatgtgccacattgtgaatccttgcttatggtctaccatcatatgtagtggacgagtacatccagataggcaggttcactgctagagaatgcctcattcgatttatcgtgcactcataatagcctttagtgcatggtaccttaggatctcaaatgctaacgatattgctcgtatacttcatcaaagtgaggcacgtggattcctaggcatgctaggatcaattaattgcatgcactgggaatggaggaattgcctgatagtttggcgggggcagttttgttgtaggaacttgagtcctagtatgatcctagaggctatagccttttacgatctgtggatccgacatgctttctttaagatgtatggtaccaacaacgatattaacattctccaaatatcctcggtcttcaatcctttatggaggggcattatgccactggtggagtacaccttaaacgacacctcttataacatgggttatgatcttgttgatggtatctatccagattggctaatattcgttaaggcaattaggcacccatgggaagagaagaaagtctatttcacttaaatgcaagagagttgcaggaaagatgtggagcgagcttttggggttttacatgcacgttgtgttgttcttcgggatcctgcttttggttgggctcagaatcatcttggagaaagaatgacagcttgtatcataacacacaacatatttgtcgaggacaaggtcccacgtgcaagtaatgttgagtttgccgcaattggagtgcacgtggatctctcatcacaatccctgaagttcgtacagagtggctatgctcccaccacaacatcactagtctcaaatgatacaaccaacttcaacatgatctcatcgagcacttatggacttggcgtggagcaattggcgtaaaacccatgtgaagttatgtcgttttctatgatgttgtcctctatttgttctgtgttccattatgtttggttccctcaacctatgtattttatttcattatgtccaagtcatcattatgcttgttctaatgtttctttgtaatgaaccaattagttagctatgtgaacgaactatgcactctttttctattaatgtcactactggaaacaacttatttgccgagtgtctgaagcactcgacaaaggctttgccgagtgtgacactcgacaaag

SEQ ID NO: 32685 - DNA, 801 bp, Zea Mays
actctgacagcatttgtgtaactcagagcattcaagaactgggactgtgacaagcttcaaaatagattcttatcacgcaatccagcaaaggttatcttgtcaagcatggaggttgttgcgcaatcaatgggatttaagacacacattcgcaattataagatgagggtggaaggtctaaatgccgacaagactagccatctctcagttatggttgaagttttcgaagttgctccatcaatcttcatggtagaactacaaagagcagcaggagatacttcagagtataacacgttcgtaaataactactgcagcaaattagatgatatcatctggaaatttccaactgagaagggaaaatcgaggataccccggttatcaaagtctcattcataatctagtgctgtgtgttatcaattactatggacttaagtggatatatttgcagagtgtatcgcaattggattatgatattctaagtgtagctcttcgagtagtatatgtttgtatattcagagtccccatgtacaaagaggccgttttaattgaggtttccgtacctcgattccctgtgcaaagttttcatcgatgttttagactacacatctgtatattttgtcgagagcatcagtttcttagacaccacctatgtatcatgcgtttgttgccatctagtgtcattttgtaagatctaacttgtgatatacttggattgagtggtatggttgaaaagagtgaaagtcctttaaaaatcttagtgaaaaatacaaacttacacaaagttgatagaacatttttgagtta

SEQ ID NO: 32686 - DNA, 1803 bp, Zea Mays
taagtatgaaggataagttagattgagaaacattattagttaccataagagattgaagatatggattcagcatacgactccgatgcatctgaagaaggggatgatgatggtgatgatctctctgtaaggcagggcacaccatatactcacattcatgagatagttttctccacaatcgataagccaaagctccttagtcagctatctgcattgctatctgacattggattgaacatcagagaagcacatgttttctctacccatgatggctattctcttgatgtttttgttgttgatggctggcctgttcaggatgctgatggtttgcacaaagcactggaagcatccattctaagaaatgagggttcatggtctggttcatctcattcctcagccgctgaaagaacactgcccttccaagttaaaggtggtgagtgggaaatcgacaaacgacttctgaagatgggagggatggttgcttctggttcttgtggggacttgtatcacgggacttaccttggtgaggatgtagctgttaaagttataagagctgagcatttgaataagaatgtttggaacgagtttacgcaagaagtatatatactaagttcaacataaaaatgttgtgcgattcattggtgcatgcacaaaaccaccccaattttgcataattacagaatacatgtctggaggaagcctatatgactttgtgcacaagcagcataatgttctaaacctcaggactttattaaagtttgcagttgatgtatgccgagggatgtgctacttgcatgaaaggggtatcatccatagagacttgaagactgcaaaccttctaatggacaaagatcatgttgtgaaagtggctgattttggtgtagctcggttccaggatcaaggaggtgtcatgacagctgaaactggaacatacagatggatggcacctgaggttataaaccatcaaccctatgataacaaagcagatgttttcagctttgctattgtcatctgggagctgataacgtctaagatcccgtatgaaagcatgacccctctccaagcggctgtaggtgtgagacaggtgggtaaagaaagagtaggcgttgtagcatcttatatgctacgtgaactgtgctaaacgtactgtcataccagggattgcgcccaggacttccaaagaagacgcatccaaaggtattggacttgatgcagagatgctgggaagcagacccatctgcccggcctgctttcccagacattttagccgaactggaggatcttttggcacaggttcagggaacaccgggaaagacggcccatgctccatcaaataactcgaacacgaaagattaacccccatgcacacatacctgacgtttttctgaattcagtgatctgccatgtttaggattcgagtcgctaattacgaggaatgtagcatatcgatttttttccctggatggttttgcttgtgtacatttgaacaatcttcttggggcctattttttatggtcacctcattgttcttacataggggaaattggctcgagcgtttgggaggattacgtattatgacaacggctgataatttaccgcctacaacatgggtggatatttttcatgcattattatcccagtagctgccattccaagaaaggcataatgctttactcgccttaggttccttttggaatggacactggcgtgttcagctccagtggtcaaagcaccactccctcccgtttagaccttgttcgattgtttccattatagattacatgagattagaaaaaaattatgaaa

SEQ ID NO: 32687 - DNA, 3383 bp, Zea Mays
ccgcaccccgcagcgccgctcgccccgcccggagcacccccgcgagcctgcgaccacgccgttgtccagccgccgctccgccgtttgtgaagcacatttgtgaagcagacaagctgtgatttgtgatttgtgaccctaactgtgatttgtgaagcagacaagcagtgaagatattcaagatgaaaagattttgaaacattttcgaggcttaagaactcggaagataaatttacctcgcaacatcaactcatgctataacctctttttctctcaggtggtccttttcatcggcttgcaagcattcttgccacggagaatcagagaggtacggtgcttgattcggagcattgttgattactgtggaaatgctgggtcagagttgtttgagttggctcctatgttggtcagcaatttgggtcagtcaatgaccctgttacaagtttatgctgcagtcatccgtatttttgtagagtcttcgatgtttgaggacgctcttctcacttatattcaggccaagaacattggtgttgacagacgtttgtgcaatttcttgttgaagtgtttagttgaggggaatcaaatcatgtacgctaggagcttatttgatgacatgaaaagttgtggtccttcacccaatgtctgctcttattcaattttgatgagtatgtacacacatggagagagatcatgcttggaggaagcttttgagcttctttgtgaaatggaatcaaatggtgtgagaccaaacgctacaacatatggaacttatctctatgggctttgccgttccagacaggtaacatctgcatgggactttcttcaaactctttctcagagtggaggcccttgcagcaattattgtttcaatgctgtgattcatggtttctgttgtgaaggtcaggttgacaaagccatagaggtatttcatggaatgaagaaatgtgggtatgtaccagatgtccatagctacagcatattagttgatgggttatgcaaacaaggggatttattgaaaggttatgatatgcttgaagaaatggcaagaaatggaatatgtcctaatcaagtgagttacagttcacttctgcatggcctttgcaaaactggacaggttgcattggcattgaagattttcaagaatctccaagaccatggttttgagcatgaccagataaattacagcatcattcttcatggctgttgccaacacttagatctcaaggccatctctgacctttggtttgacatgattcatcataatatcgctccagatgtttacaactataccagtctgatctacgcattatgtagacatagaaacctccaagatgcattgggagtgtttgagctcatgcttgaaaatgggttgtctcccaacatcgtgacatgcacaatcctagttgacagctttagcaaacaagggctagttggtgaagctttcctattcctggatagaatgcatcagtcattgggaatcgtcccaaacctttgcatgtacagagttatgatcaatggcctttgcaagaccaacaaatatagtggtgtgtggaatgtttttgcggacatgataaagaggggctatgttcctgatgttgtcctgtacagtattattattgagggcttcgtgaaagctctgaagttgcaggaggcgttaaggttgtaccataagatgttggatgaaggtgtaaaacctaacatatttacgtattctagcctcataaatgggctgtgtaatgatgatagacttcctgaagctatgggattgattagggatatgattggggaagacctgttacttgacaatgttttgtacacatctatcattgcttgttattgtagacgtttaaatatgaaggctgctatggaaatggctcaaagagatggaaagaagcggtgtgttgccagatgcttttgtatatacttgtatgattgatggctatagtaaacttcctgcaatggatgctgcacgcttgatgatggaagaaatggaaaaaagaaagcttaaacctactatagtaacctacacagctctcattattggataccttaaaatgggggatgagaaggaagcttgtatgatgtacgagagtatgcgtcatgtaggcattgctccagatggaaagctgtgttgcattttgggcattggcaatgacaggggtgattgtgatgattctcagaaagcgaagggtgtaacataattacataattttcacagagatttattaacttgatgaagggacttctctatgatggctgaatggctctgagctctccagtgcaggacacactgtttgctccatttgtttcctccacttccacactgccatcctatggacaaggaatggaaagcagtaacctgaaatgtggcagttaaatccgtggacaactgctgagggtgtgaccgatacagatgaacacacaataccatgactccggcaaaatactcccatattttgcttgaagatttactgacaattaatatagaaaaagccatggatttggatgtacccatgtaagtttttctcctgacaaagaaacacttaaattccatttatggtgcaactttctaactcactatttgtgttgcagtttgctaaatatattgcattttcagatgatgacaatagtgtcgtaaatcaatagcaaaggaactcaaaaatagatgttgaatcttcacatgaggctcaagcaaatctctggaacacaacttcctcatgaaagaaatattgtcacaggctcaaacaaattcgattatgcagatccacttacatgacaagatgaagggccagcaactttagtttgctgctaaatttcatctgcgtccgtttggtcgatgggcaggttcgatggagattgccgccgttggcgtttcgatcgccatatttaaccaagtctccaaggtccatgaacatcaggacactgcagcagggtccggatggtaaagatcaaagcaaatatcaacatctatagcatgacacaacaggatatgataagattgaaaacgccttcgataatgctgtccgaattaataactaagtggattgttatatatgcccaaatgtgaagtacttaagagaaggtgctttcattaatgttgatattgaaaaggggatacaagatggacagcagttggcgacgaagcaactgttgtaaagaagcgtccacacggtggcaggacctcaggccgttctttgcacggcagagctcgggagcaggtgtccccagtttgtgtgagccacggcagggccggagtggctgcatgggagcaggtcgtcgcaaggcctcgactatttcctttccgagaattattcatcttccggtactgtgtgtcgttcaaggcaaccgtctcaacattcaaccagggttacgcaaccatttgttga

SEQ ID NO: 32688 - DNA, 843 bp, Zea Mays
atatgcatgcagacacaaacacccctgcatcactatagctatacggagacagtaacccaagattcttcacctactggacaactgacgcgtaccaagaaaccgggtgctacaaccacaattgccgcggattcgtgcagacgacgaacaagattgcaattggggcggctatcaccccggagtcggtgtacaatggcaggcagttcgacatcactctcatgctatggaaggacccaaagcacgggcactggtggctggagctgggcccgggcctcgtagtcgggtactggccgtcgcacctcttcagccacctggctcgccacgccaacatggtgcagttcggcggcgaggtcgtcaacacccggccgtcggggtcgcataccgcgacgcagatgggcagcggccacttccccagagagggcttcgaccgcgccgcctacttccggaacctgcaggtggtggactgggacaacaacctcatcccggcggccaacctgaaactcctcgccgaccatcctggatgctacgatatccagggaggcactaacagctactggggaagctacttctactacggaggacccgggaggaacgccaaatgtccctgagatcaattcggaccggatgtctctttcttgttcgatgttcttttttcgttgccctttctaggatttggtaggtcttatacgtctttaacgaaagaatgcatccacggttgagacttgggaggaatttgtaaatttggcaagtacctgttatatttaatatccctatggctcatattttattttatttatttaaataaactctaggtacatattccatatatttggttgtatgcacgag

SEQ ID NO: 32689 - DNA, 3624 bp, Zea Mays
atggattcctcagccgcagatgaccctatggcagatgaagccagagtagaagatgccttcacacaggagatcaccgattattcgtacgtccctagataccatgtgttgagttggatggaaactgtggaggggatggtggccggtgtggcggcgcttccgccggtgtatttgatactgaacagagctcttcttcgttgcccatgccaagatcttcttgagacgggatggggatggaagaggctggtgccctacagacctggttatgttgagtggcatgtgttcaagaaataccttggggactatttcgaccataatcgtgaagcttttctttgtgccgagcagaagcctgatccatttggatggattattgctaaaaagagtgccctgattgctgcagccaaattgttgcaaattaacttgcaccattgcaaaaacaatcaaaatgctttccagtgcctcaagatggagaaggcacttctcaggtactgtgctagctttctcactcctgacgacaaaaggttgatcctccggatcaaggaccaggcaaagcaaatgatccaatcagagggtgatcaatctttggttgtaactatatgcttggaggttgtcggtgccgagcgcgcggtcgtcgtgcagctcgtgggaccagtccgccgagcggctgctagaggcggacgcagccctcgtgcggaagaagtgcgccgagaagagcgcgccgaggccgaggacgccgccgggcagcaggtcctccagcgcggcgaggtcttggtcttggtcttggagcagggtcttggtcttggagcactgcacgaggagcacatcggcatggtgcttcaagcaatggttcaaatgggtgtccttgttcctactggagatatgactgttgtcagaagaaccgctcaatttttccttaatagctttcaagagtgcctaacagcacaaaggaaggagagagaaatggcaaccgcagaactgggtttcaaaaagcaattaactaaggaggagaagtttgaaaagaggaagcagagacttgctgcaatcggagaggatcttttggcgattgctgctgatcaaccatttcgcttccctgccacatttacatttgtggtcagagcattctcagttctagatggtactgggaaaggccttgatcctaggtttcatattacagagattgctaagccaaatgccaaggaattgctaagatttaatgacgctggtgttgaaatagttgtgaaggcaagtttcaacatttggtgtgtggagagacatgtgtattcctcctatgacgaattccttaggctccatgaagtgtatcaatttgtcttagtatttttattcgtggggatgcctgactcaaatgaactcatgttcaacactgagcaacctacttataattttggagcctataaaatttctaagctaaaaaaggtaataaaaaggaatgatattatagtcacatcatctgaacaacagtgaagggaagggagggatagatggtctgaatgcctataaatgtcgttcccttggtctgcttcttaaatttgaaaccaagatactatagtcaaatacttctaaacttgaagcctgtaaattggaatcaccaagttaaataagaacaggggtaactattcatagctcagatggttgtcatccaatacgtgcgctaaggcacagacaggtgaggttgcatattcaatccccaagacagtaaaccattgaggcatattaaaacacattttccatgaggtttcctaagtgatcctttaggtaaacagaaccatacctagctccatatgaaactatttcccgatttgaagtacacctaagttaaggttcatacattggagctctggcagtaaaacaatagtccttaccttgagacagcttagattagaatgaggtggatggtaatatggcatgagcaacataccacagttcatgcatggaggaaatcatttttactttctttcctagccatggtagttgtgttgctccttaccaaggcactacatggagcatcatatggttcatgatgtaaacatggttttagatctgtctatactcacactcaagaaccagccaaaatgtgatattccacaacctgagagaaatcaaaatgaaatcatgtacaacatagtacatatgatgatgtgcggtgatgcgggtgcatgtgtgttgtgtgtgtaggagaggagggcgcagcttgattcaatccatgtcaagtcagaggctgctgcgaggtttgcacatgcaagtagaatttagatgatctctgttaggcatctaactgaataaatgatctccattatggactggttatattattttctgtgcgatcggatgggttaaagaaaagacgtgaaatggtattttccagtatggactgtataaatgtaattatattcctatgctggtcctgcttcgctttcatgtggatttatcttgcaaatggtatgtggatccgttccagaggcaatgagccttgcagccagtttgcagtataaaaaacccaattatgtccactgttggttcgacgcagcgtgtgccgaggatttctactgccaagcataagaaagagattgttcttgtcaccccaaaaatgttcccattctactttcgggcaggtgaattgcagataaatggtctgttcgcaactggtgctctcgggcgactccatcactgagcaacccttcgccccggtggctgcggtgtcgcactggctgacacctgctcgcagttgcattacaagttttactgactatgtattttcaggtttattcaatttcagttgtaatgcttctgacagcagttgtatcagtcctcttgttcagcttccatgtatccctcgcatccttccttggatccacataagtgttaatgataattttgttgcatctcctctgctgatcagagctttcaaactcatgacagaataatgtactaaacttcagtttggtgtctatctcagtgtacctacactcagttggaaaacttcaaccacactgcaacaaggtttataaaaggtactgttactattgttaaaattagtcattttagctatccgcttctatttcaccgtgcttgcaggtttgctatgaggaaaaacaaatttatgggctcaaacaaagtgtgatagtgaaagtcattttgcttccagcttaagaaccaagccaagaaaacagatatcaactgtgacgccacactcaaaagcttgtttggtgagagggataaggttgggatgctggagatctctaagcttttgagccgtggcttcccgaaaatctccaagcttttgtggtccatggagccagggatggctctttggtaaaagacttcgttgtggatggcctcttttatggtccatgttaagtcccaagtcccactaggtggttaagcagaaaaatcttgtgatggcattaagactttcagactttgtttttgggtctgatgcatgtaaaaaggattcccagtgtttctgttgctcttgcgatcctgtgaggacacatatgagagaaatatttagtttgttgatggcaaatcttgtcttatgttcatgcctgtacctatctgatcaagcgttatgatatgatcccatgcgtggtactgtgttctttagagatg

SEQ ID NO: 32690 - DNA, 1551 bp, Zea Mays
gtcggtctagagaacgcgaagcgcctcgccgacgccgaccgccgctccccaccaacagttcaacaccaagccggtccacccttgcaactgcgccatgccttccccctccaactcccactcttcgtcctccaactccagcgaccgcgacgatgacggcggcggtggtggaaacggccgctcgtgggccgcggctgagcgcgtcgcctcgtatctccggaaccataagtcggtccacgccgtttgcgagaagctcggcgtcgacaccaaggcattcaccccgatccccgccggcgaccgacgcgcgtgctcgcccccacccgctggatccatctgcgtgtacgcggacgcgctggaagccgggatgcgcgtcccgctcgaccccttcttctgcgagctgctctcgcacttcggtgtcgccccgagccagctcgcgcccaattgctggcgcatcatggcggccttcctcgcgctctcccgctccgccggcgtgcacccgccatcggtccccgttttcctgcacttcttcgcgctgcgcgtgctgaagaacatgcgggcagagaaggcagccgccgaagcggcggaagcagccaaggtcgccgcgaagagtgaacctggctgcagcgcgtcgccgggctggacgccgttgtccgggaagaagaggccggcggaagacaacacaagggaggccactggtcacgggtcggcgtctgtcccgcccggcttctccacgcgccaaaaacgaaagctgcagcacgcaccggacagacatgacggcgacacggtcgagtgggaggcggcgcggcagcttctgcagggcgtcatcacgccggcgcgggagcgcgcgttcttgatggcggatcccttcagcgtcatcgcgacaagctacatcgcgacgctccaggcggcgaactacgcgacgttctcgttggggcacgcactgaagctccatgaggagctggagaaggccaaggccgagctcgcggaggcgaagaagacgacggaggccgagctgaagagcgccaaggaggcggcggtgcaggagttcctgggctccgaggagcacgagcgccggctggtggaggaggcgctcaaggggtacgagcggggcttggaggacatgaagcgcgtcgcgctgcggctccgccctgacgtcgacgcggctcagctgttcgtgcctcctggcgggtttcagtagctgtgccgttttcagccatagtgaaacttgtgtaaaattctacagtagctagcaggctcccttccacgattagttcatcttgatccaccttgatatggtgatgatctgttttgaaccaaatggccgttctggttcgttcggttagaggtggacaagccctgaggaagttcaattccatggtgtggctctgtaactatactagtgcttgttgttgtgacctaagaccgcccccagtacctgcctcgcctccggtacccgtacgatagtacaaaatattgttctatactttataatatttatagagttaagtttaaatgtgaagatggataaactgctagagataatttaagttttcg

SEQ ID NO: 32691 - DNA, 1625 bp, Zea Mays
gttcaaggggaggcgggggagccacggcggcggagggaattgtttaatcccccgtcaccgtctcctatcgccatcaccccacccgtcccccttggtccaggcgcaggcgcgagcgcgacgtccggcgtccggcttcggcggcggagtggagcgatcccgatccccacaaggaattccatcgctgtcgtggcgtttggtggcgctcctcccggccggcaagcaggatcagtcgacgccctcttggcttgcctttggctgtaggaaatcgcacggaggtgaggatacacgggtgcggaacgagagctaggcgaacctgtctggtacctcgcggcggagatggacgagaaggcgacgatggagagcaagctgtcctcggcggcggccttcgtggaggggggcgtgcaggacgcctgcgacgacgcctgcagcatctgcctcgacgccttctgcgacagcaacccctccacgatgaccaagtgcaagcatgactaccatcttcagtgcattcttgaatggtgccagagaagctcccagtgccccatgtgttggcagcatatcagcatgaaagatcctatgagccaagagctactagaggctgttgaacaagagaggaacatccgagctaatccttcacgtaatactgctgttttccaccatcaaatgctgggtgattttgagatccctgtaggtgcagatgatgcagaacttgaagaacgcattattcagcacttggctgccgcagctgcagtgcgtaggtcacaccgtcatcataatagaagagatgggcaccagagcagatcagaagcaagtagccacccacagtttctggtgctctcagcagacgagcgcacaatctcaggtcaagaaggggactacgaacaagcatctgctgtagcttctggccgccctttacgtacacttgttgaacaagaacgcactcgagggttagcggatgcttccagtccatctctccgttgttctactcctgctgatagtactggtagatcaaacaataggatttctgggatcgaatctacacctgtggatcaagacggaactggaccatccgctttacaatcaatggtacagggatttcataatcaaagtgcaagtggatggagggagaggtggttttctcggagcaactctttactggatcttggttctgaggtgaggagggaggtcaacgcggggattgctgcggtgtctcgcatgatggaatggcacgatgcaagggacgggacgggagcggggccttctcctacctctgcatcaagatctggttctcagtgaaacactctgcacttgaaaggaccgatgcaaatgtaaagattaagagcatgcaaggctagatgaagcagaggtttgacggcacggaggcaaaacggccttgtcacgtggccagcccatctcgaattcctcgaagcaggcaagtagtagaagagcacgtgcaagcgccagagacggggcaatgtgtatagggatggagccagacagcgcgcaaaggtgcgccgccagtgacaatccgcaacacagccagcgcggttagtagcgagcgtgacagacacgaggacgacacggcctgcgcgcggaaggagacgtggatggaggtagggctggaaatg

SEQ ID NO: 32692 - DNA, 405 bp, Zea Mays
agccatatataaattttgttattttaatttagttgtttcactactacattgcaaccatcagtatcatgtagacttcgatatatgtcatgatttgcatggtctcatcattggagagcacgtgccacacctaccggtagaagttccgtcgcacgtcgttagtcatcaggcacgcaccaccatacacgcttgcttaaacaaaaaggcaagtgtgtgtaagggtagttttacttattattactaaggtttggtatttacttatacttagtaattgctaataaaatcttgaccaactttgctcagcttcaacctttattttgttgatcagccttacacttcatatgaactcccacctttggtgagttcatgcgtattatttcccacaacttgttgagctatgatcatgtg

SEQ ID NO: 32693 - DNA, 4472 bp, Zea Mays
gctcgctccccgtccctgcccactcactcactcaccttcgccgggaaaaaaaggaggaaaggaaataaaatactccaagccaagagagcggcaggccgcaggggcaccccccacacccacaggccatccttcaccagcacacactcatctcccacacctagcctagccttgctttgtcctcctccgtctcgctctcgctctccgtctccattcccacccaccaccaaacaccaggcccaaaggaccccccgccttcccaactaagagcaccagcgcagcggggagggggaatcagggcagcaagatccgagcagcaggagtggcaagcagcatttgtagccacagctcgctcactcaattgcagctagccgcggttgcggttggactggatcggcggcagggcagggcagggcagggcgcgcggcggtggtggtagttgcagaagtgacggtcaagttttcctcgctccttgcttcggccgagactccgcctgacgctactaccaacatctccacctgaatccatctctatctacctcgcacgaacgaacagagacaggggaggggagggggggaattgaagtgtaacccaaggaaaggaaccatgatggtgtggcaggcggaggaggaggattgatccatccgtcaacccatcagacccgtccatccatcggtggtggtggtggtggctgctgttactcgctatcaccatctgctgctgcctgctttagtcttttgcttcacttctcttctttctatccttcctccccctgtctgtttgtctgtcttattgccctccctgttcttgttgctgcttgcattgagaaaagagagagagagagacagagagagatagaaagtggttgctagttgtatggtcgtccggtgggcgcgatgaccatggagcacggcgaggattgctgcgtcaaggtggcggtccacgcgcgccccctcatcggcgacgagaagctgcagggctgtaaggactgcgtcgccgtcgtgccgggcaagccgcaggttcagatcggcagccactccttcaccttcgaccatgtctacggcagcacaggcacgccgtcggcggccatgttcgacgagtgcgtggcgccgctggtcgacggcctcttccagggctacaacgctacggtgctggcatacggccagaccggatcagggaagacgtacaccatgggcactgcctgcaaggaggggtcgcatatcgggatcatcccacgagccatggctgcgctgtttgacaaaattgagaacctgaaaacccaagtggagttccagttacgagtatcgttcatcgagattctgaaagaagaggtgagggatctacttgaccccactgctggtaccgtgggcaaagcagagaatggcaatggccacgcaaaactgtctgtgccagggaaaccccctgtgcagatccgagaggcgtcgaatggagtcataacgctagctggatccactgaggtgcatgtcaccactcagaaggaaatggccgcatgcctcgaacaaggttccctcagtcgcgcaactggaagtaccaacatgaacaaccagtcaagtcgttcccatgccatcttcacaatcacattggagcagatgcgcaaaatagaccccatcatgactgcagatggaatgcctattgaagagatgaatgaagactatctctgtgccaaactacacttagtagatcttgctggatcagaacgggctaagagaactggttcagatggcctgcgcttcaaggaaggtgttcacatcaaccgaggacttctcgctctcggcaatgtcataagtgctcttggagatgagaaaaaaagaaaagaaggtgctcacgttccttatcgggacagcaagctcacccgtcttttgcaggactccctaggtggaaatagtaagactgtcatgatagcttgcataagtccagcagatattaatgctgaagagacattaaacactttgaaatatgctaaccgggcacgtaatatccaaaacaagccgattgtcaatagaaatcctatcgctgatgagatgaaaagaatgcgccagcagattgaatacttgcaggcagagcttgtttcggctcgaggaggagccacatcagatgatgttcagggtctcagagagaggatttcatggcttgaacaaacgaatgaagacctctgcagggaactatatgatagtcgcaaccggtctcaaaatgatccatgtgaacctgaaatacaaaggactttaaacggctttaccaaaagcgaagggctcaaaagaagcttgcaaagtacagatccatttgatgttccaatggctgactcagtaagaggcaaccctaaggatattgaagatgaagtagctaaagaatgggaacacacaatgctgcaggatagcatgggcaaggagttgaatgaattaaatcgacaacttgagcgaaaagagtctgagatgaaaatgtatggatgtgatactgttgcacttaagcagcacttcggaaagaaacttatggagcttgaagaagagaaaaaagcagtacagcaagagagggatagattgttggctgaagttgaaagcctaagtgctgatggccaaacacataaactccgagatgcgcagctgcagaaactaaaatcccttgaagcccagattctagacctaaagaaaaagcacgagaaccaaattcagattttgaaggaaaagcagaagagtgatgaagctgctaagaaactgcaagaagaaattcattttataaaagcgcaaaaggttcaactacaacacaaaattaaacaggaagcagaacagttcaggcaatggaaagctacccgcgagaaggaacttcttcagttacgcaaggagggacggagaaatgagtatgaacgccacaagcttcaggcacttaatcagcggcagaaattggttttgcaaaggaagaccgaagaggctgctatggctacaaaaaggctgaaagagatattagaagctaggaaatcttccgcccgtgacagttccgctggcagcaatggtacatctcaaggctataatatgggtgagagatcgctgcaaaaatggtttgatcaagagcttgaagttatggtgcatgtgcatgaagtccgaaatgagtacgaaaaacaaagccaactgcgtgctgcgcttggtgaggagcttgccattttgaaacaagaagatatacgggctggtggatctagtccccaaagagggaagaatggaaactctaggacaaataccttgtcaccaaatgcaagacaagctaggatagcatcacttgagagcatggtgacaatctcttcaaacactcttgttgcaatggcttctcaactctcagaagctgaagaaagagagcgtgccttctctgggcgtagtcgttggaatcaattgcgatcaatgggggaggcaaagagcttactgcaatatgtctttaatgttgctgctgatgccagatgccaagtaaaggagaaggaagtggagatcaaggaaatgaaggaacaaatgacagagctggtgggcattcttcgacacagtgaatcacgcagaagagaaatggagaagcagctcaagcaaagagaacagacaactccaatggccactacacctccgaaaagtggaaatggcacgacgaagcactctgctgatgaccccaacacaccactgtcccctgtcgccgttcctgcacagaagcagctcaagtattctgctggaattgtaaatagccccagcaaaggagttgctgcgataaaaaaagagcaacttaagatggttccaattgcacagttgtctgcggggaagagagtttcaatagcagggcattcaggaaagctctggaggtggaaaagaagccatcaccagtggctgatgcagttcaagtggaagtggcagaagccgtggaagttgtctgaggtgatacgacacagtgatgaaacaatcacgaggattaggcccagacctccacttcttccacataaacctcataactgatgtgaaacggacttgtttttgtctcaacaagaactgacacggtttgcaaacctacacagctaactgcctgcacaagccttcactgacggtgacatgtcaatagttggtgttcgtcttcacaaaggaatctgtcaaaggaaggcgccttgtaaagtctttcttgtgctgttgtgtgatagttttgtgtgaagggtaactgaaagttgaatgggttttgtgctcgagtgatagtctattttcccctcttcttttgtttgttgatactaaaatgagaaaagacaagtgatattggtttggtttgctaggagtattgtgatgtaatgcagaaacttgttcccctatatcagtacacccttttaatctatgtattgtggagtactgattgctgactactgttgatgtccgaagggatccggattacacaccgcacgtcttcggttgacacacgacattaaatacagcagggaacatagaggatgg

SEQ ID NO: 32694 - DNA, 3872 bp, Zea Mays
cttaaaccaaacacgcgctgccaccgaccgatcaggcgaccccgctccaagaggaaatccaccaccgcggccggggcctcccagatctcgctggaggcagcggcagcggcggcggtggggggcgatggcgctcaacatgaagaccctgacgcaggcgctggcgaaggcgtcggctgtcatcgagaagacggtgtccacgacggtgcaggaggtgacgggcccgcgcccgctgcaggactacgagctgctggaccaggccgggtccggcgggccgggactcgcgtggcggatctacacggcgcgaccgcgggacggcgccccctcggcgccctaccccgtcgtctccgtctgggtgctcgacaagcgcgccctcgccgaggcacgggcgcgggcggggctgtcgaaggcggccgaggacgccttcctcgacctcgtccgcgccgacgcggcgcggctcgtgcgcctgcgccacccgggcgtgctccacgttgtgcaggcgcttgacgagaccaaggccgccatggccatggccactgagcccgtcttcgcctccgtagctaacgcgctcgggtgccttgacaacgtcggcaaggtgcccaaggagctcaagggcatggaaatgggactacttgagattaaacatggactgctacaagttgcagagacgttagattttcttcataacaatgctcatcttgcccatcgagctatatcgcctgagacggtctttataacttctaacggatcttggaagcttggtgggtttggttttgctctttcagttgatcaagccacaggtggtttgacttcatcacagctattccattattcggactatgatgtcgaggatacagctttgcctcttcaaccgtcgttgaactatactgcaccagaattggttcgaagtggagattctaaagttggctctgcttgtgacatgtttagctttggatgtctagcttaccatctggttgctcgtagaccacttctggactgccataacaatgttaaaatgtacatgaatgccttgacatatttaacaagtgaagccttttctaatattccttctgatttggtatcggatttgcaaaggatgatatcgatggatgcagtatcgcgtcctagtgctgtggcctttacaggttcttctttcttccgggatgatacgaggttgcgcgctcttcgtttccttgaccatttgcttgagagagataatatgcagaagacagagtttttgaaggcattatcagatatgtggaaggattttgattcccgagttcttcgatataaagtatgttcagtactgcaatccatccttgtcttcttccgaccaatgctacccccatgtgtccactctctgtgagcatcattttgttatgtaccacttcattgaagctcctgaaacctggatatgttaaattatacatctacccagatggccagattccataatgtttggttgctatcagcataccctgtatggagtattggaaataaataaaataatatctaaacctcaatttctagatcttaaacttgtcacaatatgaatcaattctctagttgacacattccgacattgtgtttctgttttttttctgtttgtgcttttcaaactgttttgtccaggaaaaagaacagccttatatttatttgatccattggttatttcaaagctgactcacactttgcaaccaggttcttcctcctctttgtgctgagttacgcaacatggttatgcagccaatgattttgcctatggttctaacaatagcagaatctcaggataaaggggattttgaacttgcaacactgcctgcgcttgttccagtgtttacttcagcatcaggtgaaactctacttttgcttgtgaagcatgcagatctcatcattaacaaggccacacaggaacatttgatatcacatattcttccaatgctggttcgggcttatgatgacaatgatccccggttacaggaagaagttctgcgtcgaacagtatcactgtctcgtcaacttgacaccaagctagtcaaacaggctgtgcttcctcgtgtacatggattagctctaaagacgacagttgccgcggtgcgcgtgaatgcgttgcgctgtttaggagatcttgtgccatccctggacaaagaaggtatattgggtatcttggagacggttcggcgttgcacagctgttgaccatactgcgccaactcttatgtgcacacttggtgttgctaatgcaatctataaacaatgcggtgtggagtttgctgcggaatatgtgattcctctcatcttcccattactcacagcacatcaactgaatgtacaacaatttgccaagtatatgctatttgtcaaggacattacaagcaagatcgaagagaagcgtggtgtgactgttacagataatgggaacacagaggtaaaagcatcaccttcattggcaaacgggatccattctgaacctatgccaggacaaataccagctgcaaagagcagccctccatgggatgaagactggggtccttctaagaaaaccggtgttccatctctctcagttgattctagtgcacagacaaagcaaccctcagtacacccttttgacttcagtactcaaacaaagcaatccacaccactcccctttgatttgagcacccgagcaaagcagccatcattagtttctcatgctacagcagctacaatcccacctgcgcaaccacaaccagtacaatctcttgtgcccagttcaggacctcaaacttctggctcatgtgcccctgttgacattgagtggcctcctcgaagaagctcgtcatccgacttcaatgcatccttgtctattagcaaggagaatgaatctggaaggctatctagcgacggacttgacgatattgatccttttgctgattggcccccaaaacctagcaatgttactagcattacagcaaccgagcatcgtccaagcataaatcaaaatatttctggatttagctcaggtaacatagggtttggtggcagcgggaattctatagggcaagcgaaaagcaaccaaatgagctggtcaaacacgcctaatctgatgggcatgaactcaactggcagctatttgaatcagggcagtgcagctctaggttttggaaatccaattggaggattgagcactggcctctccaatccaagcagttccagtacaggcctgagcatgatgcaaccaaaatctgattttggatcactgtccatgtctgccaataatgccgcaaatggcccacccagacttgcccctcctccatctacttcagttggaagagggcgtggtagaaatcaaggacaatcagcactctcccgagcatcaaggcctcctcattcgaactcgtcatcaggacaacaacctatcctggatttactttagtaagagaggcttgcctctattcttggcgatgacgattgtcaatgtgtacatcttcaaacctttgtaagaggttaccttctctcatgcgtagggttttgatttgggcattgaggctatcttcatattggtgacagaagaaatgtcgttgtgtatgtttctgtctaaaatcggctgtagcttgtagagttgatgaatatagttgacatgcttatctggactgtgaagttttgaatgtttacataatgtttcatgtgccttatatgtggtccctgcccattttctccccgctccccaacatcatgtaattcattagttaaggctcgtgttgtgtatacttagtctgtcgagtttaaggccaatcggcaattctgcttctatacagttgtttggttgctggtaggatcaccactgttatgttatgataccccacaactgtgtgaagtcgatcttcatgtttggtc

SEQ ID NO: 32695 - DNA, 2697 bp, Zea Mays
catcactgccccgctcgggattccttcctatcgctgccgctgcaagccgttggtaacgaagctgcgataatggtgatggggctggggtcgaagcgtagggtggcggagggcggcacggagcccgaggaggagtcctcggaggagtacgaggtggaggaagtgtgcgaccacatcgcctcctcccgtggcagccgcctcgcgctcttcggctccgacctccgcctcggccgcttccgcccgcgccggcgcaggcgccgcccgctcgccggggaaggcgccgcggagggcttcctccacgacctcgtcatccaccccgacaacaggcttgtggaagtaaagaagaagtaagatacctgctgtggattcgcttgacacgggttaccaaggtcacagaattcttctggcgtttagagaaggacatacgtatcaactacctcttcactaggatagtgaagctcatagttgtggagctctactgtacgcacacagcagcctgtatcttctattacctggctacaacgcttcctgaatcaatggaaggatacacgtggattgggagtctgcagttgggggactacaagtttacacatttcagggagatcgatcttgccaagcgctatataacatcgttatacttcgccattgtcaccatggcaacagttggttacggtgacattcatgctgtcaacatcagggagatgatattcatcatgatctacgtttcctttgacatgattctaggagcttacctgattggtaacatgactgcgctcatcgtgaaaggctcgagaaccgagcggtttagggacaagatgaaagaagtgatcaggtatatgaacagaaataaacttggaaaggaaataagggaacagatcaaaggacacttgaggttgcagtatgagagcagctacactgaagcgtccgtccttcaggatatcccgatttctatccgtgcaaagatttctcaaacactgtataagccatatgttgaaagtattccgttgttcaagggatgttccgcagagttcatacaacagattgtgatcaggttgcaagaggagttcttcttaccaggagaggttatattggagcaaggaagtgcagtcgatcaattgtactttgtctgccacggtgcactggaaggtgttggcatcggtgaagacgggcaagaagagactctgctgatgctggagccagagagctcctttggcgagatctcaatcctctgcaacatcccgcagccctacacggtccgcgtctgtgagctctgccggctcctgcgtctcgacaagcagtccttcaccaacatcctggagatctacttcgtcgacggcaggaggatcctgagcaatctctccgagagcgagtatggcggacgggtgaagcagctggaatcggacatcacgttccacatcgggaagcaggaggcggagctcaccctgcgggtcaacagcgccgctttctacggcgacctgcaccagctgaaaagcctgatccgggcaggggctgatcccaagaacaccgactatgacggccgctcccctctgcatctggcggcttccagagggtacgaggacgtcgtgcaattcctcgtcaacgaaggcgtcgacatggaccttaccgaccaatttgggaacacgccgttgctggaggcagtgaagcaggggcaagaacgggtggcagcgctgctcttcgccaagggcgccaagctgagcctcaagaacgccggcagccacctgtgcacggcagtcgccaagggagactcggacttcattcggcgcaccctggcctacggcgccgacccaaactgcagggactacgaccaccgcacaccgctccacatcgccgccgccgagggcctgtacctcatcgccaagatgcttgtcgaggccggcgccagcgtgttcaccaccgacagatggggcaccactccgctggatgaagcgcgaaagtgcggcggccgcgtacttggggcgctgctggaggaggcgcgggccaacgagctggctatgttcccagaacgcggcgaggaagtcagggacaagatgcacccgcgacggtgctcggtgttcccgtaccacccgtggcgggcggccacgggcgaggagcggcgtattgagggagtggtcctgtggatcccgcacaccattgagagcctggttgcgttggcgcaggagaagctcggcttgccgggcccggcttcgcggctgcggttgctgcgcgaggacggggccagggtgctcgacgtcgatatggtcaatgacggccagaagctctacctggtcggaggcgaggacggcgatcagaaatatgtagaagaaaacggaatcaagtccatcgtccctgctggacactgtacagaactacaaattcgcaattatgttagatgtgaaatggaaatgcaatgtgaagcaaactaaacaggataatccattcccgcgccgtcctgtgccgccgcagatggtccttgcagaccttggtgcgccgtcagctcgtggcgtcctgctgataggcactccgacccggcggccatccctgttgtgtttgttatatgggagaagccagtaataaaaccagtgttttaaaaagtgggataagagatttatcctcaggcttctcaaaagtgtaaatatcgggatatctgaatatagtgagatatatcgaactaaatagtataaattttcgctgctaaaaaag

SEQ ID NO: 32696 - DNA, 3820 bp, Zea Mays
gctcgcattgcctgcctaggcgtccaggcggagttttggagtgccctgtcatctcgtgcacggtacgaactgctaagacttgataaacagacccttattgagcatgctcgcaagaatttgtactgttcaaggtgcaacgggctgcttttggaaagtttcacacaaataatgatgtatgggaagtcactgcatcatgaaggttcgtgtgagccaaggattcaggaagttgaagcagaagttcaggacccttcagttcatccttggggaggcctttcgacaacaaaggatggcatcctaactcttcttgattgcttcataaatgcaaaatcacttcatgagatccagaatgtatttgacaatgcacgtgctagagaacgtgaacgtgaaatgctttaccctgatgcatgtggtggcggtggcagaggatggattagtccagtgatgcctaactatggcaggggccatggaacacgagatacttgtgctttgcatactgcacatctttcttgtgacactctagtggatttttggtcggcactgggtgatgaaactagatcatcacttttaaggatgaaggaagaggacttcattgaaagactcatgcacaggttcgacagcaaaagattctgcagagactgcagaaggaatgttattcgtgaattcaaggaactcaaggaactaaagcgcatgcgaagggaacctcgctgcactagttggttttgtgttgcagataccacatttaactgtgaggtgtttgaggatgctattcttgttgattggcatcaatccttattggagcaagatggaatttaccatcatttcgagtgggctattggaacggatgaaggaaaatctgatattctaaactttgaaaatgtgggcatgattgggcaagtccacaggaaaggccttgatcttgatcagtttgaagactattttgttacactgagagcatgtaggctggatggccgccgtacagaattctgtgtgaaggcccatgccttgaagggccaatcttgtgttcaccggaggctaatcgtgggggatggatttgtgacaattacaaaaggtgaaagtattagaagtttctttgagcatgctgaagaagctgaggaagaggatgaagatgatgtagtggacagagacagcaatgaccctgatggtgatatcgctcatccacaaaagcatgctaagagccctgaacttgcaagagaatttcttctggatgctgctgcagtgatcttcaaagaacaggtcgagaaggctttcagagaaggtacagcgcggcaaaatgcacatagtgtttttgtgtcccttgctctaaaactgttagaagaacgagttcatgttgcttgcaaggaaataattacattggaaaaacagaccaagctacttgaggaagaagagaaagaaaaacgtgaagaagaagagcgcagggataggaggagaacaaaagaaagagaaaagaagaatagaagaaaagagaggctgaaaggaaaagacaaagataaagaaaaaatattggttcggtcaaaaaaaccaggtctttcaacattttctccgagcagccaagcagcaccaagtagtaatgagtctcaggatgttctagacttgagatattcagatagcgaagaggaagacaatgttgtggtcagggaacactatcctgattcttcagctgatcaatcttcaagcaaggatactgatgaacgaagcaatgagcatgaatgcagtgcaacagcagaatttgttccctcagattgtgatggctcattcttatgtgatgagtctaattcatcaagaaacttgagatttagatgggacttcccagaaaaagatgtcagttattggtatgaagattgtcgtgttgattctggagatactcaattgcagtctagggagaggatcagaaataacactagaagttacaacactgtatttaatacaaataaccgaacaagagacaagtacaacccctgcagctgtggccatcaagaagacttcagatatttttccacagcaactagatcaagtagggagacaaagatttccaggaaaacagtggctgagaaacccaggttgcaataccgcaggtgctatcctccagaaagcttcgctgtgtcaaatggacgtgttggtggtacaccaaacaagaacacaggtccaaagcaagtatgggagccaatggatgcaagaaagaagatagggaatgggagaggatcagaaataacaccagaaactactggtgctgctgatggttcagatcaagtggaatgctcaaaggacattagtgaatgtgagaagcttgaggtagtgtgtgaaacacttgctgaaacttgttgtgagatatctgcagaagcctgtaagtcagatcaaccatgtagacaaggtgagaaaaatcagtctgcttgcagcgatggatctaaatgcgtagataagccaaattgctgcttgacaaaggacactgttaggacaacaaatttaaccagttcagacagcttttcgtgtctaagtgagggagatagagacagcagcatgagtagcatgacctcactgagtgctcagaatgtagaatcttcatctacatctgattcagatgagtattcagacaggaacgatagcagcccaggcgatccaccagtgaagaatgtttctcgttcattacttgagatgtgtgcaggaaatggtttcagggagtaccaaccgaaaggcttgaaccctcctaatggcaaccaatttggatttatggtggcacctttacaggaccagatgttgcaccaacagaagatccatgcaccgccgtactcgtcaccatttgtggggttccacaatcaccccttggcagttccaacaaatgggtacttgccatatcctcagccaggtcacttctaccctggccttatgacccctgttggatgtggagtcgctggcagccaatgcgttgactttccaatgcagtacagcaataacattcatccttactcgggccccgaatttggttttctgcctgcaaaaccagttcacaagaccccagtgagcttccatgctgtgccagtgccaccactggccccgctgtgtagaagcgaggtgccagtggtgataaatcaagagaggcagcagggctctgcaccccctaaattcaaacaggcagtgctggtccctgagaacggctgttcagcagaagacaacaccttcaaacagaaaggtgatgacacagacagcacacccttctccttgttccagttcaacctgcctattgcccctcccaccctggcaacatccaaagaagagcaaagtggagcgatgccgtcaatggcactgccaccagctcagataactcgagcccagctgtgctccagggaggagaccaatgtcaaggagtacaaccttttctctgggtgtaacggagtgatgtttcagctcaactagaggcgaagaaaagtgagcagctattcaatatacatacatggtgaacgatttgtattctagtaaaacagaataaagtaggtcgaggtttttactgtgttgccctcgaatatttatttcttttttaattttgatttgttgtgcttcccctccctgtttttttgtgtgtatggaaaactgaaaagacagtgagtggtatagattctgcagttttgacacgagtctagtgtcactttttaccccccggatggttgtcatcttccaactaggctcgttcggtgtagctctgtcaattcattttggactgactgaatctgtagcagtttttactacagatacagtaccaagccgtttgttttaattaagggtcctagacatctccggttgctccccc

SEQ ID NO: 32697 - DNA, 5104 bp, Zea Mays
cacgggggttgccgctttggggctcggcacctacggcgcgcacatgttccgccccaagaaccccgcgtacaaagaggtttggcacacggcgtccctgtaccatctcgtccacaccgcggcgctgctcggggcgcccatcaccaaagcgcccccaacgttttcggagggctcctcactgctggaattgtgctcttctctggaacgtgctacaccgtggcttatcttgaagacaggaagttttcttcaccggcaccattggggggctttgcgtttattgctgcttgggccagcctcctcttctgattaaattgtgcttttccaagaaaacaaaaaaagtcataaacctctctatatggtgttttatcaggttgtgaaaaatatacttgtaaagtgtatacagtggacagtatgcgcctctgtttaataattcaatctgtgattcctatgtttctattctatgatatgcttgctgctcatgatatgttttcagttggacatgccagtgaaattgcgcctctggttaataattcaagctgtatgatgtttatgtaacggccgaggttcaaggcagaccctttgcttgcctaaaagttaatggccacatgttcgctacttgatgcacaaatatgagaatctctctttgctttgaatgaacaatgcgatggtggaacaacacaatataaaactacactcgataaggtcggcaaagttaaagatggttcctttctttatgatgcccccttgacaaggcaggaatctgatttctttccttgtcttgtctttccacaccatcttcagtattgcaacatgtggcatctgacttcataaagcatattgctccttagccatgtacatctgaattccccttccatgattaaggcaacctttgtctttgcgcttctctctttcatctacactccaccatcccctcctaagcatgagtgataggataatcatgataacatcaccatctaagagggatgatgccagagatattggagatattgatttgcagtcctacatggacttggagaacatcgcgttctaccaggttccagcaaatttggaatcagccttgtccatggaaagtgagagatcactaggaattcatgtctgcatggacaacagtggtgtcaacttcctgcacaggtttcttcgtcatcttgtggagtataaagagaattacatgaatttgagaaacatcctattccatggtattgaatggcaggttcaagggttgcaacttctctgttcacttttaggccctggctcaagcgtgaagcaggtggaattcaagaagaatgttttcagcacaaaaccaggacatgcttttgttccactttcggagatgcttcaccagaacaacaccatcaaagcagttgttttttctgaatgtagaattggatcaactggagccacgttgcttgcttcagctttggcaaacaacagaagtgtggaggatttccaaatatgggaggactccataggatccaagggggcagaagaactctccaagatgattgaggtgaactttatgctgaagaagttgatcatccttgacaacagctccattacagtggctccacttatctctgctgtactcgcacgcaaccgtagagtggaggttcacatatggggacacggttgtggtacaaaaggtggcacgaacagctgtaaaattgttgaattcctgcctgagactgggagcatgaagatctacagcagcattagctcaacagggctgcaacgggttgcttgtgctctgccatggaataccacagtgacaacactggacatgtcaagtgtcccactaaagtccaaatggaccaaagagcttagaggagtccttgaacggaacaggagcctgaaaactgtgaagctcagcaagtgttcccttggggacaaagcagtggtgtatatagctgcagggctttttaagaacagctatttagagaacttgactttggatggaaatagatttggtggagtaggggtggagcatttgctatgccctcttagcaccttttctccacttcagagacaagccaataccacattgaaggttttgagttttggaggagagcgagcgaatataagcaagtttggtgtacctgctatcttgcagatgttggagacaaaccagagcctaattcagctggcaatatgcaatgatgcaagtttgaagccaaatgatgttgtcaaaatctttactagtttagagaggaatgccactcttcgtagcttgtctttgagaggctgtaagggagttgagggggaggcaatcctgcagaccattatgagcactttagaagtcaacccttggattgaagaaattgacctccacggaacacctttgcatgttgctggtaaaacggaccaaatttatgagaagctctgtcaaaatgagagtcttgttctgccaaacgattttcttgatttgccactaagtgctcctacttgctgccgggtttttctatgtggtcaggaatcagcaggtaaaagcacgttacataactccataaatcagagcatgaacccattgaagtcgcctcacataaatataacaagtactttgatgaatccggttttgcaaatggagtacaccaatgagaataaaagtagtgttttctttgatggcaacacaaaaatgacaatgtacaatcttgatggacaagaggagggttttccctcacatgattttatgtttctggtgcatggtggtccatgctttttcatgattgtatctagtttggttctgaagcctgctaataggtatcccaaaagcatagagcagattgaactggagctaatatattggcttaagtttttggtttcaaattctaagagagtctcacaattatttcttcccagtgtaactatagttctcacccattatgacaaggtagctcatctgccagaagggctacagccaattgccacacttgtacaaaggctcagagaagaattccattcatatgcagaaatttaccccactgtttttgccgtggatgcaagatcattggtttcagtaagtagactcacccatcacttgaggatgacaattaagacaatcctccagcaagtacctcaagtttatgaagtatgcaatgatttggttagagttttgcatgactggaggttgaagaataataaagctgtaatcaaatggtctgagttccgtgagatatgtcagctcaacattccagagctaagattgagatcaaggcgtgataatgtagagaaagtggacacaagaagacgtacggttgcaaaatcactgcataacttgggtgaaatcatattttttgaggatcttggagtactgatcttggattgcgactggttctgtcgatatgtccttaaccaactggctacactgaaatcaatcaagacagaaagaagtggttttatccgcaaacaagagcttgagaagattctacaagagaagctgtgcaaccaaattcaagggtcaaactggagagccggtgcatctttccagggcaatgatgtcataaatttgctgttgaagcttgaattgtgttatgaacaggaacctggaaacccagacacattacttctagtgccatcaattcttgaggaaagcaaagaaggtgctcagcagtggcacttggccatgccagagtgcagatatgttggaaggtgtcttaaatgcacagatatacatatgtttttgacaggcgatttctttccaaggcttcaggttcgtttgcagaacaagatcatgtgcatgggacaacaacagggtgcactctacatcttggagaaaaatcttatttatacagtggtcaatagtatccatgtcagagtggtgctgggaagtacattagagtcatccgtcgatgtgcttgcatgctccagcaaaagtgttactgacatggtgaggatattccacaagttaataatcccaaccatactaaacctgtcttcaagtttgatgttcgaggaaagcattatcaggccagactgtgtaaaatatctcataccgcataggttcctccaaacacagcagctgcctctgaagagaatgaagcaaattcttttgtcattgcctgcagaaagcatgtatgattacgagcatacatggagtgccattgaaagcaataaaaggatcatcttacaatcaggatcagatcatgccagagaattgctatcagatgatgatttccatgaggttcttcaccgtagatactatgatctacagcacctcgcaactgaacttgctgtcaaccctgacaatcagcagcaacatgaaatcatccccgaaacagatgtggttgatccttccatattaggcattgcaaaaggtgttgagatggttctacaaagattgaagagagtggaacaaggaataagggacctcaaggaggaaatcgcaagcttgaggtactatgagtatcaccttttgactgaactccacaggaaaatggactacatgatgaattacaacacccagttggaggagaggaaagtgccacagatgttttatcttgttagcctggacaaccggtccaaacagctggtcacaagaatactgcctgggatgcggtccttacgggtgcatatgctatgtgaattccgtagagagatgcatgtagtggaagatcagctcggctgtgacctgattcaagtggacaaccagacggtgaaatccttgctaccttacatgagtaagttcatgaagctgctgacctttgctctgaagatcggcgcgcatttcatcgttgggatgggagagatgatacctgacctgagcagggaggtggtgcgcctgctggactcctcggccttgtacggcacaactgcatctgccatgtccgtgggggctctgggcgcggcagcactgtatggcaagtcaaggaatggtagcacgagcgacatgggagaggatatgacagcagccaggcaatggcttgtggatttcttgaaagggcaaggggttctgacggggatggacatagcacagagatttggcctgtggcgtgttcgatacagagatgacggccacattgcatggatctgcaggaaacacatcgcagcaagggaagaggaaatcttcgagctgccactttgagcatccagaggc

SEQ ID NO: 32698 - DNA, 2229 bp, Zea Mays
ttttttttacaacttctccctctcagtttactgttgaaaaggcaaacaaaatcacttagccgcgctgcctctgtgtctgtcttttcgtttaattagggtttccggatctgctctgcgtcgccgccgaccaacctccaccgcgcgacgccatggacttcgacgagtacgagtatctggagaagacggtggaagcgttcgcagcgccggccaacggttcgtcgccgcccgggtcggggtacaaggacaaggagcgcagctcacgccgccgctcaacgggcggtgacgaagagcgcgacaacgtagaacgcagatcgaagcgttctcgccccgaggaaggccgcgaccgcgatagagagcggcacaggtaccgcgacggcgaccggcaccgcagcagtcgggagcggcgggaccgtgaccgtgacgtcaaggagaaagagcagggcagggagaacgacaaggacaggaggagccgcgaccgcgaacgggagaaggaggagagggagaaggataggcagcggaggagtcggagccggtccgagcggcgccgtgatgacgaagagcgtgatcgctaccgtgaacgcgatgtcagacgtaggaaagaggaagttgctgaacctgaagttgatccagaaagagatcagaggactgtgtttgcttaccagttatctttgaaggcagatgaaagagatgtatatgagttcttttctagggctggaaaggtccgggatgttcgcctgattatggatcgaaattcacgacgttctaaaggtgtcgggaatatttgtaatatggtgtacctgctgggatactcagcaacttattaagatggaaaacaagatcatattggtatattgaattctatgatgctatgtctgttccaatggcgatagctctttctggtcagttgcttcttggtcaacaagtgatggttaagccttcagaggctgaaaagaatttagttcagtcaaatgcttcaagtggagctgcttcaggtggagcaaggaagttgtatgttggaaatcttcactcaaacattaatgaagaccagttgcgacaggtctttgaaccatttggacaagtggagcttgttcagttgccattagatccgctcagtgggctatgcaaaggttttggttttgtgcagtttgcacgtcttgaagatgcaaaagcggcccagagtttgaatgggcaacttgagattgctggaagagtaatcaaggtttcagctgtgacagaccaagcaggcatgcaagttagtggagctacgggagatttggatgatgaagaagctggaggcttggcactgaatgccagttccagagctcttctaatgcagaaattggaccgcagcggcattacgaccaggattcaaccaccactacagcaacactgtttccatatatatctagcttatcaagtttgactggtgggacgggcattgctggtttgactactccagtggcaataccaactgtatctgtccttggtgctgccccagctgcagcccctcttctgcaccctacagtgcctggtcttgcaattcccggggcaactcttccaattactaccccatctattgatttggctccacctagtcaatgcctattgctcaagaatatgtttgatccagctttggagacagatcctgatttcgatttggacatcagagatgatgttcaggaggaatgttccaagtttggtcaattaaaacatatttttgtagacaaaagtactgccggttttgtgtacctgcggtttgatagtataacagccgctatgagcgcacagaaagcactccatggaagatggttcgcagggaagatgatcacagcaacttttatgaccccacaacagtatgaaatgaagttcccgagctagtgaacagatgcatgattaatatggacgtagttgcttgggctcggtgggtgctggcatttctatattttagcgttttgagcttgtgtcaacttattactggaggtaattataaaaaaaactagtggaggaaaatttagtggaagctagtgtatcgggaaatggctaacgaaaaatggtgaaagaaagagtttccttgccctgtgggttagtgctcgaattgaaactgtactgtgtaatggagtttctccctgaagtgctagtactaatacctaaaatgatggaagaaagagttgacttgcgttgcgcttgttgatttgattatactcgtccgtaccctttgcattattgttt

SEQ ID NO: 32699 - DNA, 604 bp, Zea Mays
gattggttatcgtaggaaaaaagttaggaaaaggaaggttgcagaagaagatattggagatgatttcctattagatagtagtgagggagcgagtagcccaacctatgacgagtcaggtgacattgagtcaaatgatggtggtggtgatgatgaagatggtgaccctagtggtccaagttctgcagctaggccaccaactcataatggtcctggtcaagatgaacaaccagccgctctccgtccaagatcaaaaaggcagaagaagctctctatcaagggcttgtacatgcttgagaagtggtctaatatttaagcacaagcacaagaatacgacgtatgcatggactgattcaatggcaagattttgaacatgtggctctaccgtatcagctctgtttccgtttcagcacaatattgctgctatatttggtttatgtgacctaccaatatttagaactgtgattgatttctatgcattatttgaactatggactatcaattctttgtgtctcaacactagtgttttatttactggtgcaaggatgctaccaaagtactttatttatgtaatatttggtttatttggactatctcattattctat

SEQ ID NO: 32700 - DNA, 2851 bp, Zea Mays
cgcacaaccaactgcttgtatcgcggatatcgatctctgtttcgtttatttgctgctaccaagtcaattcgatccagtcgtctcaatcgtccagcgtacccacgcgcgcggcggcggcggatcgctggtggtagtagctaggtagtaactctcttagctaaggcggcagcagcaccggcccacgcggcggcggaccgatcggtcgtcgtcgtcggagatatacagatggcggcggccgccatgtgcccggggccgatgaaggcgacgtcgcagggggcgttccagggcgagaacccgctggactacgcgctgccgctggccatcctgcagatctgcctggtcgtcgtcgtcacccgcggcctcgcctacctgctccgcccgctgcgccagccccgcgtcatcgccgagatcatcggaggaatcctgctaggcccgtcggcgctggggcggagccacaggttcctgcacgccgtgttcccggcccagagcatgacggtgctggacacgctggccaacatcggcctgctcttcttcctcttcctcgtgggcctcgagctggacatctccgccatccgccgcaccggcaagaaggccctggccatcgcgctggccggcatcagcgcgccgttcgcgctcggcatcggcacgtcgttcgcgttccgcgccaccatcgtcaagggcacgccgcaggggcccttcctcgtcttcatgggcgtggcgctctccatcaccgcgttcccggtgctggcccgcatcctcgccgagctcaagctgctgaccacggacctcggccgcatggccatgtccgccgcagcggtcaacgacgtcgccgcctggatcctcctggcgctcgccatcgccctctcgggctccggctcgcccatcgtctcgctgtgggtgctgctcaccgccgctggatttgtcgttgctgtctcgctcttccttcgcccggtgctggcctggatggcgcgccgctcccccgagggcgagccggtcaaggaggtctacatctgcgccaccctcgccatcgtgctcgccgccggcttcgtcaccgacaccatcggcatccatgccctgttcggcgccttcatggtggggatcgtggtccccaaggacgggcctttcgccggcgtcctcatcgagaaggtggaggacctcatctcggggctcctcctcccgctctacttcgtctccagcgggctcaagaccgacgtggccaccatcaagggcgccaagtcctggggcctgctcgtgctcgtcatcgctaacgcgtgcctcggcaagatcggcggcacggtgatcacgtccctgctcgtcaagatccccgtccgcgaggccgtcacgctcggcttcctcatgaacaccaaggggctcgtggagctcatcgtcctcaacatcggccgcgaccgcaaggtgctgaacgacgaggcgttcgccatcctggtgctcatggcgctcttcaccaccttcatcacgacgcccatcgtgatggccatctacaagccggcgcggcgggcggtgccctacaagcgccgcacggtggagtgcgcggcgggcgacgcggacggcgagctgcgcgtgttggcctgcttccacaccaaccgccacatccccacgctgctgaacctggtggaggcgtccaggggcaccgcgcgccgccgcctcaccatgtacgcaatgcacctggtggagctctcggagcggtcgtcggccatcagcctggtacagcgcgcgcgccgcgacggcatgccctttttcagcggcggcaaggagcagcgggcggagcaggtggtggtggcgttcgaggcgttccagcagctgagctccgtgcgggtgcgcgccatgacggccatctcggacctggacaccatccaccgcgacgtcatcgacagcgccgccgacaagcgcgccgccatcgtggtgatgccgtaccaccgggcgctcggccacgacggctccttcgcgtcgctggggtcggcgtaccacgccgtcaacaagcgcgtgctccgcgaggcgccctgctcggtcgccatcctcgtggaccgcggcctcggcgggcacgcccaggtgtcggccaagaacgtgtccttctccgtcgccgtgctcttcttcggcgggccggacgaccgcgaggcgctggcctacgcgacgcgcatggccgagcacccgggcgtcgccgtgacgctggccaggttgcagccgagccgaccgccgctgctggacgaggccgagagcgcggccgacgaggccgcggtggaggcgttcaaggccagggtcggggccgtgaaggacgggtcggtgcggttcgaggagccggaggcgtgcaccagggagcaggtgctggagaccatcgagtcgctgtccgggttcaacgtgttcgtggtggggcggatgccgccggtggcgccgctggtggagaggcccgacgagctgggccccgtcgggagctacctggtgtcgcccgagttcaggacgtcggcgtccgtgctggtgatcaagaggtacgacccggccacgaaccccaagagcaagaggttcgaccccaaggcggggccgccggtggcgacggaggaggacgtgctggacgaggagatggggatggggcgcgccaccgtggtgcccgtgtgatgcaaaatttcgccgatgagcgacatggcgtgcatgagtaggtgcacgtacagtacatacgacgagctgcatgcgctcgctggcacgcgctgaggtgtgacgcgtatcgccaccgacggacgacgtgcgaccttattgaatgaagtgtatataatatatattattgggacatacgtacatgcatgccgcgccctttgttggctagctatataactaatattta

SEQ ID NO: 32701 - DNA, 3502 bp, Zea Mays
gtcccacaaaaccactacgccgactcgccgaggctgcgagggagaacccagcagctcccattaatggactgcgcaacagcttaaactccgccgcccatttcaaacagaaccgaaccggccgcagcatcgcagcgcagcggtacgcgcctcggaggtggagggaatgtcggaggcggtggcgatcctctcgctctccgcgtccgccgtggtagaagacgtgctgcggcagcacgggtgccgcctcagcgaccgcgacctcgcgtcccgcagggccgaggaagctgcggggaggaggaacgaggcggcgggatggctgcgccgcacggtgggggccgttgccgcgcgcgatcttccggaggagccgtcggaggaggagtttcgcctcggcctccgcaacggccagatcctctgcggcgcgcttaatcgtgtccacccgggcgccgtcccgaaggcaagcgctccttgtgccgacggcgcggcgctgtcggcgtttcagtacttcgagaacgtgcgcaacttcctggtggcggcgcaggagatcggcctgccgtgctttgaggcctccgatttggagcagggagggaagagcgccagggtggtgaactgcgtcctcgcactgaagtcgtacggtgactggaagcaatgcggtggcaccgggccgtggaagtacggcgggaatcttaagccatcggtatccggcaagtccggccacgggaggaagaactctgaaccgttccggaggagccaatcgatcaatgaaggtgaagtgccctatgaggaagctgggttcaacggcgacgctcattttgattccagtgacatgtcaacatcccgcccccttaaaatgttggtcagtgcagttttgtccgacaaaaggccagatgaagttccacagctcttggagtccatgctgagcaaacttgttgaagaatttgaaaatcgtctaaacagccaaaatgaattggtcaaagcggctctaaaaagtggtattgataacaccaaatcattttcaaaatcaaaggtcctggttgagacccctcctaatactagtgggagaaagatggatacaggagatatttactgtaaccacaaaaaaacaaaaaaagaagcatcaagagaagtggcactgaagcaacatttaattttacaacaacagtcaaagaatgttgagagtgatctgataactacaagggcgggtatggagtatatgcaaatgaagtactctgaggatctcaaccttcttggaaggcacctgtttagcttggctcatgctgcttctggttatcacaaagttcttgaagaaaatagaaaactatacaaccaggtgcaggatcttaaaggaagtatcagggtatattgtagggtgcgtccctttttgcctggacaagcaagtccgtccactgtgggttccatcgacgagggcaacataaccattgtcaccccttccaagtctggaaaggaaggccggaaaacttttagcttcaataaggtttttggcccatcagcaacacaagctgaggtgttcttggatactcaacccctcattcgctcggtccttgatggatacaatgtttgtatcttcgcatatggccaaaccggatcagggaagacatacacgatgagtgggcccaagaacatgactgagcaaacccaaggcgtcaactatcgggcacttggtgatctatttaagcttgctgaacaaaggaaaggaaccttcatttatgatattgctgtacaaatgattgagatttacaatgaacaagttagggatctccttgtcagtgatggtctcaacaaaaaattagagattcggaataattctcaaaatgggctaaatgttccggatgcaagccttgttcgtgtggcatcaacaatggatgtcatggaattgatgaatgttgggcaaaagaatcgtgctgttggcgcgactgcactaaatgacaggagtagtcgttcccacagttgtttaactgttcatgttcagggaagggatctgacatcagggacaatctttcgtggttgcatgcatctagttgatcttgctggaagtgaacgggttgataaatcagaggtcactggagaaaggttaaaagaagcacaacatataaacaaatcattgtcagccttaggggatgtaattgcttcgcttgcccaaaagaattcacatgtaccttacaggaatagtaaattaacacaacttctccaagattcacttggaggtcaggccaaaaccttgatgtttgttcatataagcccagaaagtgatgctgtaggagaaaccatcagcaccttgaagtttgctgagcgtgtgtcaactgttgaacttggtgctgctcgattaaataaagaatctggagaagttagagagcttaaagagcagattgctcgacttaaatcagcattagctgcgaaaaatttaggatcggagcaaatcatcagtcatgactctgaggcatttaatataaagatgccttcgcctggtttttcaaacacacgacagggtagctgtgatctactctctagccaaagtaacttcagacaaccaatggaggatgttggaaacatagaggctagagccaatcatacactgaggcaaaagaaaccaagctttgatctccaggatttattaacagcaagtgattctccttcatggccagatagcaatttgagggtaaattttcagatgggagatgaaagagaagcaattggtggggactggatagataaggttgtagtgaacaacaataattcagccagtgattgggagggtgacaacacagctttacctgactttttttaccagagatatcattcaggtatgagggagaagcagtaccagaggaacaacatgagacaaaaggatgaccacgagtatgaacagcaaaggcctcgattttactctacaaatactgatgattctgatgacattgacatagcaacaagtgattcctcagaatcagatgcattatggcagctcaatgtccaaagcatgaataactcaattagtgagagtggttcaaaggttaagaaaccacaaataaagcttagagatggttcagatgccaggacaccgattcattctcaaataccatcagggtcgagaaaagtcgcaaacggttcgagtagatctgttaggcagcctttaagcagaagcgacagcagaaggctttcatcaaatggaagacaaactggtgcaaagtagggacttacaatgatcgcgtgcagtttttgcctttttcttttctgtgtttgtcacgagagattgtgaggttgctctcgagtacagcaatgagtgacaataaacccaattgagtgtgtcagtgtggtgagttgtgatctcaacaactggtgtgtgaggccattaactttttttccttattggcttatcaggctacgttgagttcttgctaattctctgtatcttgtccataatataaatacataatgaaaagaaaggaaattgattgatcaaaagctggtgcctaataattttttatactcg

SEQ ID NO: 32702 - DNA, 915 bp, Zea Mays
cagctgcactgtcctcccacaagacaactcaccagacacctttcctcctcccccctgaccccggcccattcagacgacgacgaagacagcgccgagaagatctcgccttcacaacaacgacgaacagcgggtacgtacttggagatccaagaagctaagaaatgtcagcccagtttgcatccgagcatgcttgctatgtcaactgcaactattgcaacactatcctggtggtgaatgtgccaagcagttgttcctacaacgtggtgactgttaaatgtgggcattgtacaatggtgctgtccatggatctcagtcccttccatcagcaggcacgcactgtcccagacaaccaggttgtccagaacagagggtttcagtataacaattttgggagctacgagcaagcctcgtcaagaaatctacgaacgcctcccatgtatccagtgtcaaacaatcagccacaagtgccaccaatacgaccctcagagaagagacagcgtgttccatcagcatacaacagattcatcaaggaagaaatacaaaggataaagacgagcaacccagagattagccacagggaagcattcagtgctgcagcaaagaattgggctcatctccctcggctccatttcggcctcagcgtcgctgacggcggcggcggcagcaactagggaagacgatgattacggatcgagctcttcgccttacacatatatatatgcagtgtgctatgtcgtgcttggattttgtaagccttattaagttttttgacaacctgtgttttcagacctgttgcgtacttgcatgcatgaatcctgcattgcgtgcagtaattaacatgtttgatgctatatatgatatatgcatgcatggtgtacaacattactaaataaatggaaaatatttgttcaagaa

SEQ ID NO: 32703 - DNA, 2547 bp, Zea Mays
gaaacaaacaggggctttcatttctccccgccctgcagcacgaccgcgaccagccaccgtctccgcccccgccccggttgcttcagatctcctcctcccccacccggccacccccagccgcaccagccaccggccagctcctccgcaccaggataatctctgcccttcgtaccccctcgccattgcgcgcgcatataaatcccacatccccatcgctctcgcctctgcccacccacccgccgcgcccctactgcgcagcacgcacgtcccctccgcggccctggatctaggctgatcggtcgccggccgggagcgaggatcgggatctcggcccggggctgcccccccgccggaatggaggtcttcggccccgtcacgcccggacaggtgtcatttttgctaggtctattccctgtcctcatctcatggatctactctgaaatcctcgaatacaagaaatctttgtctcatgggaaagttcattcagacgctaatttggataatggaaccatcaaggaggatgaaaagtcagtattacttgaaggaggacagttgaaatcaccatctacaaagttcaggaacttgtctaccaaagcgaatttgttacggtttataactatggacgagtcttttctgcttgaaaaccgtgctgtactgagagccatggctgaatttggcgttgttctggtttacttctatatctgtgaccgcacagacatatttccagaaagcaagaagagctacaatcgtgatctgttcctgtttctatacattcttctcatcatagcatcaacacttacttcactaaagaagcatcatgaaaaatcagcattttcaggaaagtctatactctatcttaatcgccaccaaactgaggaatggaaagggtggatgcaggtcttatttctgatgtaccattattttgctgcttctgagatatacaatgcaatccgtgtgttcattgcttgctatgtctggatgactggatttgggaatttctcatattactatatcaagaaagattttagtattgcaagatttgctcagatgatgtggagattaaatttctttgtggcattctgttgcattgtccttgacaatgatctcatgctctattatatatgcccaatgcacacactatttactcttatggtatatggatcacttggtctgtttaacaaatacaatgaggtaccatcaatcatggctattaagattgcttgctgcttcttgtctgtaattttgatatgggaaatccctggggtatttgaatcattgtgggccccctttacgtttctgctaggctataaagatccatcgccatccaaggcacacttacccctgctacatgagtggcatttccgatctggcctcgatcgatacatatggattattggaatgatttatgcttacttccatcctaatgttgaaagatggatggagaagctggaagaatctgagactaaggttggctttctgtggtatgaatatatatacaagctagacaaagttacatacaacaagtaccatccctacacatcatggatccctataactgtttatatctgcctgcgcaattgcacccagcagttgaggaatgcctctttagctcttttcgcatggcttggcaagattacactcgagacttatatttctcagatccatatttggcttaggtctagcatgccaaatggacaaccaaagtggcttctttgtttcataccagattatcctatgcttaacttcatgcttactacagcgatctatcttcttctatcataccgtgtgtttgagatcacaaacgtcttgaagtcggcttttatccccagtagggataatagccgcctataccaaaatttgattgctgggatcgccatctcagtgtgcttgtatctctgctcgcttattcttctgaagattcctggtgtatagggatgaagatcttgatagaaggtttcttgtaaaatgtttgcttgataggatgtttcagctcgggcctcgatccccttttgctgttgtggagatagttgggatgcgcggagaagcggctaaagttggacatacggggaattgaattgccagaggctgcagatacagaagtccgaatcttgatctttttgttcattcaaaacacggatggatacaacaagtaggcaatccttccattcttttggaagttgtagcaactgttcgctagactatgttgatgcaacctcgttgtatgagttatcctgtagaactgcaccgtgttgtgccataggtattctgaagctgtaaaaaaaacgacgggcatttcttcttccttgaaaagaagaaatataaaggcagaggcgcagagccctttcttctcctaattgtaatgtcgtgtttgctttggagtttgaaccatccagtctatatcctgcttcttcaagtgttcgtgctcgtgctgtacgtgcgtacccgcgggctcagtcgaccggtggacggtggtagactgtatgcacggctcaaacttggtgtatgtgtgaaaaattacccgccactgttgttggttacattgaaata

SEQ ID NO: 32704 - DNA, 7104 bp, Zea Mays
atggatctcgcggggatgaagcggcgggagctccaggcgctctgcaagcggcacggcctccccgccgggggcaccaacgccgacctcgtcggacgtctcgacgccgtgctttcggggcccgctgttgtggaggaggaggttgccggagtgccggcgaggaaggggtgtctgaagcaaacgggcggaggtgccaccgaggccaagaaggttacttttggggcggaggtagggaaggccaggagactgaggtctcgggtcatatggtcgccggtcgttgccaagacaagggggaagtctgctcgagccgatgtgggcgctgatgtcccagtgaggcggtccaggaggaattcgttcaatcctgccgaggctgaggaagcaggagaggctgttgctgttgacaggaagcccaagcgcaagaatcaggagaatgacgagggcgttgctgttatcgctcaggctagagttacgagaaggtcaaatttggagtggtctgctactgtattgcctcctgctgttgagaagaagagagggaggcagaatgcagctgagtctgatgtgcagaagtccgctctggtggaagtaacagctaggactacaaggtctcgctcaatcgtacctgttgtggtgccacccactgtggttgagaacaagaggaggaagactggagatccacaaacaactgtagagttgactatgctttcagatgtgcccagaagtgattttcctgccaccaggtctttaaggaacaaaattgtccacgttaacaacagcgtcgtggacgaaactcacactaccaggcagttggaaaacaagatgcgtccgtctactcgtaggcatcaacaggttgcatcttctccggaggataaaggtcaaaaaattcctgctaccagtaagtcccctctactgaggtggtcacggagaaactattctgaggccaatagtgcaaattcagtaaacatcaaattggccaaagactcgagcacagctcagccattggcacaccataattctcattctgaagatttggagaaacaaccagcagttaaagaaccaattaaacggtcaacacgtaaatctattgctttggctgcacttgagaaagagaaggatgtaattgaaggaaagaaccctgaagcacatgttaggcgatcaacgaggaaatcagttgtgcaggttaaagataccaaaagtattgttgaagagactcaatatgctaacagtgaagatgtggcgaagcaaccagcaactaaaggacctgctagggggctgagacgtaaatctgttatcacagaattgcatgagaaagagaagagtctcattgccgaaaagaacatggaaacagatgaagcgatattaacgcggaagcctgtaatcccagttaaaaatattaaagctgttggtgaaggaattcaaattggtaagggcaaagatgtggataaacaatttgttgtgaagcaacctactaggcgatcatcgcgcaaatctgtgctgcctgatatgcttgagaataatagtggacttctagcacccaaaatgaatgctgagatgaatgttaggagatcaacacggaagtctgttcttcctgacatgcataatgagaagcaagatcaccataaaatggctagaaatgagaacttgcaaagtggtaaatatcaagatggtgagaagcaacagaaagtaaaagattctattaggcaatcaaggagatctatcgctacagtgctacttgagggacaaaataatgatgaaggaaaaaagttcaaaaatcctacgaggaggacaacacacaaatctcatgcccttaatgcagttgaagaggtcagcatggatcacattgaagttggtgaagaaggcttgaaattgaggaagcgcagtaggtttttgctggaaatatcatcttcagctaatgtttcctggaagcatcagaatgcacagatctctaatgaaaaagataacacagaaggatcgcagcaggcatcaaattgcacaacttcaaagagaaggtcttcaaagaagagacgaacaactgctccagaagaagtgatgcctttcaaggtggcaaatgatgacatagttatcatggaagaaacaaaggacacacttgaatataataatgagtctagtagtaaagttcaagaaatttgtcaggttaatgctgcaagagaagagttctcttcaggtccattgcttgtaacagtagctcctagtgacgaaatttgcacagtgcagagtgtagctgtggtgatacctgggtcagaatctggtgacgatgcaaatcaaagttctgataagagtaagcaacctcaggaacattctgtcactcaaactgttgatgaccatttatctgaaacaagaagtgggaaattagatcaatcaacatgcatcacaggattagtctctgacaattgtgttgtctcagaggacaaaacattgatgagtgaagaccgtgaagagcaaagccctgtgtccggagaacagagagttagcttggaagcaaatgccaatgagcctgaggaaaagaacctagctaacgtcacatcaactgatctccacaccaaaagtctgcagcatgatattgacagaatagctaaagagactgataaagatgttttgtctttggttttccctattgaagagcatgaagaaaaatatggagtgagccctatagctgttgaaaagtgcgtctgtcgtgaagcaagtgcatgtgaatctgcacgaaaacccctaaccgttatcttttctaacaatctccacaccaaacatctgcaacatgattgtgatgtgctaattaaggagactggtgaagaagttttagctcaggagaattgtaatgaccagcctgttcctgcccagactgaccaagaaattaagttaaacgatgaacttgctgatccggatgttttagctcaggagaattgtaatgaccagcccgttcctgcccagactgacctagaaattaagttacacgatgaacttgctgatccggaccatgaagagcaaagccctgtatccggagaacggagagttagcttggaagcaaatgccaacgagcctgaggaaaagaacctagctaacgtcatatcaattgatctccacaccaaaagtctgcagcatgataatggcagaatagctgaagagactgataaagatgttttagctcaggagaattgtaatgaccagcctgttcctgccaacgagcctgaggaaaagaacctagctaacgtcatatcaactgatctccacaccaaaactctgcagcatgataatgacagaatagctgaagagactgataaagatgtttcgtctttggttttccctattgaagagcatgaagaaaaatatgcagtgagccctatagctgttgaaaagagcgtcagtcgggaagccagtgcatgtgaatctgcaggaaaacccctaactgtcatcttttctaacgatctccacaccaaacatctgcaacatgattgtgatgtgctaattaaggagactggtgaagatgttttagctcaggagaattgtaatgaccagcctgttccggcccagactgacctagaaatgaagttaaacgatgaacttgctgatccggaagttttagctcaggagaattgtaatgaccagcctgttcttgctcagactgacctagaaactaagttaaacgatgaacttgctgatctggctatggaatcaggttgtagcattactgaaaggaatgaagggcttgttgctcataatcttgatcaagaaggtttccttgaagcaacaccagagtgcaaacaggaatgtggtttgcctgaggagacagtaatttcctcaaaagaaacaggatctctgctgtgtgcagatcaatcaccaattggtctggaatctttattttcgcaagaaagcatagttgaatcagtggggcattgtgcacttgcttcagcaacaactcataccgaaaatggctttgatgattcaaaagattgccataacaagtctgcacttgaaaatgttcatgtgccagaaccttgttcacacaatgatactaaaggaggcatttttaaaaatgttgattgtatgcatacatcccagcgagatgatagaatggaaggagtaccagaggctaacactgatgaagaacatgttctgtcagcctttttgctggatgcaaatcacctaaacgtagtcattaattctgaagaagtggtttgtgagggtgaagatagtaaggagcttctccattcggaagactgtaaagcttcatccgagaaaacagatgtgaatgatggcaatgtatatggtattagtgatgctgtagtgagatgtgcactgcatgctccagccgatgataattatgagatttttttgggtcccaatactgatgtaccacgtcaggtttataatgacggatgcagtgatgtcaaagaagatcgatttgcttccaaaccctggacaattgatattattgaggatgcctctgtcaaagaaagatcaaatttaaaagattggcaacttgattccaagttggagggcacagaaatagtggaatctggcctttacttcaataaggatattggtaacattttacatagtggatctattggtgaaataactccatctggttctggtttatcaaaagattcatctgtggactatagaggggaggttttagatggcttctcaatggaagcatctcttgaaaggtcttctacacgtggggaacaaaatggttgtagactagatgctattgagaatccttcaattactttagcaacttctggttataagcatgaaggtgctttatctgaggaagcagtgtacacaaagaagaattacgctggaacatgcttgtcaaatcccagggaattaatcatggagctgcaatcccatttctcaaaggaaaacataaatgaatctgatcctcatgacagccttgtattcccaactgctgaaaattcagcagatgaacagctggttaaagtacaccatggttctaatctgtctcagttaggattaactgatctgttggatggaccaattgggtgttccaataccgacgtgttgtgccagtgtgacaatcataaaaatcaatccaatgaggacaaggtagaggaagttgaggcggtgtctgctgctaaatacatagaaagtgaagttgtgctgctcccatctcaagagagatcaaatttgaataatgagcagcttaacaccaagttggaaagcccaaacattatgggatcttgccttaactgtgataacgatgtttgtaatacttcggacaatggatctgtttttgtcattggtaaaagaactccatctgcttctggcttaccagaagattatcctaaggatagtgacttgcaacaaccggttttagatagcttctcagtggtttcatcttttcaagacaatatatctgggaagaaaactgtttctggtgtagcaggcagtgagattctttctttaagtttagcaactcctgattataaacatgaagatggtttctctgaggaagcagtatgcagaacaaagaattatactggaacttcctcggtagatccgaggcatttagacatggaggggcactctatttactctgagggaggtactgaaaaatctaatctgcaagataatcttgcatttctaagcgctgagagtggaaaagatgaacctattatttgccatgttgagaaactggttgacgcacatgcttcttcagatacataccaaggtccttgtcaagatctaggcagacatgaagaacaagagagctgcatgtctattcctatgcaagccaaagaaagtggaggggttttgaggtctagccacacgaaagggtcagttacagcagcccaaattgatttggcaggtgatgcccatcttattgtgagtgataatgctgctgccaagcaagtgtttagtgaggagaaagaggaaacaaaatctatctcttcttcagatattgatatccttcatgaaaaatcatactccagtggacacgatgaccatgctgcttgtgctgccgaaactcagttctaccatccacagaaagcatctatatctgatggactacatttgggtcctagttctttgcaagtagaatcactggatgctttggatagcgatatactgtatgttaacacaggagttctcgagcagcatcataaagagggttactatgaacccagtgtctaccaaatcacttcaggcatttgcacaatgtctgaagctgaaccattcgaagttttagaaactggaaaagatgtaaaaacgccatctaagctagatgagcaacttaatcctgggttggacggagatgaagctgagaaacacagcttagactgtggtacagacaccagtcctgtgatgagcaagagaaccctttcttcaccaggatcaggaccatgccagcagtatgtaaatgaaagcaccaccagtacacagtcgactgataatcacccaaacgacctacccgctccgagatctcctgaacaatccgcgtgttttcagaatgacaacgattcgggttcagcatttgtcaaagcagcaggcgaagaggtatagatgaactttgcggtaagctgcagagtttcaaagtttccagcgccgtaaaaggaagctacgtagctatgggtgcacctcgtccgaagcctggggacagcacgagccgatctgcagccgcgctgctcaggaacatagagaacacaactgctgttaaagctggccgtcctcctgtcaagccaaacgccgatggtaaggactcgtctaggcgagccctgcagcccataagcggaaggcctgacagtaggtagttcggcggttccttaataagtgtgtcgtgtttgtgttcaaccctttgttgaaagccaggtccgtgtatttgtgcagcttgttgtcatgaagctgctgtgtgcgtgtcatttaacataagcgtgcgtgaagttgtgttatggaagtggctaaatatgtgttcgttaggaggtcaattggcttgaactgaccctgctgttccgtgatttctgtctaaatatacttgtgtggctgtgtcactttgattggccttatcgatcacatgcaatgggatcacatctagcgtgctctagggtcctcgtttggtaatcgctg

SEQ ID NO: 32705 - DNA, 2582 bp, Zea Mays
ggctagtgtggcacaggcacagaggccactggtggggtttcattggagcacactagattccagtcctatatacacaaatatcaattcgggatgacgcgagcaaagcaaacacatccaaatatcatacacacaaagtgccctagttaccaagctacttgaggaagaagagaaagaaaaacgtgaagaagaagagcgcagggataggaggagaacaaaagaaagagaaaagaagaatagaagaaaagagaggctgaaaggaaaagacaaagataaagaaaaaatattggttcggtcaaaaaaaccaggtctttcaacattttctccgagcagccaagcagcaccaagtagtaatgagtctcaggatgttctagacttgagatattcagatagcgaagaggaagacaatgttgtggtcagggaacactatcctgattcttcagctgatcaatcttcaagcaaggatactgatgaacgaagcaatgagcatgaatgcagtgcaacagcagaatttgttccctcagattgtgatggctcattcttatgtgatgagtctaattcatcaagaaacttgagatttagatgggacttcccagaaaaagatgtcagttattggtatgaagattgtcgtgttgattctggagatactcaattgcagtctagggagaggatcagaaataacactagaagttacaacactgtatttaatacaaataaccgaacaagagacaagtacaacccctgcagctgtggccatcaagaagacttcagatatttttccacagcaactagatcaagtagggagacaaagatttccaggaaaacagtggctgagaaacccaggttgcaataccgcaggtgctatcctccagaaagcttcgctgtgtcaaatggacgtgttggtggtacaccaaacaagaacacaggtccaaagcaagtatgggagccaatggatgcaagaaagaagatagggaatgggagaggatcagaaataacaccagaaactactggtgctgctgatggttcagatcaagtggaatgctcaaaggacattagtgaatgtgagaagcttgaggtagtgtgtgaaacacttgctgaaacttgttgtgagatatctgcagaagcctgtaagtcagatcaaccatgtagacaaggtgagaaaaatcagtctgcttgcagcgatggatctaaatgcgtagataagccaaattgctgcttgacaaaggacactgttaggacaacaaatttaaccagttcagacagcttttcgtgtctaagtgagggagatagagacagcagcatgagtagcatgacctcactgagtgctcagaatgtagaatcttcatctacatctgattcagatgagtattcagacaggaacgatagcagcccaggcgatccaccagtgaagaatgtttctcgttcattacttgagatgtgtgcaggaaatggtttcagggagtaccaaccgaaaggcttgaaccctcctaatggcaaccaatttggatttatggtggcacctttacaggaccagatgttgcaccaacagaagatccatgcaccgccgtactcgtcaccatttgtggggttccacaatcaccccttggcagttccaacaaatgggtacttgccatatcctcagccaggtcacttctaccctggccttatgacccctgttggatgtggagtcgctggcagccaatgcgttgactttccaatgcagtacagcaataacattcatccttactcgggccccgaatttggttttctgcctgcaaaaccagttcacaagaccccagtgagcttccatgctgtgccagtgccaccactggccccgctgtgtagaagcgaggtgccagtggtgataaatcaagagaggcagcagggctctgcaccccctaaattcaaacaggcagtgctggtccctgagaacggctgttcagcagaagacaacaccttcaaacagaaaggtgatgacacagacagcacacccttctccttgttccagttcaacctgcctattgcccctcccaccctggcaacatccaaagaagagcaaagtggagcgatgccgtcaatggcactgccaccagctcagataactcgagcccagctgtgctccagggaggagaccaatgtcaaggagtacaaccttttctctgggtgtaacggagtgatgtttcagctcaactagaggcgaagaaaagtgagcagctattcaatatacatacatggtgaacgatttgtattctagtaaaacagaataaagtaggtcgaggtttttactgtgttgccctcgaatatttatttcttttttaattttgatttgttgtgcttcccctccctgtttttttgtgtgtatggaaaactgaaaagacagtgagtggtatagattctgcagttttgacacgagtctagtgtcactttttaccccccggatggttgtcatcttccaactaggctcgttcggtgtagctctgtcaattcattttggactgactgaatctgtagcagtttttactacagatacagtaccaagccgtttgttttaattaagggtcctagacatctccggttgctccccc

SEQ ID NO: 32706 - DNA, 1273 bp, Zea Mays
gagctgaatcgtaggaacctgccgtgcgtggcgtcaaaaaagcactcttggtccaaccaaatacaatacaagcaagcgaccaggagggacaggaaggatcgcagcggaggagatagctagggaagggcaaatctgcagggcctgagagggtgaggtagagcgcgccagccagaatgcaggagcaggcggcgagctcgcggccttccagcagcgagaggtcgtccagctccgggcaccacgtggacatggaggtcaaggaaggcaagctagctactacctctggcatggcaccccgtgctgtggaactatcctgtgcatcttctttttggcttataagcttgagtttatcaccaatcccagttctttcattgtttttttagaacttcgttgttccaagttccaacgcttccgataggttctcgtttgcttttgtcgtgcaactgaactgctgcaagacttgtcaagcaagtctactcgagttcgagtctcgagctctctctccaagatcttgactcgtttatttggtgaactgatccagccacacctgtggtgtgattgagttgcagggatggagagcgacgatgagataaggagagtgccggagctgggcctggagttgccgggagcctccacgtcgggcagggaggctggccctggcgctgcgggcgcagaccgcgcccttgcccagtcgtccacggcgcaggccagcgcgcgccgccgcgtccgcagccacgccgacaaggagcacaagcgcctcaaaaggttactgaggaacagggtgtcagctcaacaggctagagagaggaagaaggcttatttaactgatctggaggtgaaggtgagagatctggagaagaagaactcggagatggaagagaggctctccaccctccagaacgagaaccagatgctccgacagatactgaagaacaccgctgtaaacagaagaggttcaggaagcactgctagtggagagggccacggccaatagcactgaatgacggaaaaatagtaatgaatcatgataaatatatgtttatatggagtggatttggtgagcttgctttgtggccaaaggagggaaccccaaaaactggggtcagacagccaagtgccgacggttcagggaaaaagaacttatggaattaatgcatttgattttaacatggtttacatatcatcatcttctactagttttctaaaaatgatgtttgtggatcaaggccagaccaggccgggccgagaaaatttaaggccttagccaaatctaagg

SEQ ID NO: 32707 - DNA, 1371 bp, Zea Mays
aagtgagacaaggccacaagggggatggggcggcacgcgccccccggccccgccccgcgctacgtggtccatttccagtccagtctccaacaacgccggagcgcaggcgaggcgagcacgccgatcgattccgattcgcatacgcccgcccgccgcgaatggacgatgcggagtccgcctcgagggcggggaggaggcgggcggccgccgccgcggggatgaggttgttctcgccggagtactacgcgctgtgcgccggcggcgggatgctcgcggcgggcgccacccacctcgccatcaccccgctcgatgtgctcaaggtcaatatgcaggactaaatgttcttgtgaaagaagagggaccttcgtcactttggagaggctggggagggaaattttttggctatggtgttcagggtggctgcagtgcctctgctcaaatcatagctgatgttggcctgtgtccgtttgaatcggtgaaagtccgtgttcagactcagcccatgttcgctaaaggtttggttgatggctttccaagggtgtatgcaactgaaggcctatctggcttttacagggggcttttacctctttggggacggaaccttccattttctatgcttatgttttcgactttttgagcataccgtggacttcctatatcagaaagttattcaaaagaaaaaggaggactgctcaacgatccagcaacttggtgctacttgtctggctggttatatatctggtgccgtcggtactgttgtttcgaatcctgcagacaatatcgtctcatccctgtataacaaaaaggctgaaaatatcatacatgctgtgaaaagtattggatttcgcaatttgctcacaagaagcctgcccatccgaatcgctcttgtcggacccgtcataaccatgcaatggttcttctacgatacaatcaagatattaactggattgccaacgactggaggacttccgcgcgaactagaagaggctaacatataatctgaccagtttgagataggcttctcgacgcactttttggtatcgtatggacaagtatttgtctatggttctgacttactaggggaagagtatagttggtagttttcagggaagagccaattgacctgaatacatcatgcgtaaggtttctgctgctggatatggaagactgcctcgtgtcgtatgtttttccacgtcttaaacaaccttgagcttcagcacccctccaggtacagcattgtggccaggtggtgctttagtaagtgtgtttcgtaagattttgatgtatgagaaaaatgcacttgtgatgtatacacgcgaccttgaaagtaaataatccctctgaaggaccgagatttgaagtgaaattctg

SEQ ID NO: 32708 - DNA, 2183 bp, Zea Mays
ctcacttccactttaacttaccctattacctttctgctcgtggtgagtgctgacaccacctcacgcacacaagccgccggcggcgaccagaccgaccacctcgcgcactagccttgctcgcttctcgtcgccggctcgttgccggctcgtcggcacgatgtcgtcggagcctccacccgccccttctgccgccgcagcagagggactggctgctgacctttccgccgccaccctcagcaagaagcagcagaagaaggacgccaggaaggcggagaaggctgagaaggcggcgcagcgccagcaacagcagcagccggccgacgccgaggacccatttgcggccaactacggctatccgcccggtcagcaagaagatggctttcgtcgtgctgcgccagagcatgagcaccgtgcagtgcgtgctcgttgccagcgccgacgccggcgtcagcacgcaaatggtgcgcttcgccaccgccttaagcaaggagtccatcgtcgacgttgagggcgtcgtgtccctccccaaggagcccctcaaggccaccacgcagcaagttgagattcaagtcaggaagatctattgcatcaatagggctatcccaacccttccaattaaccttgaagatgcagctcggagtgaggcagattttgagaaggctgaactggctggagaaaagcttgttcgtgttggtcaagatacccgcttgaactacagagctattgatctacgaacaccctcgaatcaagccatattccggatccagtgtcaagttgaaaacaaattcagagaatttctgttgtcaaaggactttgttgggatccacacgccaaaattgatttctggatccagtgaaggtggtgcagctgtattcaagcttctgtacaatggtcaacctgcttgcttggcacaatctcctcagttgcacaagcagatggctctatgtggtggttttgaacgagtatttgaggttggccctgtgtttagagcagaaaattcaaacacacacaggcatctctgtgagtttgttggtcttgatgctgaaatggagattaaggagcattattttgaggtctgtgacattatagatggcttatttgtatcaatatttaaacacttgactgaaaactgcaataaagaactcgagacgataaacaggcagtatccatttgaacctctgaagtatctagacaaaacattgaagctcacttatgaagaaggagttcaaatgttgaaggaagccggaacagaaattgagcctatgggtgacctcaatactgaagctgagaaaaaacttggtcggcttgtcagggaaaagtatgacacagattttttcattatgtatcgatatcctttggctgtgcgtcccttctacactatgccttgttatgacaacccagcttacagcaattcttttgatgtctttattcgaggcgaggagataatatctggagcgcaaaggatacacactcctgagctgttgaccaagcgtgcaacagagtgtggaatcgatgtcagcactatctcgacctacattgaagtcttcagctatggcgcgcctccgcatggtggtttcggggtgggtttggagagggtggtgatgctgttctgcgccctaaacaacatcaggaagacctcgatgttccctcgcgacccgcagaggcttgtgccgtaatttactgagtccaatgccctgagtttgcagcagagcgtactggttgttttgatgttctttgagcatcgaacatcgctaacttgcaatctcagctactgaagccccggttaccgtggttcagagttcctgttaaattcacaaagctacttgtatctattagattgctgaaaccagcaagtacgatcctttttgggatttgatctggtctaattgttgttaagtggaggtattgctctcagtttttttgtgctctgtttgtcggcatatgccaagagctagggcttcttaagttctaagtttttagacgagtggattccttttttttaagagccggcaaaagttctgccctgcacctgttaaaaatagatattaccctgttccaattctaaataatatgacgtgtcgccttctagatatttatattatgtagatgtacaatatgtctagatacagatagtaaagtaatgtatgtctttataaagagagaagaattgtgctgcgaatgaa

SEQ ID NO: 32709 - DNA, 2205 bp, Zea Mays
cccgtcgcattctgcagcgccagctcgctcctcgccccgcccccttctctcagcggcgacgcctcgggcgttcctaccctgccccctctccggacccccacgccgtcggcgaagcagccgggcaagagcccgatccagaccccgcgagcaatccttgatatacctgatggctatgattgatgagcctctgtacccaattgctgtactgattgatgagcttaagaatgaggacatccagttgcgtctaaactccattagaagactttcgacaattgcacgggctcttggagaagaaagaaccaggaaggagctgattccctttcttagtgaaaacaatgacgatgaagatgaggtgcttcttgcaatggctgaggaattgggtgtgttcattccttatgttgggggtgtagaacatgctcatgttttgcttccccctttggaaacattgtgtacagtagaagaaacttgtgtccgtgataaggcagttgaatctctgtgccgtattggtgcacaaatgaaggaaactgacatagtcgactggttcattccagtagtaaaggctagcagctggtgagtggtttacagctcgtgtatcatcctgtggtcttttccacatagcctatccaagtgcattggaccaattgaaaacagaattaaggactatctatggtcagttatgtcaggatgacatgcctatggtcagaagagctgctgcatcaaatcttggaaagtttgcagccacagttgaacagaatcatttgaagacagaaataatgtcaatatttgatgacttaacccaagatgatcaagattcagtgcgtttgttggctgttgaaggttgtgctgctcttggtaaattgttggagccacaagattgtgtagctcacattcttccagtcattgtcaatttctcccaggataaatcatggcgtgttcgttatatggtcgccaatcagttatatgagctctgtgaggctgttggccctgagcccacaagagctgatttggtgcctgcatatgttcgtctccttcgcgataatgaggctgaagtgcgaatagcggctgctggaaaagtaactaagttctgccgcatattaaatccacagctttcaatccaacatattcttccgtgcgttaaggaattgtcatcagattcatcccagcatgttcgttcagctttagcctcagtcattatgggaatggctcctgtactgggaaaggatgctaccatggaacagcttcttccaatttttctctctttgctgaaggatgaatttccagatgttcggcttaacataatcagcaagcttgatcaggttaatcaggttattggcattgactttttatcccaaacactgctaccagccattgtagaacttgcagaggataggcactggagagtccggcttgcaataattgagtacatcccattgctggcgagtcagttaggtgttgggttttttgatgacaagctgggggcactctgcatgcaatggttggaagataaggtcttctcaatcagagatgctgccgccaacaacttgaagcgccttgcggaagagttcggtccagagtgggcaatgcagcatataattcctcaggtgctggagaagatcaacaatccgcactatttgtaccgcatgacgattctgcaggctatctccttgctagctcccgtcatgggtgcagagatcacttgtcaaaagctgcttccagtcgtcattaattcttcaaaggacagggttcctaacatcaagttcaacgttgcaaaagtactaaagtcacttgtaccgatcctcgatcaatctaccgtgaaaccatgccttgttgagctcagcgaggaccctgacgtcgatgtgaggtactacgcgaaccaggcgctgcaggcgtgcgatcaaatgatggtgtcgagctaactagccgtgtgcccgagtacttagagttcgatgcctcatagtccaattttggattacctgtaatttgttgggccttttagattgaagagttttccgtctagcctcggtggacagatcgacgctgcccatgctgataaatggacggtcctgatccattgttcgttgtgttattaatgttgtataattgagcaggacacaacacgtacgttactctctgtgtctgtgtgtgtttgcatggcattgtctcgcaggtagttgagcaaccacgtaataattctttccagcgcat

SEQ ID NO: 32710 - DNA, 4288 bp, Zea Mays
cgggacggcaaccccagccaaagccaaaacaggcctgcttccttacacctcgcttggtggtctgggcgaccggccgctggcgtcgcgccctcccttataaaccaccacacttcagcacccacagctccctcttgcatcccctcgcccgtcgtctcgccagtcgctacaccccaaaaacctcacgcgcgcgctcgcgacccctcgcgctcgcctcgtcggcacgccggcgagaggggcgcccatccccgtgcctatataaggacgccggattggaggtgcccgtcccttatccgcgcggccagatctacctctgttccacgcctccgtcaccgccgcgtcggggcgatcccaccgaggccacaggtataagctggtaccatggcatccaacacaggagcatcaggatggctcaggggtaaggtgaaggctgtgacatctggagattgtctactaatcatggggagctcaaaagctgagatcccacctgagaagtccatcaccctgtcctaccttatggccccaaggctggctcgccgtggtggagttgacgagccctttgcatgggaaagcagagagtttctaaggaagctttgtatagggaaggaggtcacattcagagtggattatacggctcctaatattggacgagaattcggaactgtttatctaggtgacaagaatgttgcgtactcagtaatttctgctggatgggcaagggtaaaggagcaaggcccaaaggggggcgaacaaaattcgtaccttgccgagctgttgaggttggaggaagttgccaaacaacagggtgttggtcgttggagcaaggaacctggtgctgctgaagagtcaataagagatcttccaccatccgcaattggtgaaggaagtggttttgatgcaaagggttttgcggtttccaataaaggcaagagtttggaggccattgttgaacaagttcgtgatggcagtactgttcgtgtgtatttactccctaatttccagtttgtgcagatatatgttgctggagtacaggctccatcaatgggaagacgtccatcggtacctactgtaattgctgaaactgatgataatgctaatatcgcgaacgctgaagatcctgagggaacacctgcgcaactgactacagcacaaaggctagttgcatctgcagcttctgctgaaattccaccagataggtgcgtattgtggtggaaggcacagacagctttagtaatataattggttctgtgtattaccctgatggagagactgcaaaggacttggcccttgagcttgtcgaaaatgggctggcaaagtatgttgagtggagtgccaatatgcttgatgttgaagtaaaaataaagctgaagaatgcagaacttcaggctaaaaaggatcaattgagaatctggacagggtttaagccaccagcgacaaactcgaagcccattcatgaccagaaatttaatggaaaagtggtagaggttgtaagtggggattgcattattgtggctgatgattctgctccatatggaagtccttcagctgaacgtcgggttaatctgtcaagcattagggctcctaagttgggcaatgctcgtacagatgtgaagcctgaccattttgctcgtgaagctaaggagttcttacgcacgaggttgattggcaaacaagtggctgttgaaatggaatactctcgaaggatcagcactgtagatggacagagtgctgctccaacagcaaacatggctgatacaagagttttagattatgggtcagtttttctgggttcaccatcacagactgatggagatgacacatcttctgctccgagctctgctagccagcctggagttaatgttgctgagcttttgctctcacgaggctttgctaaaacatctaaacacagggattatgaggaaaggtcacactattatgatgctttattagcagctgaatcacgcgctgagaaagcaaagaaaggcgtgcattctcagaaagaatctcctgtgatgcatataacagatttaacaactgtatctgcaaagaaggccaaagattttcttcccttcttgcagcggaacagaaggcattcggccatcgttgaatatgtttttagtggccatcggttcaaactaacaattcccaaggagacttgtagtatcgccttctcattatctggtgtccgttgtcctggtaaaggcgagccatactcagacgaagctattgctttgatgaggagaaggatacttcaacgagatgtggagatagaggttgaagcagttgataggacaggaacgttcataggttctttgtgggagtccaagaccaacatgggctctgtgcttctggaagctggacttgccaagctgagttcatttggcttggataggacctcagatgcttatatcctaacaagagctgaacagtctgcgaagcaacagaagattaagatatgggagaactatgtcgagggtgaaaatgcttccaatggatccacacctgaatctaaacaaaagcaaattctcaaggttgttgtcacggaagttcttggtggtgggaagttttatgttcagacaatgggtgaccagagggtggcttcaattcaacagcagcttgcatctttgaaacttaaagatgcgccggtcattggtgcttttaatcctgtgaagggagagatagtcctcgcacaatttagcgttgacaactcctggaacagagctatgattgttaatggacctcgttctgttgaatctccggacgacaagtttgaagtattctatattgactatggcaaccaagaggtggttacctacagtcgtttacgacctgtagacccatctgtttcctcgtctcctgctcttgctcagctatgcagccttgctttcataaaagtgcccagtcttgaggatgactttggtcaggaagcagcagagtatctaagtgaatgtttgctcagtagctcaaagcaataccgggcaatgatcgaagaacatgatacttctggggggaaatcaaaaggacaaggaaccggaaatgttctcattgttactcttgttgatgcggagacagaaagtagcataaacgctaccatgcttgaggaagggcttgcccggctcgaaagaagcaagagatgggacactagggagaggaagacggctctccagaacctggaacagttccaggacaaggcaaagaaggaaaggctgcggatttggcagtacggagatgttgaatcggacgaggacgagcaggccccgcctgcaaggaagcctggaggtcgtcggtagagactgggcagtgtaaggctgcagtctggcatgctatgaaagttttggacaaccacaaatgttggactctgccgggagttatagatgaggacttactgaggggtaccgtatttatattcggttagaagaagggaacttagcgaggcgaaatcacttttgatattccgtttttacaggcgaaactttctctgttttagcacttttgatattccgtttttacatcgcaagttataaggttaaagatgcattgtttctttttctctcaacttaataaggttgtgtctatgcgctgcggttctttgtagtcagaatataatattgagaagtgcagtgaattaagttaaggattgcatttaattattccagtgtccgtgcagtgacgatttctctcgtacgcatttactgattgttttttttttttggcttgatggtagctttcttcttggacaaaatgtctatttgcagtatatacttagcctgcctctgctggcgctgttgcttgatattccgtttttacaggcgaaacttttgaagctatgcttcgctctgagatagaacatcaatcctttcaagtgctaaacttcacggaggctcgatctcatgaatgaccgaatcactgacctcgacaaactcaaagaggccaagggcttggcggccatgcaagacacgtctgagataaaagttgtgctgttgacgatctagtgctacgcaagatccaaagtatgaaggacaaacataaactgtcacccccttatgagggtcctttcatcatctctgaagtacttcggctcgacgcttattgactccagctagaagatgacacaatcaaccgtttttacgtgtaacttctccattttttgcaataagtccatctcgaacaactccaccgccatgactgagatgttgggggcctaacatcatgtatcaatacattcatatggagctgttacaagaaaattcatatctcgcaaatttcgtcttgaatacttcttgaagggtaa

SEQ ID NO: 32711 - DNA, 1571 bp, Zea Mays
ctctcttccctgtgaactttttcttaaatcaatcgatcaatcacgcgcacaagaaccggcaataaatcgcggaattcccaacgccgcaccttcaccgccgggctccccagtccaatccaacccaaccccagtccggcgacggttccgggcagcgcgcgatcggatcgtcgcgggttcggcttctcgtcgaacggcgcggattcctgcccccgatcggagggcgtcggctgcggcgcctcggcgtctgatctgctgcggtcggcttcttcttgggagaggagtgggatggacggggaagcgatccggatgggtggcggcaacttggcgcccgcctacctctccggcgccgccaccgccaccgccatcaccatgcaggatccgaaccagaaccagaaccagaaccagaaccagaaccaaagccagttcctgttcagcgccaactccacggcgctgcagctgttcggaagcgccgcggggaatgagaacttgctgaagcttcaggtgccattgagcgactatcaccaacagagtgctggccggttagcacgtgttggcaatccgggtgctgtatcgactggtctaaggctgtcttacgaggacgatgagcgcaattcgtccatcacatctggcagcggtagcatggcctcgttgcctgccacgatgtcctgtgtcgatggtttcatggctgaactggacaaggaaagcaaagagattaacttctacttgagactccaggcagaccaaatctgcaagcggatgaaggaggcgaaccagcggtggatggtctcgttcctggcgagcgtcaatcaggcggtggggaagaagctgcgggacaaggaactggaggtggaggcggtgaacaggaagagcaaggagctgaacgagcagatgaggcaggtcgccatggaggtgcagtcgtggcagtcagcggccatgtacaaccagtcggtcgtgaacaccctgaagaacaagctgatgcaattggtggcgcagaacaccaacctcgcgagagaaggcatgggcgacagcgaggatgtagcctccagccaaagccccgacgccggaggagacgccctgggtggtctcaggggcacggctaccgtcgggctgggggcctgcaggtgttgcggcaggaaggaggcgtcggtgctggtgatggcgtgccgccacctctgcctgtgcgccgactgcgacaaggtctccgacgtgtgccccgtctgccggttccccaagagcggcagcgtggagatcaacatgtcctgacaaggacctatgctatgcaaggacgtcgtgtcgaccaaaatcatcatcggcggggcagggcgggggtatacacagtgactagtagatggtgtacatgtcagcatactttttccttgacttgggatttcttcttcagatggtaaaggaggagatcaatatgtcctgacaaggacctatgctatcgatcgaagttggcggggcggaggtatacacagtaactagtactagatggtgtacatgtcagcgtgcttttccttgagttggcatttcttcagatggtaaaggagacgatcaggtttgcgtattgc

SEQ ID NO: 32712 - DNA, 651 bp, Zea Mays
atttggtgtgtgtttcgtctttatatatgtgcttttggagaaagctgataggctaaattgtttgggttctaggcagtagctagaaagagacttggaagctgagaaaagctgctgcaatatattgcaagaacttatctcacaccatttcaaactcgctcgcttctttcttttctacatacattcatagtacatcgatatgtgctccaatttataaaattttaagcgaaatttcttgtggatggtgaccactaccaagtctggatcgtgagtagtacttgggagatactaatcattgtttggtatactaaaataatctgttgtggttctatgcattcagaatatgtgttcatgattttatttttgaggaattggatgatgtgttgtttactatcctcggggctacatggtgtgggctgtgaaggccggctgatgtacatagagaggctagagaaggtgtcctagagtttgagagagcttttagggagaggttctctgcctacacattagctgctaagaggcatattgactccactaccatcttcgatgtccaaggggctcacatggatcaagcaaactttgagaccgtgccgaaagcatgccatccctggaatccttcagttgggaaagcacaaagatattagtaaagtcgag

SEQ ID NO: 32713 - DNA, 3486 bp, Zea Mays
caggcttcagcggcgctagctcagctgagacctgagagtgagccgtgagtgacttcgctacaatgggtcatgccgtaatcaaaagaaggactacattttcatgccaacattgaagataccgccttccattattgctgggtaagttggaacagaggagtgcgtattcaagatgatggacatgaggcgccactctgtgtctgtggatgccccactgtcaagaaccttggtgcagctcaagcgagtgaggtcgctgcgggatccagcgacaaactcgatgagcaagtacgcgtctccttccgatcacatgatctgggagactgcttctagcaatggggtgactccggagcttggcaggtcagcacaccatcacctggttggggaagacgaagatgtgggagctgagcctactacaatggggtcagagcggagtttccggggaccaagcgcaaggactgcatcgtataggaaatcttctgctgtcaggatcagaggactgaacccaccaagaagcaagcaggttcaccgtgtccgccaagacggccaccgcaagtcattggattctaaccactcaaaccatagctctatccgtcaattggcagacaatatggtcagcaatgtggatgcagataaggaagagggggaagtgaattcctatgaaagaccaaaacttgcaatgccagataagtctgacgaagaggtgaaaatgccaggctgctccaaatccaggagcaagtcttctgctgcaatgagccgtgttgggagcccctgcatgtcagccagtgaggcacgctcagttgggtcaagaagaagcactttggggcatggaaccgaggatacacgactgaggtcaaatgatgtcgtgggatccaatttcagtggctgtggtataagctactgctggtcaggagcgtcaaagtaccgggagctttattctgacagcgatggtccagaccaacctctcttatccacagatgggattgaggcagcattccaaggcaatgtaccatacactgagacactgaggtgtctaagccagaagttccgccctcgttccttcagtgaactgattggcctaaatgtcgttgcccagtccctcctatattccacttgcaaaggaaaagttgctccaatgtacttgttccatggcccccggggtacaggcaagacatccacggcaaggatttttgccgcggcactgaactgtgtatctcttgaggagcaaaggccgtgtgggttctgtaaagagtgtgtcattcttttctctgggaagagcagagatgtgaaagagcttgacgctgcgaaaatggatcgtctaggccgagtgaaggcacttctcaagagcgcatcgctcgtgccatactcctcgcgcttcaaggtcttcatagtagatgagtgccacctcttgcgagaagatgcatggtcagcaatactgaagagccttgacgagccataccggcacacggtgtacattatgatcacttctgacatagaaagcctgcctcgcgcttccatcacacattgtcagaagttccattttccaaagataaaggtggcggatattgtctacaggttggagaggatctgtatagaagaaggattggaatttgaccatgatgggttgtacttcattgctgcaaagtctaatggttctcttagagattcagaaataatgcttgatcaactcagtttgcttgggaagaaggtcacaatttctcttgtgcatgaacttgtaggatctgtgtctgatgatgagttgattgaattgcttgatctagcgttgtcatccgacacaaccaataccgtaagacgagctcgagaacttatggggtcagcaatcgatcctctgcagctggtgtctcagttggccaaccttattatggacattctctcagggagatgtcaatctgcagtcacggaagtcagcaaaagtttcttgggtagatatgcattatcagaggttggaataaagaaactaagacatgcactgaagatactatcagaaactgaaaaacaattgagaacatcaaggaatcaggctacttgggttacagttgcgcttttgcagtttagcaccaatgaacctaaccctgttgctgaaacaaatgatatgcatgcacattcagtaactggatatacagatgactgggtttccaaggtgcactcaagtgccaatttttgccaggcatgtaacagcagcaagtccaactgttctgagagacactgtaggcggcttaagctcgagaacatatggaggagagccattggaaagtgtcgatctaggtcagctaaaagtttcctcaggaaagaaggcttcttatcgtcggttcacgtcaccgaagagctggccatagcagaagttggttttgaacacccagatcacctgtcaagagcggagaaaatgcaaagcctaatagaatcctctttgcaacacgttcttgggtgcaatgtggagatcagattcaaactcgtgccatgcccagtgagcaaagatgctaggttgaagagacagccgttcagctttctcaactgctctggccggaagcaagagctgtcagattcagtcgtgactgatgaagacgaagctgcgagggggcctggagcaagagagacaccgcttaaaggctacacctctagccagcaggaatcaccatacaccatgcgacgtgtcgattcgaaaccaacaacggtccacggttgcgaggatgacgcccggagtaccttgacgtcaagcagatccacggcagatgacctgacaaggacgtgcaggtcggagactggctacccaaagggtgtgcgtgagcagggccgctctgatggcacgcagcaggagcctgacctacagccgaactgcttctcgcgaacgctcaagcttcagaagaagctgctgtcttctggcgcagcgcacaccatctgtctgagggtccagccacataacaagatggatttcctgcctaagaaagagttcgatacgtacttctgcgcgtatgagccctacgagcagtgtccaagatcagattcaagagctacttacagttcaagagacgatgacttgtggagcaagaattcacgctttggctcgaatctactctgctggagagccccaaaacagtccatgtaatggaggaaagaacgagtgaactgggtggaacaaatcgattctgctacgagattttaccaattttgcccgaagctggagacatggacaccacccgcagctgcggggacaaattttgaagggaagtctaggaggggtctgtgctattcttgatcttggtaggcagctgaggattgaggaactatttagtgatgttttcttggaaatgcagatcctttataatgctagtgggcagttgtacagcgcgccagcgacgaaaccctgtgaattgttctgttattctgaattttgtaggacgatttgatgctctctctctgaatttacatgatctttttattagctgaatgattacagtgtccagaaaataggcc

SEQ ID NO: 32714 - DNA, 2586 bp, Zea Mays
cccacacgtcatcctcccctaaaccctccgccaccttttcccgaaagccctgccctttttatgccagcccgaaccatccgggtccggggcatcggcattcagcacagcagccacctcttaccacgccccacggcaccaccccaacgtgatggcggtgagcaacaacatcacggcatgcgtgacgctgctggcgctgatctgcgcggtgcccgtgatcgcgtcgggggtgtggttcgcgtcggcgcagggcgaggagtgcgcgcgcctggcgcggtggcccgtggccatcctgggcgggctgctcctgctggccgcgctggcgggcttcgtgggcgcgtactggaaccggcgcggcctgcttgccttctacctcttcgccatggcgtcgctcgtcgtgctcctcatcgcgctcctcgccttcgccttcgccgtcacccgcgggtccggcgcctaccccgtgctcggccgcgcctacgacgactaccgcctcgacggcttctccatgtggctccgcgggtacgtctccgacgaccccgggcgctgggacaaggtcagggcctgcctcgccgtctccgacacctgcaagaagctcgcgcgccaggccgccttcaccagcgcagaccagttctatcagtcgcacctctccccgctccagtccgggtgctgcaagccgccgtcggtgtgcgggttcagctacgtgagcccgacggtgtggtccgccccggcggcgcggccggcggcggacgcggactgcgggctgtggagcaacgacccggggcagctgtgctacgggtgcgagtcctgcaaggcgggcctcctggaggcgctccgggaccagtggcacaaggccaacgtcgccctcgtcgtcgccaccgtcgccctcgtcatcctctacctcgtcggctgcagcgcctacaagaacgcgcaggccgccgccatcttcggacgccgcaagtattagctagctagctgccatgttagtttttttttgcgcttttttttctttattgtcatgtgggttgtggattatggattgcgtatgtgtgtcccccctggtggagagaagcatttgtagcggtggcgtggtgtgtgtttccggacttggttcatcatggtagtgtgatacatgtgtaagattagttactttaattactaattgtgctgttttcctctttccctgttcgccgacgagtaatgtatctggtttgaagattagttactttactaatggtttgaagacgactaagggcttgttcgttttgctctcaatccatgtggattgggtgggattggatgggtttcaatcccaaacaagtcaaaatcgttcacaattttttccaatcccatccaatccatatgggataggaataaccgaacaagccctaatagattatagatgtgggttgggcctgtggaaagatcaccgatggccttggtagacggcagtagtaatacacaggggagcaggatgttatttgtttggcaatggaatggagacacgccttgccgtcagtagtgctacacccgttgctcctcgtcccgtgcgtgcttgggcggctggccgtcagcgtcaggcggcgggtggcacctgctgctgaacaccctgaaggcggagacgagtgagagcgcggcgaagcaggccagcgcggcggcgtgcagcgccagcgacaccgtggccttcccgcagaaccggccgaagtaggagcacgcctcgccccacgacacgccccggtcgccgtgccgcgccagctgcagcagctccgccgccgccgaggccgacgtcaccagcaggtataagtaactaataaagagcatgtactgtacgtcgaatagagaggaagaggagaagctaagatggtgtgctgggcgggcgagacagagcgacctgatccatgacgagaaccacccagtcgtagcgcgcggcgaggggccgcttgaaggacgacgccaagacggaggctacagcgtaggcggctgtgacggcgttgacgccaaccaaatagctagcaaaacgacatcgatttcttttttttagctgctagcatcatgcatgacgatgcgctctctctcaaggagagaactaataatccaacacaaaaaaaaaattatgctacagattcgagcagggtggagaggaaatcaaacgagagtgctagcagtccaataatgaagggttcagttgtaatgcttactactggaaggccggtctaaataaactacacaccaattgatgccggcggcggcggatcgatgctttgtacagacctgaatccggagagatcggagaacttgacctccccgtaggtgtcgtctgcctgcgcgttggtggccatctcccacagggaggccaaggagagcgggacgacgcagagcctgagcgccatctcggggaccttgaggcccgccgccatgatcctggactcagcgtgtgcgcgtgccgtgctgtggaggaaggggaataagaagaagaagaagacgacgacgaccgagagaggaccagggcttgactggtgcacgcacgcaccaactccataccactagcgtacaaagcgatgaatgcgcatgggctggcccatggaatgtatt

SEQ ID NO: 32715 - DNA, 2845 bp, Zea Mays
aatcacattaaggagcttgagcatcagctaactaatgctcattctaaatcagaagttctaagtcagcaacaagaagaaattcacttgtatgttgttgctgttagagaagaccttaaggaaaccctaagattcataagccatcaggatcaggcgatcaaggaattgaattgtgctcatccaatggaatttcaagcagcgcagcgactggtcaaccatctgcaacaaacggtgcatatgctcaatggcgccttttattctgccccaacaccaacggactaaaaggtacctatggagcatggaaacaaacatctggcagatgtgataactggagaagatatagcaggcaagttaatcctcgtgaggtaatataactatgtaaattagttttgaagggtgggtgtaaggtaaacccatatggcaatgttagctagtaaaaaaaaaacaggttaaactttgttgtaaagagtttatcctgtttcacctggatcatgtaacctgtgagcttttctatgactatggtgtaagaaacgactgcctgtttcagaggcaacttttaatatctatagtagtttgtcaaacttcaagagttatgatggctattcctttggatattccatgcgaatgcgcgtgtgcggataaatgacttagcacacgctgagaccataatttttaattatgttttgtgatgaaatggtatcacctgatttcccatgtgagtttggacaaatggatagactttatccaaattagatgcaacatcttggataaaacacagaaagatatcaagtcttacagggtacagtggaactacccccacagaagatgaaaccatgtagatggtcagagggatatttagaagacaaagtccttgccctaagttttgagtttttggaaaaccttagggtttgtgaattttaaaccaacagtggcacacccctgtttggtaggagaaattgggaaataagtttgtgacacatttccttttccgttactgagcctagacttttaaatctcgggacgagatttcttttaggggggaaggctgtaacacccctggtgttacgtaaactaaaactctgacatgtcatcataagcatctgcattaatgtgcttgttacacctagaatgcattcactaggtcaaaaattttcaatgaatgtggtgttgtgtataagagtatagggctcagattaagaactttgcttaagacatgggaagagaagtcgtctcttgagcaagtagtaagctggcttaggatttaaagtattaaaggcaagtcctagagtctatagcaaccttgttttcaaagttagatcaagtggaagaaatacttgggccgaaggattgacctcaaaaccctaagtgagatttgaaaaccttccttgtgatttgtggataagcaaagcaactcctaaaccaaggacactttggacatgagtttcatgtactagagttggattgagttgataaatcactagatgaggagtcacatttgaaaccctcaactagccctaaagtggagttttaaatctagagagaatttgctagtggtccatatatcaaagttgtagattttggaaagttgaacaactttcatgtatggagaattccaagttttaggggaaaagttggagtaaaaagtttaattcagttttgaatcagatttgaagtttgctgaaaataatatcaactagctatttttgggccttcataacatttgatctataaacagtttgaagatgatcattgtaacaaagttatagagctacatgaggagtataagtttggttaagtcatatagctctaaaactatatggaactttgagtaaaactggtccaaagtaaagctgtcaaaaattgtggatttcagacttagtgaaattcagattctgaatttcagcaattggagcaaactttgggctattgtagtttggaattcaagaggttttggttagtagtcactatatcaaacttgtagaggaactataggagtataaactttattaagcaacatgcccctaaaaacagttggaacccaggaaaaagagtggttctacgtggtgctgctgtgtttctgaattttcagattggaaacagtaactgaaactgaatttcagtgttttgatagcagttttgaagcctatttgtggccattctataaggttttgtgttgtggtgtttatagtggagttgaagcccatatgatgttgaacaagtttattcaagtgagtttgacctgatcctacacagaaaatggagaaaaacttgttcaaagtggactgtttgtggctgaaactgaattgtattcagttactgaaaactgaatttttgtgaaagttgctgtttttggagcccatttgtgcctaatccattaggttttagactgtagagtatatataggaattgaagaccacctaatggtgaacaactttattgaaggatgatggacatgatcccacataaaaagtgaagtagcagctgctcaaaggttggactgtcaggtggctagtgacttagtctattcagaatttaaagcctgaaatcagtagtgatgcaaagtttagagccctattgtgaccaacccttgtggttttggactatgaactatgtggcaaagttggagtccatagtacagagaataagttttatgaagagggttagacttgattctacacaaatatttgattaaaggttactcaaattggactgtcaggtttatgggtcctcatcagataactctgttctgaatacctatctgtctgctccactttgtgggcttgcaaaggctgttccgtgtagctttgtgcccaagtatctacagcaaagtgggagaggtagtatctat

SEQ ID NO: 32716 - DNA, 2282 bp, Zea Mays
attctaaactctactgccgtacagtctatgcaacgcctgaagagcacggcgctgcccggagaaggatgcgtgtaaggtgtaactatcgcctactgcagctcaggttgtttctgatagtcttctcttctgccgtccatccggcctgcgcgctcgctctcctgctcttctgcgccaactgggcgaccgccgacgccaacgccgacgacctacgccaggtgctgggatttttgtcggttccttcggcagctttcgtcgcgtccttcgccggcgacgagcactcaccaggtccgctcctgaagaagactgggatattttgcatacacagaggatcatctttccgtttgatgaactcacgggaatggtgatgctcattttctaaaggaccggtcccctttttgtttaatttccaaaggtaccatgattactaaataatgatttattagaaattaatgactgatggggtcaagatgtgtgaaactgttaagagcttgagatctgctgattgaccacacccaaaagggaaaatgaaggtggtcttttgaagatttgatttactttgtaaaagggcataattttgtgataactgggaatcattcctcaacaatactgataaaacttcaagtttttccttgatgttgaactgctacctccatgcctccattgtgccacagtggatatccatttggtgctctgtccctatcatctagttgtggtgatggggttcaggcattccctagtcgaaccccctcgctcacccacccaccctggttggaagactccgttgtgattatccataacttttggttgaccttacatctctaattatcgtatttcatggaatgtgtatgctattcgtactgggacatatatataaagcagtgagccagtgaccactgttccatgctctactgaagtgcccttctatgttttcccatgtttatcatttttctgcaatcaattagtgtattacagtgaaagtgaagtactaaaattaggagtattggtaccacttctttctgtgctcatgaattagtttattttggcaatttaatgaggcttgtctcatgtctgattacttcttctgtttctttccctggaatcttgcctcttccaggtgtagaggacattcagttttctccagttctccagttcctggatagcaatggcaaatgagtttcctgatgaagttcttaagtctgttttcccattgctggatggtaaagatctagtattctgcatgcttgtatgccgtcaatggcatgaaatcgcaagggatgattacttctggaaatgcatttgctcacggaagtggccgtccatttgcaaacagcccccttctggcgcaaactacaaaaagctttacttaaccttctctaagccacgggagatgcagaacctccctgtgccaaggcttacattcgaggatattgttttctacattgatatgtggctcgaaggatcgctcatcttttctcaagcagtttcaggccgcactctccgagcaggcctacagggcgctccccctcctggcattccagatatacttgcagcacatttgagttcccaagactgcatcttgatgctggaagtagagcccaagttggcagttcccatggggccagccatcactgtatctgtccttgccaaccgcaaggattcaaacaagatggcttgcatcataaacaagtcaacgtttgattacatcgatagtaatgcagcgcgggctctggcttatgagtatcttaggttttcgcccagacaccctttcacatccgacatccgggcatggatgtcgttacttttcctgtgcaaaggggcgaacaccattgaggtgtttggtatcgagctagatttctgtgacgccgcgaagtcagagaaagaaatcttgtggctcctagacatgcttgattggaaatagaagctccttatcccctttggggtttgacacatgtaaagcctgttcatggttagtcgttcctttcctgttggaccatgtacgctactactccctccgtttctttttagttgtcgctggatagttcaattttgcactattcagcgacaactaaaatgaaacggagggagtactgaactacataatctcctgagaaaatgtaataaatgtcacctgctactccatgtgctaacaaggcgaggttattttgtacttctttttcccttgaaagtgttgctcatctttacgtagcattcggtgatgagtttctttacgatgtcattttttgttgcagactatgctgttgttcgtcataagttttgtgtat

SEQ ID NO: 32717 - DNA, 3497 bp, Zea Mays
cttgctccactggtcgcctgctccctccctcccagctcgctcttatatctaccggccttcctcgccgcccccatggccttgtcttgtctccagcagaggttagcgaccagagaccagccagagccagcagcctggaccaaggcaagtagcgcactaacatttctctgttcttggcctgtgtccctgatcaactcagattggccggacgcttgggacgctgccgcctttttttttgggtaacggtgctaagagtgtgatggtgtattttaaaatgcatttctggttagtccttgtgctctgcagtttccgagcatcaaaatccctacctctggatagagatatacttttgggcatcagaggctatctgaaagatccacagaattacctacacaactgggatgaatcccactcaccgtgccaattctacggtgttacatgtgaccacaattctggcgatgtcatcgggatatcactctcaaatatctcgctgtcaggcactatatcatcttcattttctcttcttggacaattacgcactctggagcttggggcaaactccatctcaggaactgttcctgctgcgctagccgactgcacaaatctgcaggtacttaatctgtcaatgaacagtttaactggtgaattgcctgatctttcagcattggtcaacctacgagttctggacttgtcgaccaatagtttcaatggggcattcccaacatgggtcagcaaattaccaggtctaactgaactaggccttggagagaacagcttcgacgaaggtgatgttccggaaagcattggagacctgaagaacttaacgtggctgttcttgggacaatgcaatcttaggggagagataccagcttcagtcttcgatttggtatcactcgggacactggacttctcacgcaaccaaattactggtgtattcccgaaggcaatatctaaactgaggaacttatggaagattgagctctaccagaacaacttgactggtgaaattcctcaagagcttgcaactctaaccttgttatctgagtttgatgtttctcggaatcagctgactggcatgctgcctaaggagattggcagcctgaagaagctgaggatattccatatataccacaacaacttctttggtgaacttcctgaagagttggggaacctgcagtttcttgagtcattctcaacctatgaaaatcagttctcaggaaagttccctgccaacctgggtcgattctcaccactcaacacaatcgacatatccgagaattacttttctggcgaatttccaagattcttgtgccaaaacaacaagctccagttcttattggctttgaccaacaacttttcaggtgaattccccgcttcttactcttcttgcaagacacttcagaggttcagaataagtcaaaatcaattcagtgggagtattcctgctggcttgtggggattgcctaatgctgtgataattgatgttgctgataatgcatttagtgggggcatattttctgatataggcttttcagttactctgaaccagctgtatgttcagaacaactacttcatcggggagcttccagtagagctagggaggctcaccctgcttcagaagttggttgcttcgaacaacagactctctggccaaatacctagacagattggaagactcaagcagcttacttacctacatttggaacataacgcattggaagggccaataccacgtatgtgcagtagcatggttgacctgaatcttgcagagaattccttgactggggacattccagacacactggtctcccttgtctctctgaattcactcaatatatcccataacatgatctctggtggcattcctgaaggtctgcagtcactgaagctgagtgatatcgatttctcccagaatgagttgtctggcccagtccctccccaactcttgatgatagctggagattatgcattctctgaaaatgctggcctttgtgttgcagacacttcagaaggctggaaacaaagtatcactaatctaaaaccttgtcagtggtccgataaccgtgacaacttgtcaaggagacgactccttgttctggtaactgtggtatctttagttgtcctcctgtttgggttggcgtgtctaagctatgaaaattataggctagaagagctcaacagaaaaggggatactgagagtggcagtgacactgatttgaagtgggctctcgagacattccatcccccagaacttgaccccgaggagatatccaacttggatggagagagtttgattggctgtggaggcactggcaaagtttacaggctagaattgagcaagggaaggggaactgtggctgtgaaggagttgtggaagcgtgatgacgcaaaggtcttgaacgctgagataaatacccttgggaagatacgccatcggaacattttgaaactcaatgcatttttgaccggagcatcaaattttctggtttatgagtatgtggtgaacggcaatctgtatgacgctattcgccgtgagttcaaagctggacacccggaacttgactgggacaagaggtgccggattgcggttggggttgcaaaggccatcatgtaccttcaccacgactgctccccggccataattcatcgggacataaagtcaaccaacattctgctggacgagaagtatgaagctaagcttgcagatttcggtatcgccaaaatggtggaaggttcgacgcttagctgcttcgctggtacgcatgactacatggctcctgagcttgcgtattctctaaacgcgactgagaagagcgatgtttacaacttcggtgtcgtactgctagagttgcttacaggacatagcccaactgatcaacaatttggcggtgaaaaagacattgtgtcctgggtttcattccatttggcagagaaagaccctgctgctgttcttgacccgaaagtaagcaatgatgcatcggatcacaatcacatgatgaaggcgttgcatattgctattctttgtaccactcagcttccatctgaacgaccgacgatgagagagatcgtgaaaatgctcaccgacattgatcctagctccacagctaggagggcaaagaacaagactgataagtaacagcgacaggctttgtcttagtaaaatatactagtaataaccataatgtcagggcctcttggcaccctgtagcaatcatgggggaagcttattaggccgtcagaatggctgattagttaatagaaactagagggctggtaaaataatatggaggtatagcctatgcaatgcttgtccatgtgtaaaagctttagatcatgtacaaattagtattgtgcaccgaaagtttaggtattgttgaatatacgccgaaaaaacaatcataatccatgataacgctaatgggtctttaggataaaagtctattagtaatgatccatatatacaaagacgttgacgtgcttgagagatcatctgagccgcc

SEQ ID NO: 32718 - DNA, 2080 bp, Zea Mays
gcacgtgccacttgcagaaacaggaaaccagtagaccacgcccgcggtgcggtgcggtggatccgccaacaacgggcgcccgccccgccccccgcccggtctccggttcccgaacccccactcctcctccctctccgctcgccactcccgtcgctcctctcctccacgcctccctcgctcgctcgccccctcgtccggtcgtccctccctcgctcgtcttggcatccccgcaaggaatgtcccttccgtagcgtcccttgcttcttccccaccccatcctgtattagtgcgttctctgccgctttattttccggtttctttgggctctttcgccgccttggatcttggttgcctcatccggttcataggtaccttctttaacctttgctgggactccattgatgcactctttggttgtttttcggtggagcatttcgtcgaacacaggggcggagggcccagtatggtccagaaatcaaagtaaaaaaaagccctagtgtcttcgcatcgcgctcccgcacacagaccgaccagccgcagcccgtggcgcacctgcctgcgcccgccgcctccgtcatccactcaacctcgcccctcggccactgccgcgcggcgcccgcccgcctgccgcaccggccgaatcatccgccgtctcgcccgggccgccgtcgttgctcgtcggtgaacgacgtctcactggattagcattgaagggttatccaatattcagtgaaaactagctactgaagaataggagtagcaatacctttgatgccccataaccccattcattagtttctgcaatgtctttgtcttctatttgctgtgcgaagttccatctactaaggaactctataggagacacttgcagtgtcagatggcttaaataccatagcagattgatatatgaaactttcctctcaagcagaatacatcaaagtaggcctcctagtacaacagtgctagcaagaagcacaagaaaaggaagtaagcagtcatttagcaatggccgccatttgcacagtaaatcggttgaatcatcaattgaagtgttcaagcagtcagagcttgagcagcttaaatcacttcattgctacaatgttgaggaagagttttctgaagtcaagaccgaatggcctgcaactatccttgtttttgatattgaaactactggcttctcacgtcgtgatgacagaattattgagtttgctgtccgtgatcttatggggggaaagaatagcacttttcagacactcataaatcctgagaaagatgtgaaaaatacatatgttcatggtattaacaacagtatgctctgcaggcctgatgttccaagatttggagagattattcccattctgctacaatatgtgtggagtcgtcaaatggacggtaaaccagttctctgggttgctcataatgggcgttcctttgacgtaccctttctcatgtttgagtttcgacggtgtaaagtagaaatgcctggtgattggctctttgtggatactcttcctatcgcaaaacaattggtcgattctaatgggtcaaaactcagttctgtgtcattgaagttcctgagggaacgctacaaaatcccactcacagggagcgcgcatcgtgccatgcaggatgtgacaaccctctcttacgtgcttcagaaattgacctttgagctgaaactaactgttcctcagctgctcgagaagtctttccgagcatcggatcttccagctaatcgtcctgcaaagtgactgtatctgcctcacctgaatatcgcctgaagcactaaattattatcaccgccgttttcgaatatttgtcgtctgcaagtttatttttgaactaaaacacgacaaaaaaagagggagtacattgttgttgtattattacagagatgttatttggagatcccagctctgatttcttctatgttctttctaacaacctaataaagccagcctgattgccactgatacatcagtagcacagtaatccgtattactgatactctgacattgtaggcttgtatacattactaaatcatcaattcaacatatatttacttgactgcgaacttatg

SEQ ID NO: 32719 - DNA, 1963 bp, Zea Mays
gtccccgcccgccctcccgacatcgacgccttcctccctcacgtgccacaccctgttctcccgacatcgacgtcgggtccctgcctcgtctggtcctctcggtgtgggaaggaaccaaaccgagatggaggcagagtgcgacgcctgccttccctcttccgccgagcgcccgctgcgtcattcttgtccctcctcttcatcttcatcggccaaccgattaccactgaatccagccatcggcgactgtccctcggtttttctttaacgatttccgatttgattccatggccggctggaccgattccagcgcatccctcctcctcgtgatgcccgctccccaaggacctgtgcctgcggcagcgggaggagatcaggacgctcaaatacgtcatcctattcctgcacgtggagccggagccagagctcgaccgccgcctttgggacgatatttccatgctcaccgaccagatccagtgcctcacgcaggagctcgccgctcaggttaaggccgagaagcactcagcaaggtcgtgctttgacgaggatggatactgatcttcccctaggacgtcggggtttaacgaggataccgctttctctctggtgtgttcgattactccaccatctcactctcacagcgaaacgattggcatgtcgatacgctgtttccaaaacaattgggccctgtgtacctctccgccattctcgagtatctcaccgccgaggtgttggagctggctgggaacgctgctcgtgacaacaagaaccgtatcgtgttgtgccacatctagctggcggtgcggaacgacgaggagctgagggttcgaaggaagtagcagtgttttttgttcctagagggaggaagagatggcaaagggggaggtgccggcgatcgggattgacctgggaacaatgtactcgtgtgtcggcgtgtggcagcacaaccgcgtcaagatcatcaccaacgaccaggggaaccacaccacgccgtcctacgtcgccttcaccgacaccgagcggctcatcggcgatgccgccaagaaccaggtcgccatgaaccccaccaacaccgtatttggtacgtgtcagatgatatcctcttcacttttgttttctttcatttcactgaacttagaatgcccaattagcagtctagcactaaggttgtttgattccatgctgcgggattttccactaatgatcgatgatgcggagttttacttataatcatttgctgcggagtttcacattgatgtcgacgcttcagatgcttgtagatctatcaaaatttgtttcagtgggcgacttctgctctgtttctatggcaacatgagcagcactaaacttggagatctgatttgttcagtgtgagcactagctacttgtttatgttctagatttgagtaggatcggatggattaacgattaggtggatgcgagctgatttgtggaattcgtcgaactatgtctctggtgccttcatgtaatcctttttgaacttcctaatagtaactgcagtaagagttttttttcgatcagatttgcaatcagtagtttccattgtcgcccctggtatagccattatatatctgctttgatggattgcacattttttgaactgaatttctactggaacgctgtccttcagaaattgtcactgtcagcttgggtagtaatttcacactgcagtattcgaaaatataccttacctgatcattgaaaatataccttagctgatatgccatattgaactgtgttagactccttgctgacagatgtcgctcttcctggatgcatgcagacgcaaagcgattgattttatagcaaacaactacaaaatcgtggtagaagttgaattgcttctgtttctgtgggaacagtaaacactgaggtaattccagtggcatagcttcgatgctatgtatgactttctgaagaaaaactgggagatcacaagatgggt

SEQ ID NO: 32720 - DNA, 1208 bp, Zea Mays
ctcgtatcgtcccgggctcctctcaaaagatcacagagagagaaaacgaaacgccgctccctcgcctcatcccttccctcctcctgcatcctacctccctggtgcccgtcacgttcaccacgttcgcccgctcattcaccggcggcgtcgcccagctcggcctcccgccgcccacggaggccaggtccccgggccgcccgctcggtccgccacggaggcaagcttctggaggcttctcatatctatatgagccgttatggtggttgggaatgataactatgattctaggcgaggtagccaattttgcagcatatgcatttgcccctgccgtacttgttactcctctaggagctctaagcatcatatttagtgctcgcacacttcattctgaaagaaaatttgcacatgtttggcgttgttggttgcatactatgtgttgttggttctgttggtatagttttgcatgccccaaaggagagaaaaattgattctatgaaggaaatatggcatcttgcaacacagccaggttttattgtttattcatgcgtggcagtggcctgcgttctttttttgatatttcgggttgttgagcgctctgggcacagattgatgcttgtttacatagcaatctgttcattaatgggatctcttacggttatcagtgtaaaagcagttgctattgctttaaagctatcatttggtggatcaaatcaattcatctacgtccagacatggttcttcatagtagtagtcactatttgctgcttggtgcaattaaactacttaaacaagcgcaggagaactgcgcgtcatttcatttaaggaagaaaagaggtacaagggtcaagagtgacccgaaacacaaacaccaacacacacacgcccccccttaaatacaaccgtcacgccacatcaatgaagaaaggcgaccacaacttagacaacctacagagctaactaagctccaataggaaccgacccaaagacatgttcctggagcttggaagctccagccaagcaccaaagcccaccctccacattaacagcttttagcacttcctcaacacatggtcttgaattgtcaaagacacacctgttgcggtgtttccaaatctcccaagccaccaatgtaattagagaattgaggcctctacgaagccccttgggaacagcagcaacagttttcttccaccaacctgagaatcgag

SEQ ID NO: 32721 - DNA, 920 bp, Zea Mays
tatcaggagcctgggcactcttcgacatcaaagatggatcatgaggtgttgcaaggaggtagtttcaatgaagctgttgatcttagaaaagaagaagttgagcagttgatagttaaccttatactcgacaatgttttgaaagaagaatttcagcacacagcatattcaaccaacgcttatgttaccttaggagcattgtggaagccagcactacaaggaaacagagtagtcaagcttgagattgctattgcttctaaagatagagatgttagatccaagggcgcaaaacgaggtcgcatgagtgatttggaagccaaactagatgaactgcgtagggatctgtcatccacgggtagcgatgccatatttccccatgcagttcttactgcgcaacaaatttcactactgagcagccagaagccaaccactccagctgagctagaaaaggttatagggaaggtgaagacaaggaagtacggcagcaagatcattgagctgatgaggtcacatgacaattcaggaagtggccgaggcaaggaggctggcgatgaacacagagctaagaagatcaaaacgaaggatgaggatgttgtttgtgttgagagtagcgaggaagaatagaatatgcccttcacatacttggctttttagtctatcatctcatggttaattattttgccaatcatttcctccgacgtcatctttctgtaatttagactttcacggattaatgcacagtcatatttcttacagagaaagcctcgagcatccttttgaccggttcatagtcttttgcttcggtagctttgtatcttgttgatgatcggattaatgtgcgaatacttgggattaatgtgcgaaaactttgtgccaagtgtttgaatgtactatacacatgctgaggaatatggtaatcggta

SEQ ID NO: 32722 - DNA, 4217 bp, Zea Mays
ttcagggacgtgtcggacgccctttcaccctgtatgtgcaagagagtcaaagcatcaaatggagatatgggggaaatccagacaccctaatgttgagttgagagcattttgctcaaagcattctgcagttggttacaccagttctgtagagaacagtaaccttgcttccgaactgaatcctagaaaatctggcccagacaataccaccctcaattctggaaaaattccaatactaaggttcacgcgcaaaaacaaggataaattcaccaattgtggaaccagtacctctagttctggtaacctgatcagagtcaagactatagagcaaggtgctttagctaacacagttagaaatgcaaatactcaacctattcaaatctgggaaagaggtactggtcatccctctgttggtggggatcatatgggaagttctggtgatattgctgtagtgcttagaaagctaattgacagcggaaaaattagtgttagtgatatagcatctgaagtcggcatttcttcggaatccttggaagctgctctcgtgggtgaaactaccactttttcccatggtttgacgctgaaaattatgaagtggctccaaaattatgtgcaaatgcatagtgctcaaggagatgtttgtaaagggagctcagaggtggtgcaagagagcaaatcagacagattggtcaccacagatactgtcgatgtgaaaaatccattggtcctagatgatgacaagggtgtaggtgtacttgttgatttgctggattcctctgtaactgaacctgcacaaacaagatctgaaagcaatagtaagattttgaatgaaaatagtgcaacatgtgcaactggtgtgactattttgcaaaatggcaaaaagaacatggttaaagaaggttataatcctgagtgttctgctaaagaatttgcaaacgaatctactcaggacttctccccaatcagcaacaagtatgttttaaaggatgaacatggaatattgatactgaacgccacctctggaaacaaagaatttggtacttccacagagataccaaatgaaaaccaaggtgcattacgtggaagaaaaattaatgacttaactgatgttgaactgggcccatgcttggagaaaggagtatcttcacatgatcattgttttgttcggggtgataatggtagagatagggtagattcagttgaaaatagcttcaatgctcgtgattgtgattcaaattgctctcatggacaaccttttttcaactttgatgattcacattcttatattcatccattcattcagaaaaagatatctcatcattgggacattactttcaatcagaataaggaagctctgaatcactatatacaagagtcatcatatccttcccttgagaaagtaccaactgattcctcggtagaagtagagggtacagccgatacaactgcaacaggtcaagttttgaaagcaaggtctttaaaaattcttgagcattcacctgatgatgaagtagaaggagagatggtatacttacaatctaggctgcttgacaatgctgttgttctgaagcacagatatgaaaaattgatagcaatggttgtccaaaatctctctcgcgagctggatgccctcagtaaaagaaaatgggatcttatttttgtgaatcagttccttcgtgatgtcagagaagctaagaaacgtgggagaaaagaaaagagacataaggaagcccaagctgtactagctgcagctgcagctgctattgcatcctcctcacggaactcaaccgtgagaaaagatgcaaaggaggatgcaccaaagagttctcccaaacttgctgctggatcttcaagggttgggcaacggacttcattgccacaggctaatgattcatcaaagtcatccaacagcaaaatatcatcggataaaaaatctggaagttttcttctgccaatctcctctaaagaaaatgggttatattgtgatgtatgcatgcgaactgaaacattgctgaaccgaatatttgtctgctacagatgcaaggctgctgtgcacataaattgctacagaaatttggagaattctattgggccctggaactgtgaactttgtgaagatcaagacatttcatcagaagctgcaaccgttagcgataaatcacattgtaatggcaagaaattaccctttgcacagtgtggcatgtgccatggcacatcaggtgcatttagaaagactgtagatgggaagtgggttcatgctttctgtgctgagtggttgttggacaccaagtatgtaaggggacaagataaacctgtagaaggaacggaaagccttgtagagggaaaggacacttgttgtgtctgcctccacaatgttggcgtgtgcttaaggtgtagcagtggggattgcaacattacatttcatcctacttgcgctagaagttgtggtttttacatgaacacaaaagggtttggtactacaccacagcacaaagcatactgtggcaaacacagcgtacaacagaaagaggctgatgcacagcaatatggacctgaggagctcacgagcatgaaacgaatgagggttgaattggaaaaactacgcctgttgtgtgagaggataattaagagagagaaggtgaagagagagacggttttgtgtgatcatgaaatacttgccaaaactaaggacacagttattttctcctaccttgcatgcggagcaagctcagaatctgcaactacttcagttaataacaggtcgtacagtggagcagcacaaagatctgatgatgtcacagtagatagtactatttctgggaagaaaaccataaggttttctctgaataacagaggtgctgatagaaacacagctgacagctcgaggacattgctatcattcaaacgcaagttgagtgagaggggaccacgagctggtaagcaacttccgcagaggccaactattgctgcagagaaattagaagatgaagacaagaagacaactgataagaagaacctacgccttcctaaaggatatgcttatgttcctcgggactctttatctaaagagaagctatggaaacaaaatacacagccccataatccacaggagcctggtggataggatcagttgaaatcaagccggttcatttctatcgaggaaggccataaaaaacttgtgcaagcttgttctttgcaactgaaaactacaagcggcaagcagggcaggccagcgctattgccacaagggtaacagcgaatccgtgatcttttttggaccgaagttgcataatggtgcagactgtgctatttgtgtgaacgtatggtgtggcaccataacaagaaggctgcctcccacccacccacacaccaggtaccttgaatatgaccagcaatatgggtgaattgacctacctgtgctataccaaagagagcgtgccaactgtatatatgagtttaatttgtgcgcagattttgtaaatttgccctgtacattcttttcctttgcatatgctagtttagttgtgcaggaaaaagggaattatgaatccttttaggttggataagaaaaggaattagcttggttctttatcatggttcagaagaaaatgcggtggtgcttgcggacaacattgggcaggagtgttggtttgatacatgtactctgtagggatggtgaaggtgccaaaaataaggtcatgccactgctttaacgcaactatttgttgttggttactgggaagtggtatcgtacaggctgagaaacaatgttttactgttttagataattgtcgccggtggctttccatgtccccttatgttattgggaaacactagtccctttagggctcgtttgatggacatgaaaatggagatcattgcctcattgggaagggatccccttgctattcaattttgaataacaaggggatctccttcatttcactgtccaccaaactaacccgaactggtttcgagatgtcaagatagcaacaatgttgaaataggcctgtaagttctttggtcgagaaggtatggtagctgacattattttttaatttatacatggggtatattgtatctgggacgggctgttttctgcttgccgtccagattatagccttggttaggcgtatttagtaatttgctcataatttagtggttcatgttttgaattcttttgctcgaaatctggaaaggtcgtgtctggtaaatataaa

SEQ ID NO: 32723 - DNA, 1392 bp, Zea Mays
ctcacagctattccctgttttttatgttgtcaaatgagatatgccatgcaacaagcatttaagtcaatgatgacccagtcagcaccaaactcatttggctccaactcgcctttcccatttagcatgccgccacaggcatctcctactgctccaagcacttacccgtacttggaaccaaagaaagatacttccccgcatgtgtcaactgttgatgtctcagctaatgaagtggaagccactggaacatcgaaagaggtggatgttactgaaacgccaaaaccttcaaagaagtttgcatttgttgatgtttctcccgaagagttgcagcaaaagaacctccaatcttcaccggagacggtagatgtaaaacatgatagtacatacagtgaaagtaaggaggatactgaggaacaagttcccacaattagtacaaacactgaaagtaaggaggatactgaggaaaaagttcccacaaatggagcatcttttaagctgaacgaaggtgctgctcatgggccaactgaatctaataactcggcatctatgctatccgttgagacaattgagaaaatgatggaagatccagctgtgcagaagatggtgtatccctacttgcctgaagagatgcggaacccaaattcattcaagtaatccaatgtaccgccaacaactacaggatatgctaaataacatgggcgcaactcctgatcaatgggataaccgcatgcttgatcaccttaagaacttcgaccttagcagtccagaagtgcggcagcagtttgcgcaagttggcatgactcctgaggaagtagtatcgaaaataatggcaaacccagatgtagctgttgcattccagaatccaaaaatacagacagccatcatggactgctcgcagaaccctcttaacattgtaaaataccaaaatgacaaggaggtcatggatgttttcatgaagatatcacaaatcttcccccaaattaacggctagctgatcttcgtcgtgggatagcacttctgatttttgtcggcccgtcatctccagtctggagggctgctgcggtagcatctatcaagaaaagggtcgtgacgctccgatataccctccccgtgtcaaggtttttgagtttcttatgtacatcatgtgatgtagcggccttggtttagctatgagtaattgagtatgacccttgccagttcattaagtcaggctattgacatagcagggtccaagtttttattaagccagccaatcagtggaaaggtgcagcagagacggttcgtatcagatcaattttgatatataattgttattattaatctgtaatatattagagacacaatggcaatgcaagtaatctgttacgacatttcctgaccatatttgaccgggta

SEQ ID NO: 32724 - DNA, 694 bp, Zea Mays
tttcaatcaaactgtgaacttgtgaagcataagctaaagcatacattctcatctttggcattgaaagaactgaaccatagaaaaattaaagacaggagcacttctccagattcaatgccaatgaaagaacttatagctgttgcacaagctagaaggttttctcgatcaacttcctttccagataacttcctaaatgccaagtatattcctgaaacatcaataaatataccttctaaggaaggcccacacaggcagttgtcaccctcaaatcggataatcaggtctacttctggaaatgataatgttaattctaggagtccgtttgataatattcagcagaagaaattagcagcacatggagccaatgcagcgcgaaggtctttcaaagatttcctcagtacattgacaagaaccaaagaaagtatatcgcgcgcgacacgtcttgctatggaatgtgctaaatttggcattgctggtgagtttcagggcgccatcttgtttgaaccttgtgaacggatttggaaatctagggcccctcccaaatgtaattttttcatgtggttggtggcgcacaatcgctgttggacagcagatcggctggaaaaacgtggcctcccacacccagctcgatgcccactctgtgatcaggtggatgagaatctccaacacctactcatcaagtgtgtctttgcta

SEQ ID NO: 32725 - DNA, 2874 bp, Zea Mays
acacatagccggaagcaaaaccaagggaagggctaaacctcccttggcacaagccctcaaccacctccaccaccacctttaaaagaaggtgctaaagggctgtcctgcagagaaaaagagaggagtgccccccacaaacctttccttgcattccactgaaatcttcctatctgcaaccatgcagttgctcaattctggcctcagctgaagcccaaccatccattgttatataagtcgctgcagcctttgcaatttcccactccttcagccaccatcggtcattgaaggagcttcgtgccaccagagaaggtgttcgccgtgcataatcacagactatatacattccacagacctgtaaagctctgtgaatttggagctcccacaggttctgcattggcgttgagatggggaggcattcttgctgctacaagcaaaagttgagaaaggggctctggtcccccgaggaggatgagaaactcatgaaccacataacaaagcatggccatggctgctggagttctattcccaaactcgctgggctccaaaggtgcggaaagagttgtaggctgaggtggataaactatctgaggccagacctcaagagaggggcattctcccaagacgaagaagacctcatcattgagctgcacgctgtccttggaaacaggtggtctcaaattgcagctcagctgccagggaggactgataatgagatcaagaatctatggaactcgtgcatcaagaagaagctcaggcagaaaggcattgatcccaacacccacaagccccttactgaggctgatcgcagcggagcagctcccaccatcagcaccgagagaacctcagggtccagcgaaatcaacccatcaagcgctggtgctctgggaaacttgagccacctcctcagcgagacggctcaatcatcaatgctgatgcccgtgtatgacaagaatcgcgctgaaactccaaacttggcacgccctaaggtgccaccaaaggagttgttcctggagcagcttactgctggacacgagagtccatcaacctgccgctcatcaggccaaactctctatttccctttccaacagcctttaggctacaacagtgagagtggcagtggcgatggggcgaatatgaattcactctggttcaaccagagtgacttcaactgcagcacaatttctacagtgatgccgccagcttcaccatcggccctctctacatcaatggggctgaatcttccacctgataattctcgacatggaggaactggcattggaagtactgcagtagattcattctactgggatggtactaatcctagcagcagtagcagtactgggagcagaggaagcaacagtatgggatttgaaccacagagcacgagctcaattctggagaacagtgtcttccaatggacagacatcggacaagaaaaagatacaagagctcacctggtagaggaacttaagtggcctgacttgctccatggaacctttgccgagacgaccacagccatgcagaaccagagccagacgctctatgatgacgtgatcaaggcagagagccaattcagcatggaagggatatgtgcttcttggttccagaatcagcagccacagcaacagcttcaggcaacaccagacatgtatgacaaggacttgcaaagaatgcaactgtcttttgagaatatctaggcattatgttccacatggaacagagcagatcagcagaagcagaaatttgtaattttcagagattcgtgggcagaactatgctgaattgcttacatagatacattaagttgatacagaaatcatcctccacagctgctcctcagttgaagacctggcaatatcaaggaaaggacagccctggcattagaagtggcagcagaatgcatacaaaagtacgttctagagtctctttttctttatcttgaaaaatgatgtttccttctgtacacaacgactcaacttttgcatatttgagtttttgttcactctctggtggaaattaaataaatataggcagccatgggcaaaactgcatgtgttggtagctctcaccatgcaagtagacccaaacatttcaactgctgccatgcacgtccatgcaaattaattattgcatgttgtattttctttttcttttttttgataagttgccgacaaacgacagttgtatatttgtaagaagaaatttggaatgttgacctgagagctattttcttccccctttcactttcccgtttctgtcgtaaacttttctgtgtggagaacccaagctacttgagcgctttctacttgaatacaggaatggaaaacgattggttgatttgatagggtacaaaggagcaatcattctcaagaagaagtaaacacattcaggaaagaaaaaaggaagaaactattcatgaatatctacctaccatgtagattgggtaatctatgaagcctcaatgtggcaagaaaattggtggagctcggaagtctcaaaatcaaaaagatggcgtgtgagatctacaacaagactcgtggttggaggccagttgacagacgaatccgatgaaatgaaacatgttttgttatctggttattttggttcaataactgtgcggtcgttctacttcttctcccttgtagcgcctagctacaggaaaaactatgagatagaaatgctgcttgctgctttggtgtgatctgtgtgaactttgatgttggtcagctctgtgttactttttgtgttgctactagtagtttggtttggtcagggtttggtcctttttagctgatagttgtgtgttttgtcagctttaaaattctgggtgctcatgtggtattgtaagaacttatgtctctttctatttcgtaa

SEQ ID NO: 32726 - DNA, 845 bp, Zea Mays
ttgtgctcgtataatcccaccaagtcaccaaccaggccagctgtagagaaactgctccgggaggaagtagacaaggagagagagagagaggtcaacagggcactgccggatccggagccaaaaaaaaacccagaaggatccatggctcccggagccggagacgactctgatcccgcctcttatatccacacggtgcagcacctgatagagaggtgcatgacgttcgggatgagcatggaggagtgcatggaggcgctggcgaagcgcgccgacgtccaacccgtggtcacctccacagtgtggaaggagctggagaaggagaacaaggagttcttcgacaagtacaggcagtggatctcggagaagagaagcgggagtacctcctagtcctagtagcacgggactcgatcgtgtctctctgctggcttagctcgctttaaattagcccgtgatgtgtattacgtgtgcttagttattttaggatttattattacttactgtgtttgattagggaggaataagcggtagggagggagggaggcttgtaatgtgattctctgtaagcaagcagagcagtagtcacctgtacggcgcgggctgtggcgttatgtgtacagggtaaagcagggaaagccatctcatcatgcgcagcgcagaactgtacgcaagtagccgttgctggcgtggcgtatgtatgtgtatacacaatttgccccctacttctctaccgtatgggctcatcgtcgctaaaagtacacagcagttgaaaaagctcgtccttttctgacagtaatgtaaaccagaaattgagcttggtgtacttatcaaggcggtaccgttgcgtt

SEQ ID NO: 32727 - DNA, 1093 bp, Zea Mays
ccaccttatccactgccacgtgacagggggccaggggaatctcggcggccagtggcggcacgccacgccggccggtcgcccccgtcgctgtacaagatacccatgattggagcggggcaggtgcagagcagcaacgccacggctgcatgagatcaagaagctgccttcacttcgcccactgcagcatgccgtgtcgccgtcagagttgggcgcatatccagataaaaaaaacttgcctgcttgcactgcagatgcgttgtttttgctaacagcaagcaggcaagtcagcagcctaaccttctttgatatttacagagaagatgaaaaggagaactggagagcagtagtggcagtcacttcactggtcaagcattcctatccacctcggcccacctccacctccctgacagtcattttgttatataaaacccatcaagctcccctgcaaggagatacagaaccctgcaactgcaagctaaggagagtgtgatcaccaacagctagtgctagtcccccttccttccatccatccatggcatgcgtcagcaccttccagagctgccccattgccagaagagcaaagatcaacaccaggtccaggggcagcagcagtagcgtggcgaaggggtcaccaccaccagccttccagttccagtgcagggcgtcgactttcgcggcggacaccagcctccggctcgagctggacgagaaccccgaggcgatcatctcgggggcgtggcccgggaactgctccctcctcagctacgacgacctccgcgcctacctcgagtcgcaggagacggcggcccaggcagacgatcagcgcggcgtggcgctcctgagcgagaccatgtccacacccgtgctggtggccacagcagaccagaccctggaggacgtcgagtgccacttcgaggccgtgtcggggcttccggtcgtcgacagcggcctcagatgcgtcggggtgatcgtcaagaacgaccgggcaagagcctctcatgggtccaagacgaagatatcggaagtgatgacatctccagctatcacactatcgtctgacaaaaccgtgatggtgcatgcctaacgtctacag

SEQ ID NO: 32728 - DNA, 1810 bp, Zea Mays
ccatggtcgcacaaagttggcactcgatccgttctagctgctggttcttcctacgctagcttattcatatataatttgcaggtcagttgatttctttctcttttttttttctttgcgaattcgtgcgtgaaaccttttctaactatccatgaattgaagaaggattattggagatggaaatgcagtcgacggccgctggaactttggcacaatcgcaggctgcagcagctgggactgggaatagcttcacgtacgcggacctgcacgccatcacggatggtttctctgatgaaatcggccgtggtggtttcggagtggtttatcgggggaaactgccgcagcctgatggggaagaggtcgccgtgaagaggctgacgacgacgacggacaacaacaaccccaagcaaccggccggcgacgacgatgatgagcagttcgagaaggagctcggagcggtcaggagcatccagcacgagaacatcgtggagttcgttggctactgcaacgggtatacaccgtcgtccactgttctgcctgacggacgccctgtctacagaaagataagagccctctgcttcaagtacatggagaagggaagcctgaggaagcatgtcgctgatgaatcacttgattggcagtcacgctatgagatcatcaagggggtctgcgagggtttgaaccacctccacagcaaaggcattgttcacagggacttgaagcttgacaacatactcctggacggtgccatgaagccgaagattgcggattttggtctgtcgagattcatgggcgcgcaagaaaccacccggatcacgagaaacattgtagggacgtttggatgcatgccacccgagttcttctgcgatgggcaatactccaagtcgtttgacgtgtacagtctgggcactgtgatcaaagaaatactagcaggacctgctgctgccgacgacggctccatctacggctactacgatcccctcaaaaaggcaagtgagtactgggagcaaaggctggtggaggatgcagatgtgcaaagagtgaaggcctgcatcgagctagtgccactatgctggggtctggacaggaagaaaaggcccacgatagagagggttctcgatacgctgaattatacagacatttcagttcagaaagaacagcactactactgttcccggtcgtctggaccgcagcctgagaagagcaggctggagggaggagcaggaggcgagctccgcgacatcgacatggaggtgacgccgccgccgcaccgcctcaaggcggtgtggctcaagcacggcgcggtcatcgactcgctccagttctcctacaccgactgcgacgggcgtgaacaaggcgcaggtccatggggcagccaagacgcctgggacaaggttcttcagctcgagccctacgagttcctggtcggagtctccgggacgacgggcgggtacgcgggcctgccgacgagcgtcataaggtcgctgacgtttgtcaccaacgtgaggacctacaggacgcgcggggcgcccgtgggagaccccttcgcgttggaagcgcctgccgggtcctgcatcgttggcttccacgcgcgcgctgggcacttcctcgacgcgctcggtgtctaccatcgccctatctaagtacacgcgcttcgttaaattcattcgtcaacgctggctggctggctgctagtactgctctacttcgtcgtccagcatccgcctccgatccaatgcaagatttgtttgcttttcgtctcgaaattacaatgaccgtaccgccggctgcatgcatatatgcagagtcctgt

SEQ ID NO: 32729 - DNA, 2051 bp, Zea Mays
agtgttcatgtctcatccagttcaaatgaagtgacaggaaccattccagagacgaatggaggcgatcatcatatacctggaagctcttttcatgtttagtgaaggtctatgacatgtctgatagtcaaatgaagctaaatgattttatttcaagccttgttcttgaggtagatattaacaattatgtgctactttgttacgatcatttggatttttgcaatatatataccacatttgcactggtaggaaaaggataatctcatcaaaggcatgaccctctgtccttcgctcctgctgaatggatgctggtttattggctagcaaatatcttttctatcacacaagcaccctaaaacatattcctaaaagcaattgtattttgatttatatggatcacggggtatgtgcagaggatggtcaagattaatttgagtagggtgacttcataatggacgacgaggaagaagtggaaggagaggaagaggaacaaaagagtgatgaccagaagcgaagaaacaaaactaaaaagaaaaggaagagtgctatagaggagcaacggtaccaggacgcgtcaaggttgacaaagctatctgggaccacttttgtaattgccaactcttcactgattattttcctatatgttgctccagaataaatggtaagtgttgatcggtaattcttgtgaacgtaggtaatactgaatctctgactgtttgtgacctatatcccctgaaaacctgaatctcagattgctttagcttagcgcctacatggcagtcctcttgtcgtgaacattttgatctgtgttccgtatatgcttgtaggatcatagtgcggtggtcatgggattgggatctgctccgtatttgcagggtgaagccttcgtgtctcctcgagggaaagtcactgacctttcttgggacgtggaccactgacggcccccgtcatcccccatgacggtgatcctagggtgaagccttcgtgtttcctcgagggaaatctaccagtgcgggattgatttagtcagcaccattggacacagggtttagttccattgcctggacccatcaatgaatcatggtgccaaggtcttgatggttcgacttcaaggtactgatattctccaggactattgttagcatcccttgtggtccatctgcattagcagtgaagaaagtcgcatggggacttgcttgatatgttgttattgctcagacatggctgagaaggaggaaacaaagggccgctgccctgcctgccacacacgttatgacaaggatatgatcgtcaagatggccgccacttgtgacaggacagtggcagataaaaatgcggagaagaagcaaaaggcccaaagggttaagccaaaggcagcaccaacagcaacaacaacatcaaccgtagaatctaagaagcatcttgctactatcagggttatccagagaaatctggtgtacataattgggctacctgcgcatttatgcaatgagagcgtacttgagcgtagggagtactttggtcattatgggaaagttttgaaggttttagtttcccgtccgactgggcctccctctcagcaggcatcagcaaacagcagtattagtgtgagatatacgtggagcgtcagaattatatgtgcatctacaagaacagttacaacaattctccatcaggttgatgttcatacatctcagatataaatgtgggggagacggtgcctcatcaatgatgagtaggttgattctcatctagcggcaccattgctcactacaactggtttgcttgagcaacttaatgtcactctcaagaggaccctcctttcgaccgacaccctgaagcaccacacaagctttagaaaagtcggaattgtacttcgtatacataaattacatgatattatatgttcatgtaattctatgttgattctttagaaataatatatatgatattgtaatgtgtgttcgacatcaatttattttatttgagttcgccgtgcgtacgtttggggttgtttctccctcgcttcttcctggcggcgaaagatagagaag

SEQ ID NO: 32730 - DNA, 1399 bp, Zea Mays
ggtgggctccgccgttcccctttacctgcgtcatgcactcacggcaacgctggccagaggcccagagcttcgtcaaagacacgccgaaaagagggggaggcgactcggccgaggtccggttccgaactccggtcctccgatttgcgcgtccggatctaccagccatggcatcatcttcggacccgtggatgaaggagtacaatgaagcatccagacttgctgatgacatcagttccatgattgctgatagagggtcccttccacaatcaggcccagaaattatgcggcatacttcagccatccggagaaaaataactattcttgggactagactggatagcttggagtcgttgcttggcagaattcctccaaagtcaatcactgacaaggagatgcataagcgccaagacatgttttccagtttgaagtctaaagcaaagcagatggcgacaagtttcaacatgtcaaactttgctaacagggaggatctgcttggtcagagtaaaaaggcagatgacatgagcagagttgctgggttagataaccaagggattgttgtccttcagaggcaaattatgaaaggtattgtttttttgtggtttgttcagtagtgttttcttgatgaaccttactaaaagggtgctgtttgcatgagatcatgtagcactgtttcttcacaccatttgcatttcatatttggttggtacagatctaggtttcttggaaatggcagttgtgggagcaagaaccatttcatggcgctttatttatttgagttgtgtatcaatattttgcagagcaagatgagggtcttgagaaactggaagagacagtgctgagcacaaagcatattgcattagcagtcaatgaagaacttaccctgcacacaagattgatagatgaccttgaagatcatgttgatgttacaaattcacgtcttcagcgcgtgcaaaagaggcttgcaattctgagcaagcgcaccaaaggtggctgctcatgtatgtgcctgcttctatctgttgtcgccatcgtgattcttgcagtcatagtttggcttctcgtcaagtatctgtaaaggaaagaaagaagcagccggcctaccctgcagacctcactcgaaatgacccttatgtgtgtgcagccttcgcttaaaaagtcccttctgtgttactaccattgaaatgtgcatccctttgaaaataatatatatacggtggtttcatcttccctttcgtgagtggaatggttatggagtaatgtacattacatcgaatttgacacatacatgatcatcatctgcatcttgtgtatggtgtttgtcagtttgccgtgacaagtgttggatttattctgtgccgtaagcactttatctctcggctaccgttcttgtgcagcgagt

SEQ ID NO: 32731 - DNA, 2256 bp, Zea Mays
ccgcgaccgtgtgcctctgacgcgggacgctcccgcaccgcagcccggagcagcctgcggcttgcggccttgcgcctaccttcctgcaggctgcagtagattgacgaatagagcgcgtgcgcaggagtataaaagctagctccggtccccgggggccgcggcctcgggctgccgctggttccgaacgcgtggtgcgacccgggattccctcgcgcttctctgtgtccccttcctccggcctgaggggaggaccccgcagatcccatcgaaattcacggccggcctaacccaagccggtcctccccgactcccggcgacgaccaatttctccttgttctcgcccctccaacccttcatgatgcttagataatatacagtgctgggttttagcactgttttgagtttttaaattgagctaaggcttcagtgttagtcttgaaagatgaacggttcaagtggttcccaagggcatcatgtcagtggagagaagaagcaagtgtgtcatgttagccggcccattcttaacaatggaccaaagcaccgtccattgacccccatgaggcgatgccgtggtgtagcatgtgtagtgattatactgtcaacagcattcctgttggtagtttacttggctcctattactacttttgctgtgcggctgttcagtgtgcattacagccgaaaggcgacttcctttctatttggaatgtggttatctttatggccgttcttgtttgagaagataaacaaaaccaaggttgtcttctccggtgaaaatgtgcctccaaaacgacgtgtattgttatttgctaaccacaggaccgaggttgactggatgtacttgtgggatcttgcactgaggaaaggccatttaggatatatcaagtacatacttaagagcagcttgatgaagttgcctatttttagctgggcatttcacatttttgagtttatcccggtagaacggaaatgggagattgatgaagcaattattcagaacaagctatcaaaatttaagaacccgagagatcctatctggttggcggtttttcctgaaggcacggattatacgtaaggcataattgtctttgaaattcattgtttgtatattcgtataatccacattcatgactgtgtactcaatcacataagtttgatttctcaaatttttattgttactgattaccgacctaaacattaaatgtggtactttatgaaattgatcctatgtattactttagtaattgtttgtcgctctatttaatgtgcatgattcttcctcttttcctatattttgttgctgattgctgattcaatcttagtgagaagaaatgcatcatgagtcaagagtatgcttcagaacatggcttgcctatgctagaacatgtcctccttccaaagacaaagggcttcatttgttgtttgcaagagctgaggagttccttagatgcagtttatgatgtcacaatagcatacaagcatcgactcccagattttctggacaatgtgtatggcgttgatccttctgaagtccacatccacgtcagaatggttcagctccatcacatccccacaacagaagacaagataacagaatggatggtagagaggtttaggcagaaggaccagctcctggcagatttcttcatgaaggggcactttcctgatgaaggaactgaaggagatctgtcgacgccgaagtgcctggcaaacttcttaacagtagtatgcttgacggccatctgtttgtacctaactcttttctcatttgtgtggttcaaggtctatgttgtagcaagctgcgcttacctctcatttgttacctattactccatactaccaccccaactgataggttcaccagagggtgatgtcaaggccaaaaaggttgtgtagatgttgatgtaacttgccatgaaaactgtacatccgcaaacgatttttactgctggagtttctgccttgtgacatttaaggttccctttctgcagtaggaggtatgaatgtatgatagtgcgtatgtaggaattttctgtgattcatcagtgtgtgagggccctatctgaaggcagtaaactgattttagatatatgttcttaacatttttataaacaaaactagaccacatttgttacaaatattgaagatttatttatttattttatttgatctttgttctgatgcaaacaatcaaacattagctatatccaacttgaatatattaatacaaacaaccaaacaaaaacaaccaaacaaacg

SEQ ID NO: 32732 - DNA, 191 bp, Zea Mays
gcccaacaacatgaatggctctgttattttgaatagcatatatacatagtgtcaacataaggcaattttgaacgataacatagaccattaaaaggaaattggtttcatctgtctcgtcctcatcagaatcatcgtcatccttgctcttcttggaagtcggacttgattttgaagctgctatattaaataaa

SEQ ID NO: 32733 - DNA, 1454 bp, Zea Mays
taacaagggccaatagttgatcataatctgccaatgttattgaagagtttggccacaaagaagaatatggggctttatgtgttaggacttttgaaattcttagctctgcatcttcaatatcagctctgaattcttcttatacctgtgatcaagaacctgacctagttgaagcatatacctactttacatctatgtttattcgctgctgtccaaaggaagccattgtggcatctagctccctgattgagttatcatttcaaaaggcagctatatgctctacagcaatgcaccgaggagctgcacttgcagcaatgtcatatatgtcgtgttttcttgagactgcccttgctgctgtgctagaatctcctgagtgcatccctaacgggtcacctggtgtggccctaatccaaatcttggcacgctgtggtgaaggtctattatctaatgtgctttatgctttacttggtgtatcagccttgtcaagggtccataaatctgccacaatattgcaacaactggcggcattgtgcagtttcagtgagggaacgacatggaaggctatccttagttggaattctctttgtgggtggctacaatcgacggtgaaatctttgccttctgagtatctaaagcaaggggaggctgaaataatagttccatcgtggctcaaggtgcttcaggatgcaggctcagactatcttcacagcaggactggtgataatataagaagccatcaaggttacatgcaagggaagggtggtagaactcttaaacgtataatcagagatttcgcagaaagccaccggaatgttccaatccccagtcctacatgatatggatgtgtcacgagtcttgcactctttactgatttgaggatgtccagtccctccagtagcttggagtctgactctagagagggggtccttgtggaactgatgtccgtcccgtctctgctggcatgctacatgttggttccatctatagttcagcaagaggaagaggctatttgattgttccggacatctggttcggacttggagagtcttctctgtatagcaaggaagtcgcaccattgttctgctgactaattgggggttgaatgcaaagtctgaagccgcatgtcatggttcgagatccaattttgttttgatagacatactgtgaaattcattgtgccggtaagctatatgaagacaaaatggggggatggaatgcaacctgtacataccattctttgctggttggggcaggcgatgtacgaacattcatatgcagcagtgttactgctcgaatctggagttaaacatgggcagtaatgctaggcatttatcaaacttctatcatgtcagtcgaaactttgaacaagtgtacataatcaaatatattatcagatatcataattttatggcatgactattatgttatgaatgtacgtagtatattatctgataccc

SEQ ID NO: 32734 - DNA, 325 bp, Zea Mays
gaagaacgtcgtctctcgcgaggataccgaagactggggtaatggaaaatcgtcgtcaaggttcgaactcgcgaagtgccatcgcctggggctcgaggagttgtgcagtcgcgtcgcgggggcgtgttcaagctgatggggggaattggaaggcagtactaaacctctagatgaccttaatttctcgacggtgtgcgcagatcacggagaacccgcctcgcctcgcaaaccagccacaccaccatctccaaccaccggtaagtcgcttggaacttgctctattggacctccgcctcacatatccgtagtttcagacgccggcgtt

SEQ ID NO: 32735 - DNA, 170 bp, Zea Mays
agatgaagagtgttatgtaagttacagagtagaaacaaattctactactgtataaaatcatttcccatctcccactccatgaatttaagataggcttatatctgaactttggaaagtggtggaatgtcaaattccaaactaaataagttactttagtgagtgaattccaa

SEQ ID NO: 32736 - DNA, 686 bp, Zea Mays
catttacccatgtaagtcttagagcaagcatataaaggtgcaaattgttcagcagataaatcatgatggagaggtcaatcgagctcgctatatgccccaaaattcatttataattgctactaagacagttagtgcagaagtatatgtcttcgactacagcaagcacccatctaagcctccactagatggtgcatgcaaccctgatttacggctgaagggacataattctgaaggatatggcttatcatggagtatttttaatgagggacatttgttaagtgggtctgaagatgctcaaatttgcttgtgggacattaaagcaaatagtagaaacaaaagtcttgatgccctgcagatttttaagcatcatgatggtgtcgttgaagatgttgcttggcacttgaggcatgggtacttatttgggtcagttggtgacgatcatcatcttttaatttgggacctgcggtctccctcgcctgctaggcctgttcagtctgtggtggcacaccagggcgaggtgaactgcctggctttcaacccgttcaatgaatgggttgttgcaactggttctactgacaagactgtcaaattatttgatcttaggaagattcatacttctctgcacacctttgactgtcacaagtatgtgtctgctttttttgttttgttcatagctactgtttgtt

SEQ ID NO: 32737 - DNA, 1082 bp, Zea Mays
taagattatttatttccttcatgataatcatgaatgaaacaagatcatcagagcatcccaaagttgctgatctggaaccattaccagatagcgaagtgagtatgaatgaaatatgcttacttctgcctttcttgtctgatctgttatgtacttatgtagttatggtttgatctctgcatgtatatttgtgatgtaccttcactgttttcggaatcttgagctcttcccaccaatgcacgctatcttttacagctctcttgtattcttgaatttgatggagcttgtaaaggaaatcctgggaaatcaggtgctggagtcattattcggcggttagatggatctgtggttcaaggtgcctggcgtgctaggagcgataatatgtctatcttgtgcgatatagccaaggaacttaaggaaacattccttacatttcaaatcaatcatgttttgagggaattcaactccgatgctgacgttcaagctaactttggatgccaacttgctgttgatgaagttcaagagctgtccgtttgaattgccattggcagagaaaacaagacacggtgcttgagagtagactgttaatcaatactaattgacccacgtgatcatatcacagggtgcaaagagctgtttcggctttttccaagagctgtttcgtttttaccggtaaaaagatggattggaaagaggagaaactggtagagagccacaagttctagcttcatgggctctgtgcgctgctaaagtaacaaacaacacgtagccgaagcaggtgagatatgcaccaagacctgcaatattttgctgttggtttggttttgtgttgccatgaggattgaggagcttgattctttgtacatgcaattgtgaactgaattgaagtatacttaactcacaaatacatgatttcagaaattattgagggtttattcgtttctttctcaatttatgtggattggatggatgaaatttaatctctagaaagtcaaaatttcttattttttcaattacatctaatccacgtggaatagcaataaccgaaaacctcaatgaaaacgaccgtgtatccttgaaatctg

SEQ ID NO: 32738 - DNA, 3226 bp, Zea Mays
cgccgctccatctcttgtttgttccgcaacctctccgcctttttatccccccgcagtcccgcactgcactacactgcaccccgcctccgctgacgtcgacgcgcacgccgcatccgccgccttcctccctcctcatccgatctcttccttgcaagccccaagggcagtctcatctcatctcataaaagctgagctgttagcgccatcgccaccatcacatctttttcctccgcctatttgtactacgccactgttgtgatcctgcgccctggacctgggggacagagagacggagggacgtcggctgcatcctgccgccgcagcgtgtgtaaactgcgacgccgagagtatggaggttgtacgggttcaagaaaaaagaaaaccgtcatggttgctgggcaaattattcctgcttcgggatcttatctccgtctggaaaccattatctttgcttttttgttgtcgtcttttctgatccatagatatgcttaaaaaggaaccttttgttgcgcttatctccgttgagtatctagtgtgctccaaagtccaaactcataattgctttggaacctaaaagtggttcattatcctaccttgtcgttgtctttcaattatttctagagaaataagtacttgactaatgactaggatcagattaaagattaggacagtcttagcagagtttttcattatcaaggctatcacgtcaaaaaaaacctgtctatcttcgtaaataaggcgttaagtctgttgaagtgtcacccatttttttcaagagatttccattttttccaaggaaagcagttcatttatctttaagaaaacgagaatcacttagtaaatatagttgacaaactagtttgtgagccagaaaaccagagggaattagagggcaaaatgataatcccttagtaaatatagttgccaaactagttaggagctagaaaatcagagggtcttaaaaaatttatttaaaattgaataagaaaagattttagtctctctaatcctctccggatttatgtcacccaaactagtcttaaatgagaataaaaactcttttgaaaccctcaccgagaatgttctattttttctctccctacatgttgtttgtgtggtcaaccctactccattggccctctcttcctctccgacgaaaacaaggagttaatcctttcgctgtccagttgcccaacgtcgttgtccgaattccgaaatcaaatcacggggacatgtatagctagctgattggatcaaggattcgagtgcccatacctttcatctgctttcatctcgaggtaaatatttgtagctagtgtgttcaccctgtggatcctaatcgtttcgatcaaggacgcaccctaaccttgccaccttggttccgtctaaggaacggtaacaccaaacgacaacaagacgcggttaaaaaaaattaccattggccttaacgcccgtctccccatttagcctggagcagtagttgtcaattgtcatgtgcgttgctgtctgctcgtctggagcaacagcaatgtactatcttggatgcttgatcagggccctctgaactgtggataggctgctgaacaacatctgactgacaccccacacgcacacgcacacgcgcactcactcgctctgtgcccatacgtctttgcacatgatcctttgttttgctgctgctttgttttgcttgcctcggacagtttcgatcgtatgtcttgattggtgagattctatttagttgctccgattcgtcacggtgatcgaatgacctttctgctttgttttgcagtgccgcgaacaagctgtcgagacggagtgccagagaccagctcccctggaagtgcatgaactagtcagctacaagtttagtacatggagcagacgcgcacgggtggtgccggggagcagcccaggggggctcccggcgaggaagcggcgaagaggatcatcgttggcggagacgcgccggcgtcggggacgtctggctctggctgcttcgactgcaacatctgcctcgagtgcgccacggagccggtggtcacgctctgcggccacctctactgctggccctgcatctacgagtggctacgccacgacgtcgccgaagccggcgccaggagctcggcgaggcggcagtgccccgtgtgcaaggccgcggtgtccccggacgctctcgtgccgctctacggccgcggcgggagctccagcgccaagaagccgctggccagcatcccgcgcccgcgccggccggccctgcgacagagcacgcatgacagcggcagcggaggccaccaccaccaccatcggcacgcagagaccagcacgccagcccggtcgctgcggcacccagcccacgcccacgccgcgcagttcgacgccctcctctccgcgccgtttggggaccgcgggatgctgcactcgacgacgtcgacgaccggcgggatgctcggagggatggcggtggccgtcctcccgttggtgctccgcgggcaggcgcgggtgccgggcatgtactacccgagcccgtatcatctgatgagccccaggcagagacggtggcatgtggaggtagagagatccctgcatcagatatggttcttcctctgcgtgttcgtggtgctttgcttgctcttgttctgatttccgaagcaggacaccatcctgcgcctgcgggccacgagacgtgctctgtacatagcaaagggtgagatatggatatggtgctggtgcggcagtgacctatatttggtgattgcatgacggggcgttcaagatgttaaattgagaagcagctgagttgtggttctagaaaggagaaatcggtttcgaaactgcaaaggacccttgagaagattatcagaagccatcgtccacatgttcatgcgcagacagtaacacataagctactgctgattaatccggctgaggaatgaggatgttgccggagcgcgtctcaaaatcacgaatctggatgagagcacttcacgacaggacctgctaccaccgacgtgagtgtgatttgccattgatatacagcctgatcagttgcaactccacttagtactatgatgacgagtaacagagcgtctgtgaaagggagcacggccggctacaacagcagctgaagtagcgcataagtcacaagttacactccactgcaactgatcattcgagctttgcttctttttttttttgtaacggcaacagtcgttgatgactaaca

SEQ ID NO: 32739 - DNA, 2576 bp, Zea Mays
tctcttcgcccacccccacattattctctccccaaatctgaccttccctcgtgcgaggcctcacctcttccgacgcgacgcgatacgcaccacacgcggagaccaagccgagcccatctagggttagcgtcccactgcggcggccatggacgaggcagcgacagcggccctggcggcggcgagggggcggtggacgcagtgggaggaggtggtggtgtccaacgaccgcggcagccgcctcgtgcactactacctccgcggcaacagcgaggagaagcagctggcggtggttgggcgggagcggagcccgcgtcacatgtcgtacgccgtgcaggggcggttcctccgcgcgctcgcggctgccgccggggcggtcgccgtcgcgccgtcgccatcacggtcgcctctgccggctgctggggcggacggcggcgctccgaggaggtggcggtccagacgggaggtcgtggactggctgtcctccctcgtttctggaatatggagaatacaggtgtgccccagtggaagcagctgctggcttcctttgggccaattgcataaccttggcatttgggaatagagataagcgaagcagcagcatgaatgtatgctccatcaggtcataattatggttcctcctcaatggcaactaggtgcagtagggattcatatgatgacagtgttaacaactgcacacaagttactgcttcgaaggatgtttcttctagggaaccttcaaatgtcttcacatggttaggagctccatgttattgcccacaacgtttgaagcactacaaatctttctgccgtagaggaattactatctcggtgcatagttttgtattcatcatgagtgaagagatgaagagacttattgcttatgtggaagatctctacgaggatacaaactcatgcaacatggtcaaggtacaatggttcgacaaagttgatgagtcctgagtgtccagcactacgagaagttcaagggtgataccagatacaacttgtggcaaccttatttttgctgtcggcagattgataatggtgacatcaaaccttttgatgtcacacagctgcaaggctactggagccaggaagtacttaggaccatgttcaatgcaacttcctctctgaaggttttatggtgagaacatccaacaattgtgtcctggttgccatgtggaagtactctctcaagatagtggtataaggggatgttggtttagatgtttgattctgaagaggcataaagataaaatcaaggtgcgctacctagaacttcaggatgctgatgagactggaaacttggaggagtgggttatgctaacacgagttgccaaacctgatcaactgggtgtacgtttccttggaaggccaatggttcgtccacagcgcgtggaacaaagcaaggcctcatgctttgatgttggagccattgttgatgcgtggtggcatggtggctggtgggagggaatcgtgctgtaccaggtgggcagtgggcgtctacaagtttattttccaggagaaaagcgaacagctgaatttggtgaagatgagctgaggtgttcccttgagtgggttggtaacaaatggaatcctttgaagggaagaaaagatgtcacaagcaagctgacctccactgcagattgtggaagtgaatatttgattgcgaaacaagatccactgaattttcatgtgcctaaaaattcagaacctcaactagagggacatcaatatgacaagagggataacttgaggtggaggccaagaaagaggagcagaagatctggctcaagaaagcagtcggacacaagcagtggaagcagcagcggggacatggacctgttcagccccagccccagtggaagctttggtcaacataatttagtgcctgacgaggagacatgcaagagcagtggagagcagacttttatgggtgtgcctgtgcaggttcccaatcttgtgatgtccaggtgaaagccatcttagcaccggttgaagattaacatgttagcttctggagttacaccgaccttggcgagatgtggttttgtgcatccccaggttatttttgccagcacaacccagatccagttttctgcagtttttttggaggctcatcagctgtgatcagttagatgtgaaaatgtctcaccaagaaccagtatacagtttgtatgtagggagagaagaaaatgctcggtttggttttggttttagagctttcagttttttttcttttcttttcaatcctagtctttgttgtttgaaggacaggtcctagatttgacatagcctctttacatcggttattctttcccatagttgtcagtacttggtagtccttgttttttatttgtccatgcagtcttgtagcagtcgcgcgccttacgtaaaattatcctgaactgaactcagtgaaatgtcacaaaatagtgcttattgcctatttctgtgttcttttaaatgtcagttagggtactagttgggttacattttctcacagtggtgaactttattgggcctgcttctttctgcaccacagcctacggaatggttgtgaattgtgtgttagc

SEQ ID NO: 32740 - DNA, 1208 bp, Zea Mays
acataatctatttaaagatagtggacatcttcagtagcagctgccgtggccaccataagaatcctccttcagagccatatgtccttgaggctgtgtgcaaggcgtgacagcgtgtcgtggtcaaggaccctaagctctagcgccaaattcatatcacatttgttctagaatgagatcatgaatggtccctggggttggcctggttcacgctccattctcagtgcgttttccgacatcgttcttcaagcaagcatgcgagctggctcctattttcactgagcttgtggattgtgtgagcttagatggggagtccttgcaagctgctttgtctagaacaaagcaggttcatgaatttaccgcaaggctgctagatattcatgataagatgatgttgataaataataaagaggattaccaatgctagaatctgtatggattctatcagctgttcgcctactgatgcttatgtgccaatttagtgagactggagtcatacactccatacaaatctatacaaaatcaaagtggttggcaatgcagtgatgctcggtgaaatcataaactacgtgcagtccctacaatgacaagttgagtttatgtccatgaaactggccaccgtgaatccccaggtggacttaaatagcctgcctaacgtcctccctaaagatgtacatcagtcttgtggtccgccacatttctcgctggagacctcagacgcttcgttgtcgtacctcagccagcctcaccatggaagccctcttggctgcatggacaaccagagttgtatgcatccacttgacacgacgttttgcctggcgataaatccgcagtatcatttcctcaacggtgttagcgatgcatcgtctcagctaatttgatgcttgtgtttatggaaaccaagaggtggcgctgatccattggaaacctggttgtgtatgaatgggtttccagctacttctattcttggagatagaaaccaacatgtttggtttttgtttttattcgctttagaacaactcatttttgtacgaaaagaggcatttagctataattgtttgttgtagtatgtttaccgcaggatagccgttccatgaaatacataaaaacctgatactgttgttatatttggtttagtcatgctcttatggaacctttaatgaggatttttctatatcaagatatcatcgtcatcgtcattattattgcat

SEQ ID NO: 32741 - DNA, 300 bp, Zea Mays
cgaagacccaatcatgaaccgcgtttgtctgtagtatcctttttatttgtccataataatgtaagcaggcaagcgcagtgacgactgacctcacgaccaccctgaacttctcggatcgacacctcatggtcagccggtcagggacactgtcaaagatctgaaaccaagttgcagttcggcactccggcgacacgccatgaggggattaagaaaatgcagcctctgaggtcagacgacgggtgcgatcgccgttgccgtcgccatctccgggggaggcgatggcgcgtccgcgtgcgtgcc

SEQ ID NO: 32742 - DNA, 6337 bp, Zea Mays
atggagacggctgccgcgaccgcgaggcccggcgcagcgaggaagcggcggtggaaccaatcgcagccttgccaaggggagggtccgagcgatctcaagttcgctagacttcgcttcgacggcgacggcggcgccaagggcgcgtgggaacacctcgacctcgtcctctccctccagagcaaggagctgtcgctcgaaagaaagattgagctagcggtcgaatttctaaccacactgccaaataactcaagctgcagcattcagctattgcggctggtgtcatttattggaaactggttgcagtctatcttaaattttcctgagaatagtaaaaagattctacatatttttgatccagcattggatagtagatgctgggcaattttgagagtgtgtgttgaaaagaaaccatccatttcaatatctctgaacttacttaaatcccttagtcgagttgcaagtcatggtttgggcagagttgatagcaacacatcatgtcctgacaatgaatctattgagctctttgaacaagtgtttgactgcatgtcattgcttttctcttccaatacaagagctttcttcaacgctggtgtggatttatgggcctcttgtgccattgaggttgtcaatcttgctcagaaggtgtcagctaaaaaggacaatttttgccctgttcttcagaagcttgcaaattgcctcctcgggcaattcgcatgcttcctgagattttatgcaaatccgaagaatattttccatgcttttgttgataaggttcttgggccattgttggaattgttagttttacttaattcacaagcacattccagtgaacacaagcagacaggaacaatgttgaaaattgttgaagatgttttttcaaatggactgtttcatccccaacatcttagtggatatttcggtctcaggagtttgaataaatcttctgctgctaaggatatcaaaggaagctaccatagacatctatttcagcgattcaaaggaataaaaacagaaaacaaggctgtattgctggctgggtttggctacttgtttcaattgtttgttaggagggctagaaatcaaagaacaactgtagcaccaagtagaacgactttgggtacgctgcacaaaagcaatgatggttctgaagaaccacaacatagggaatcactttttgaagtgtttattatgttcatggaacccatcgtattagagtgtaaatcgtattcccaaaaggacttctctaagttaggggtgacaaggctagtagaggtccattgcatgctgaaatccattaatgtgatgctgataacccttattgaagagaagatctatgttcctacagaggacacattggaaggatctcacttcaattttttgcaagatatttactctgtcttgatcttaatatctgaaaagatgtacaaattctggatgtctgctgtgcatctagaagatgtaaacattaagaagatagtacctttaatgtttgcagagattatttctgcagttggcaattttctagaaatcgagtacaaagttctaggagacgaccttgtgaaattgtggttaatgatttttgctttgtctgctattaatacatcttccaaggacatcgaaccctgttttctgcttgcttcaaagatttcaagcctctcagcccaagtgatttgcacattcagtgaacttcgtcaggtttcccgctcaattttcagtctgtgtgatgctgtgagggcattcagagttgagggccctgatggagtacatggctcattttctgtggcctctttatcgtcccaggagtgtttgggatcattgacaacactgttgagttccgaaacattgatgggtgctattcgcacttcaattaagtcgatgcctcaaggccagtctagccgatgtatagaggagcttacatcggatctcacagaaacattgaattggatggcagattgcagttttgaagatgatgtaagcaaactcagagagccatccattgccaggaagtctattttttgtcagaaagccgaacttcttggcagacacttatctgaagtatatgctagcattcttgattcaataactgtcactgtttcaaatagtacactggtaggaaaatctgttgaaaggttggtcaatgcagtccggcgaaatttcagtcacttggtcagaaacaaatcaaaaaatataaatggatttatttcttcaattatgggaaaaaatgtatctaaaaaactacatgccaaccggcagaagatcccaagtttttcctggattttttgcctattctgtcgcctatatatatcatgtagaagcttgtatcagcaatctattggcctcatgcctccagatgtagccatagatgcaacaaagttagtggggaatccattcattgtatgttcaggaaaggaatggaccaatccgacgaatattcttgggaagggttattttgcattgatcgatgaaaattcaaactcccttttggatgttattgagagtttatcagagtctctctcaacaaactgtgcttcttttgctccacttgtttacatcttccatgtcatggttctgcagagactcaatgaccttaacaggcagattaaggcatttcaatttttgcttgaagatgatgcttggcaaatagataataaggatataggaaacactcgactgttaaaggaatcttgcagtctggaggctgctaaattgatgagttttgtgatgaattatgtgaagctattatcttcaggagaaactggtccttttgggtcttatgatgttagtagttcctgggatttgagtctatgttccttagatgaaggctcttttcctatagccacgtggcagcttctgtgtgaaaacattgacgtttggagctctcatgtttctaagaaggatttaaagaactttttctctaatttgataaggttttcttttactcaaaagagatcttccctggacaaggagaataatggcactcaatcttcgggcagagaaatgactttgcatagtgtctctattggagtcctttgtgatacaattatttatgaaaaaaaggttctggtgctacgcatgcgcactgcttagacaaacactggatctgtgaggatttccttaatttttttagtgctgttcctggatttcatgcaaattccaaggcattcatacggcttataaactatattctccatcttgaaagactgctgctgcttaaattgctaggtcttcgttgtgaatcctgcaatcccatgaagttactgcgtttgtttatatgttgtcgtagggctctgataaatctcatcttgaaattcgggaaagagtgcccagaggcaaggcaatacttgtccttttcaaataaaaatggtaactcatattccctggtttggtttttgagatctgttcaggaaattgttggttcatcacataaaatatttgacgagtgtactgatgaggtgaataggttgatgttctccttgttagataagacatcagaattattttctacactagctagtttgaattcatcagtttacttgtttgatttaaagaaacaaattgaatcttcccttgatggtagtcctattaaaaaggagacttcagaacataatgaccaggcatttgatatagtagaagtatcagccttagagtgtgtcagaagtatggctgaattgttgcagaagactgcaactgggatacctgttaccataaaggacagcaagtgtgttatcaaaatagaagactgccgtaacactgtatgttggaaaagattgtcatgcagcatgtcttgcataggaggatttttgcagggacttaattcagcattagaaagcacattcaatgatcacccaatagcaagcccagaggacaggaagatgttgcttcagtattgctcaagatttagcagttatgtcgctaagtttgggacctttgtagatatttgtgttcatgtcttgtttatggataacaaagattctgcctctatagatttagtctctgttcatcttccacaagagctagattgtgcgaatggttttctgaatattgaagcaatcatggatgaattgacaaagtgtggaagtcatggagttgatctgtctaagatacagtacatggaaaatgttcttctggaaaacctgttgaaaggtgaatgcccactcatatcattcactttgagagagatatacagtatatctgctgctatcattaaatttcatggttacctatccttttcaagtgatgtttctaggcagacttgcagccctgtcgaacagctttcattgggtaccatgcttgggatagctttcatcactctacagaaagttgcagacatgtctagctggccacacatgttttgtcttgtatggattgatggggtattaagatatcttgaagtcttaggaagtgcatttacattgtctgagctcaatatttcaatagaactgtatactcagattataaatgctttattgagggctgttggtaaatgcatcttacttcaacagaagaatgctactctccctactcatgagattggctcaagcacgaaaacactgcaattacagaatgcatctggttatgcttttcctaaagatttcattgatacacagaatagattaaattcattgaaatcgaggcttcgactagtacttggaaaatttgtcagtattgcatcaaacacacatctaaatgcagctctacaagtaattgaaagggcattggttggagtgaatcattgcagtcattcaatataccaaatttacactggaaatcctgatggtgggacagtttcttctgatgttgctgctgggatcgactgcctctatatgattcttgattttgtgccaggaaacaagcgcgtttttaagaggactgtccctggcctagttggtgctttattcaacattatactacaccttcagagtccacatattttctatagtcagaacctgccacctcaaggtagtgtgttccatccagatgctggagccactgttctaatgtgtgttgaggttatcacttcatttgtgggaagacattcttttcaaattgatgcatcccatgtttcccagtgtctgcttgttcctgtgacactcttcaaagagtttaaacatcttctagcaaagtactgcaaccaaagtgtacaacaccatggagatcatgctgaatatattcttgacagacaattttcagttgatatctatgctgcatgttgcaaattgttatgcactactcttcggcaccaacaacgtgagattgggtggtgtgtggccctcctggaggattcagtaagcatactgctcggttgtttggagtccacagattcgaagatgattaacgtagctggatattttgcttggaatatggaagaggcactaaaatgtgcttcctttttcagaaggatctatgaagagatgcgccagcagagagaaaccctaggaaaacatgccatgcactttcttgctggttatatttccatgttttctggacagggtccttttcagacagggataacacgagaaattgatgaggtcctgagacctggtgtgtattccctgattgatatatgcgaggaaagtgattttcaacagctccacacatacctgggtgagggtccatgccgaaccactcttgctgatctggtgcgtgattataaattacacttccagtatcagggcaagatctaagccagcctgttctttatttttgaacaactggcgtttatcctgtcacgtctggttagaaaatctatgaagtaccatcttctggatgatcttgtgttttgggtggactaattttggcctaatggctgcttaccgacttatcaaggagacatggtggctaataaagatttaaggcttgtgaaatcaacttcataggatctacagctgcctcgtgctgttctgcaagttgacctggacacctggtaatatcaagtagatatcgacatttaattccagggtaatgtagaacatgcatgcttacccttgaataagtgatatttgaagccttatcacttgaatataattccttttccaggttttcctggtacttaacaacagcaaaaataggacggttagtatcaagtggtgtttggctaccttgtaagagatttactgattaaaacattgtaatgctaaagcttgaatagatcataattgaggaaagagaattatctagtgtcctggtgaagttctgccggtgttggtctcgatcgacctgcttctagtgcaatccagatccaggcatatttatcactcagaatcgagcccccctacttctgttttgcccgttttctttttgcagtttcctttcacagtttgacacaaccacaaaagtc

SEQ ID NO: 32743 - DNA, 1247 bp, Zea Mays
ctaaggacctggaagcctatatgttatatttggtcctgatgctatgggacttttaatacagccccccttggattggatctactagcagtaaaccatgagagggaggagataagaaacatgattgagcacgatggttctgccaaagggattgtcttcagccagttcacatcattcttggatttgattcagttttccttggagaggtccggcattaagtgtgtccagttgaatggagccatgaacattaccgaaaagggaagagccatagacaccttcacccatgatgcagactgcagggtcttcttgatgagcttaaaagctggaggagtcgctctgaatctcactgtagcatctcatgtgttcctgatggacccttggtggaatccagcggtcgagaaccaagcgcaggaccgtatccaccgaattgggcagttcaagccaatcaagagcactaggtttgtgataaaggacacggttgaagagcgcatactgcaactgcaacagaagaagcagctggtgtttgaaggcaccgtgggggactcgccggatgccatgtcgaagcttacagaggcggacctcaagtttctgtttcagatctaaatgctgacgtagttaagcatgagtagggagggccaggctatgctaggactaggagcactgacttgttggaagttggaaccctgacgctgccataacaccaggacggacggggtcggcggtgcgtagatcgactgctgctgtgcctgttggaactgatgtacttttgcagtgtgtgtaacatcgatggcagcgactagcgaggctttccgttggagtagcccgtttgggaaagaacagaacagggtgttgtaggcctgtgtagtgtggggggcgtgcagcgtgctggtgccgcaagaggtgcggtggggtgggggtacagtctcagtacagggtactggtgtgcgctgagtgagcacttgagcccaacgcgctcaattgtttgcaggcggtcccccgcccccgtatctcgtggacaggcaggtgggtaggggaattgtagcagcgtgggaagcggcagtgacactgacaggaccatccgtccgaacgccttttgcagggcggattgcgaacaccgaccggattcatgtgttctttctcttgtgaagagaccgcaagagctgccgatgcacaggtgactagtggtagtagagtctggcagttgtctagtagaccgatctggccaaaacaggtgaggcggtggcagcatc

SEQ ID NO: 32744 - DNA, 1667 bp, Zea Mays
gatgcctccaccaatctcatcctcaacccggacggcggtcacggcgcacgcgagcagggttgctcacgaatcgcaggatcgcgggcagacggcggaccgaaagaagaatgtcgcacgtggccatgtctcggccgcgccccgctcctccgtcacagcctcatagtcacaggctcccagcctcccgcgtccggagtccggatccggacacgcgctcgaggccacccgcgctgtcccgcctccggcagcgatggcggccgccgcgcgccccgcgtccgcccacctcctcctcctcgccccgctcccttctcctccccgcctttcgcatctcatccacacccgcagactctacgcactcgcccccgcccgccgccctgcggccgcgcgcgcgcgccgcgaatcctctcctccctccgcgccctcccctcctgccccggctgactcgctcgattgcgtcggaactggctcggatgtcgagtgcttcgtcgacgccggcgccgaagacgccgctcccctccttcccgcgctctccgcaggcgcgtcaaaggacgatgggaagagcgagggcgacgcggcggtttcggcttcccctacggggagggagctcttggagtgggcatctctggtgtcgcccttcttcttctggggcacggctatggtggccatgaagggggtcataccccgcacgggtcccttcttcgtcgccgcgatacgcctgctccccgcgggcgcactgctagttgccttcgccgccgcgcgcggcaggaagcagccctccggctgggaggcctggctcgccatcgctgcgttcggactcatcgacgcggcctgcttccagggctttctcgcggagggactgcagaagacatcggctgggctcgggagcgtcatcattgactcgcagccattgacggttgctatccttgcatcactgctctttggagagtcgattggcgcgataggagttggaggactcgtgttgggcgtcgtggggctcttgcttctggaggttccagcactgtcagttgaaggaaatgacacaacaatctggggaagcggggaatcgttgatgttcctctcagctcaaagcatggcagtcggaactatcatggtccgctgggtgtcaaagtactctgatccaattatggcaacaggatggcacatgattattggtgggcttcctttgctagtgatatctgttcttaatcatgatcctgctctgagtggccatattcaagatcttacatggagcgacatattagcacttggttatacatctatatttggcagtgctgtcagctacggtgtatacttttacaatgctactaggggtagcttaaccacacttagttctctcactttcttgacccccatgtttgcatccgttttcgggtacctgtacctgggtgagaccttctcaacagtacagattggtggtgcgcttctcacactggttgccatctacatggttaactacaaaagcattataggtacttagggcaatatgagctactgaatgttttatagaactggtggcggattacaggactggaggattagtctagaccagaagtctagtacaggcaaaagggattctactgagttggttaggtggtctgagtaatacttctcaggtcttgaatttgaatttcagtggaagtgaatttcag

SEQ ID NO: 32745 - DNA, 834 bp, Zea Mays
atccgctcccctgcaggccacgccttctcgccgctcgcggaaccaccgccgccacctcaccactccagctccagcccccgcccgccataatcgcgtccccttctcgtccttccagagcttcttaaaccacccggcccgctcccagcgtcccttctccgcccacagccagcggcgaactcgatcgagcaggatggggtttatcggcgcgcacggcgtggagacgctgaagcggtataggtacagtggagaggaccgctcggtggtggccaagtacgtgctgcagcccttctggagccgatgcgtcactctcttcccgctctggatgcctacatggttatgctttccgacatttcagatcacacttacaggattttcgtttctagtactatcagcgctgcttggctatatatgttcgcctcaccttgacactgctccccctaggtgggtccatcttgcccatggattacttctcttcttgtaccagtttgaagcattggcccttggaagcaccttgatgtgtggaggatggacactttgtttctgggtagttgccgctgtcccgttctatcttgcaacctgggaacaaggtttgggtgggatggagccaaaaaactggattcacctggcttcaacccacacccatggccccactgtgccaagatgtcaggattttcggaaatcactaccctttttcggttggattccacttccatttctttctgaaattgaaattcctttatatgttcttgtgctgattcttatgatcgtatgtgctgttatacctactgttagatccaatttattgaattgataaatgcaggtagtgactttggg

SEQ ID NO: 32746 - DNA, 1199 bp, Zea Mays
ggggcatgtatgacatcggtttttttttctaccgacgtccggagaatttcattagcaatcggtggccacagagagttaactaaaaataattcagcgacagatatcttcgactcctcgttcgtggttccccatcgtcatcgccatggatttctcttaggctcacccgtccgctcggctcgcttccttccccactctctctgatcccgtcgcacttccctcctcgctgcagcccctctactattgcgattaccgtttcctcgctgccctttcctttttcggtcggcagcaatcaccggggcaagcgaaccctcgatttgcgtccccgctctctgctagcgcccctaaaagaggagcgaagcgatgtctatgtcgaagacgggtcaggccgcggagaaggatgagcagcagcagtcccgagggatagcactgatgcagggcatctgcgccgtggtgtaccgcaaggccgataacacgccctgccccatcaagcagcattcaataaggacgctctcaagagtttgaacatcacccatatcttgatcgttgcaaagtcactggatccagtatttccagctgaatttaattacaagaagatcgaagtacttgatatcccagacactgatctgttaaagcattctgatgaatgctttggtttcatagatgaagctataagctctggaggcaatgttttggtccattgctttgctgggcggtcaaggagtggagcaggaatggagaatgcaacctgtgcagcactgataattatactagtgttataataggtgcagaaggcctcatatgtagtgaaggcgtatgcgttgtaagagcgtcttgaccgcgtattatgacatctggataacaagcgaggccttggcaaactttatgatgtaaacagcaagcaacgttgttcatccattgggatgcagtttacatgttgaataatattcactgcaatttctcttcaaatgaaccaaagaggggtaatagttggtgctctctctcctgcatagatgcggcacatcaatcaaccttagaagaagaatactccatcgtgcatagatgcagcacaccgttgacttttctaaaaaactttgactagtcgtgttattcaaaaaaataatgagttattatttattttattgtgatttgttttatcacttaaggtaataagacgagtgtccaaagttttcaaaaaaaag

SEQ ID NO: 32747 - DNA, 1563 bp, Zea Mays
attatgtcgctgataatatttattttctgataattttcacatcatttgatcatatatctacattgatgatttgacagtattttttttgtctgttttaggttagctagaaggaaagcggagatgcttcagtctccaaaatttcatgtgtcgagaacaaggcttatcatctacaatttgcctaagactatgaccattaatgacgtaaagaagctttgcagagaagcagtcatttctcgtgctacaaaacaaaatcctgtcatccggaaggtgaatatcctgaagaatgaaaagaaaggcatacagaagcattcacgcggtgtagcctttgttgattttcaagaacatgaacacgctcttgttgctctaagggttctaaacaacaatcctgatccaatcgtgaaggcaaacagtgccagcagcttcccgccgacggctcacacccacacgggcacatgaggtggccagctcttcggcagctgcggccactggcacgtgtgatgcttctgtggcttcaatggtttattcgcgcatgcgaggctccatgagacagtggtgatggactgatggtgtctcgtgatgcgcttggcgaggcagctatggccggcggagcagatggaggcggcacaactatgtggggttgagaaacttttggttcagaacgtcgcccaattgtagagtttgcgcttgaggatgttgaaaaggtgaggcttcagaagattcgaatggaacggcatcgcaagtcagcagcagaaactgcagaagttcagcagaccccttcaggggatcaacctgcaagtgaaggccgtaacgcagataacagcaggactttcagaaaaggaaacaagcggaaatcacacagtttaccatctaaaccctccgactctgttgaagggctggccaaggatcctctagttcctggagttcgaaacgcgaaagctgcaaagagagcaaggaagtcaaatgtggggaccattttgccggaccgaggtctaacagctgcaaccccaaacactgctcagaatcaagttgcgtcaagtgagcttgatcaggcagctgctccaaagaaaagaaaaaacagaaaagacggtcaggcagagcaaaagagaggaaaggttacaaaaaggacaaggaaagaaccttccggggaaggaggcgtggacaagtcgctggtggagcagtaccgtttcaagttcttgcaacatggtgtgagcaagaccaagaccaagaccaaaggatagttgacttgggaactgtgggaagtgggattgatgttgaagagcagcacggtgtcccggaccaccgtataacgtttcgaagagcaagtctccacaaactttctgaggccaaaatttcgattgtgatgcttaatagttttgtgtccatctgtactgatatttataactgatctagttacagccgtataattatgaatcatcttatcatacaccgtttatggcttcatgatgacctgcctgtgtctgaaattcctgtgttggtatttctaacggaaactttgcaggaaattcatgtggcttctcgagtgtatgtgattttgcttccaac

SEQ ID NO: 32748 - DNA, 2017 bp, Zea Mays
gcggccgtctgctacttctgtgatctctcctcccccgtctttcgtctccggttgcatccccgacgtcctcgcctgcggtgacatcgatctcattgctgaaacgcgggcaaaagaagtctctgagtttcttgaaatgctagatacttcgagggacggacgatcttccaaggtccatgggctgccacagaaggagtggaaggtgaagcaagatacagaccaattaagagtgatgtaccgtgagggtccagaggggacaccatttcataccttacttgctgaaggctttgcagatggacctattgacgtttgtacatgtgtgtcatgggaatcaactttatacaaaaaatggtttccacaatacaacctgccaacttttagaattgatcagtcaggctgcttgaaaaaagtgcggattggtgaagagatttgtatggtcagaaagggtgaaggttccatggccggtttcagagagagaggctattctacactattttgaactggaatatcttaaagaagatgtcgtaattgtgataatgaaaactttatcagacttggatgccatagatgttcgaacccatggatttagtagggatggaattcctgaagctggtgacacagttcggatagatgtgtttggaggctttgtattgcaacggattacaaaagaaagaagctttttcagggcaatagctaatatggatatcaagctagattttgttccaccatggttgatcaacttcatgtcaaggcaactaataggcagcgggcataagctgtatcaaaaggcagtcagcaccgtggccagtcatgatgatgactacaggaaagctttgagaggaccgctctacgtcaggatccgtgagtaccaggattctgatgacaaggcgaaggtggcagcaacagaggaaaatgctaccgaggcgccccctgataatgccactacacaaaatcgtttgtcactaacaaataccgtatcgaatagcgagattgtggaggagtccgaacagaacacatccgtcactgtggatagtcttccaactagccaacaaccctatgtgccagttgagcaagcatggcaggtcggaaacaggccatacaccagtcctgaggtggagcgtgcgctgtgcatattagacacttctattgcacttctcagaggcgatgataaggctggaaatgtcaccacgctacaaaatctgctcagttacgatgcatctttggaagcgagtactgctgctggttccgtaacttgtcaaacaaacgttcttaacgcagacagtcttccgaatggccatcctgttgccgcagcgccacaagactccagagagaaagctagcgatagtgccgcagaggaagaagacgccggcgacgaaaactctctgaaaaatccgacagcttccactgtgacgaagagtgtgtcgatgacattgcgaagtgcaataagggtgcacggtgaagagagcctggacactgatggcttcttccatcagaacggtttcagcaacagcaaggagtcaaggcgagcgaggaagtctaagaagagatggccctgctgcttaatccctaccactatgggatgatgtgggcccatcgtaggacctcgttcgttcaagttaagttgctgattttttgagtgtactattaacaaacagtaaactacagaaatttagcgcttcgtcagttacacgatgtgggttcagacggtatgttatagcgcgtagataatgtcttggtaaatgtaaagtagaatcgttgtaaacaacacgtaattcttctcacgagagctctgatttgggggtatatgggtaaagtatatgggtaaagtacatatactattattttcacgcatggtggttatgctcagcagagcatgtaaacgtataaaccactgttttatattatagactacactattataaactcgagcttgaaatagtgagtgtgatagagagttggatgggtagtttgccggagacagcctagcctaagattggatccttccggttggagaaggaat

SEQ ID NO: 32749 - DNA, 916 bp, Zea Mays
cttcttttctcccgcaaagaaaaccctagtggtggccttttcccccttttgcccctccttggccgccaaccctttccccccctccaacacttggccgcccctctctccttttcccttgggctggctgccctctcctccgatggcagcccctctccatggcttcctcctccctctagatctccccccgcgcagcaaggatcgagaagaggaggagcacattgagttgaaggggaagagaggatcaaggagatgttgtttcccatctcttcttgcagaatttcttggggaaaccctaggtggctacactccagatcatgcctagtacatttttcttcttcgatgaaggcaagtgaatgtagcggtggttgcttccgttctgacctgttatttctattgcctacactctaatatttagaagtattggattctttcataattggactctatggtgatgctttacttgcttgcattatattgatgctcaatcatatattgatgatgattatgattcgagtatgactcatgagattaattcacacccctgaaggtaaatgaagtattatttgaggttggtattgtatctgaaggtaaatgaagtattatttgaggttgtattgtatgtgaaggaagtgaagtatattgataaatgcagcatgccatatacattgcatgattcacttgcatctgaagttgggttgtgacctatggtccgaccgtaccggtacaacttagcatcgtacgttgcccgaggaggggtacgatgcggcttcatacccttagaggtatgaaggcagaggatatatgcattgcattcatatgcattcattgaagtgatatttgcatatgatgtggttttataccctcagaggtatgaagacagagtacctacactttgtgttcctatgcatacattgaa

SEQ ID NO: 32750 - DNA, 1029 bp, Zea Mays
gaaattccttatactttagtttcctatcagtgtctccttgcactcctttgagcatacaacttttagtcttcagatttttcatgggtgtcattttcttgagaattgttgtttgttttgagtatattattttatcattggcctagaaccttatgacttgtttaatgcctgcccgttctttctgtttctctaccagaggaattgcttcacatcatctcaatagaactcaatggcagttggcgttcaatttggactatggaattcaattatgagttgcagtttgttgatattaaaggaaatatacaggttggcttttttacttaacaaggtagatgctcactattttgaagagggaaatgtccagctggatactaacattgatcgcaaggactccaccataatgcagtcacctgacgactgtgcagtttcaataactagcatcattcgacatcacgagtctgaatatttgtcatctctcgaggaatcttacttaaatttgtctgatgcaactttcaaggatcttcggagaaaacttccagtgacccgtactcttttcccatggcataacacactggcagtcagtcttacgagagaccttgccaaacaattagcgcttggaaaatgaagtctttgcaggccatgtcaccggatggcttcaagtgtttttttaatatccatgtgctgttctgtagtaatcagcattcttcatctctgagcttcccaatcccattgtaaatcaagaacacacttttttttttgtggagatgtaaaagatttcgccttccctagggtttctttggatgccgttaggaaccaaacagcctcttactgacgggtgtgaatcatatgtttcttcatcaatgctccaatctgatggattattgtaggtgttctgtatgagtttaaaaacaaggaccattcaaaaggaatgtgtgcgaaactatcctttggatagagattgatctttgagctcagacgaaggatgcacatatgtggtaacaattaggaaatgcttcgagggtggtgtttgtg

SEQ ID NO: 32751 - DNA, 2298 bp, Zea Mays
tcacacgcgatggctcctctgctcctgctcctgctcctcttccccgtccagctccagctcctgctcctcctagccgtagccgacgccgtccccggtctctgcgccagagccacatgcgccggccatgtcatccagtacccgttctggctcaactcctcggcgcccgactgcggccaccgccacgggatcggccttgtctgcgagggcaactcgacgctgaccctcccctacatgtcccacagatacgtagtgtccagcatcgactacaagacgcgtaccgtgctggtctcggacgccgacatcggcgacgagtacgacgcggccggctgcccgcgtgtccgggtgaacctcaccatcgacaccgcctggctgcggcccgcggcctccgacgccaacatcaccttcctgtacgactgcaagaagagcatcaccctgccctccgccgtggaactgagtgggtgccattggcaacagcagcagcagcaacaggattattgccgtaggtcgtacgtgctgccggacggcgggatcacgggcgcggaggcgcaccagtacgggtgcgaggacgtggtggtggcgccggtgctggacgcgcacaggagggagatcctgggcgcgcccccggcgaacggatccctccgccgggtgctgcagggcgggttcgagctgaactacgacacccactccgagctgtgcgaccggtgcggggcctccggcgggtggtgcggctaccgacgcgacgaggcgcccgccgccggcgccggcggcgggctgacgttcgcctgcttctgcgacggcggcccgacgaccacgggcctgtgcggtgccgagtcaaaaaggaaagcaagaattcttgctggtgccctgggtggtggtgctgctgcgctgcttgttggtgctgccatatttttgttcgtcatcatgcgcaagaggaagcagaagaagaaagtgatcaactcgtcttcgaagctcctcaagtacagcggctctggtgggaccccgcgttcgcgggttggtgacatggagtccggcagcatcgaggacccgccaacgcaccacttcacctacgaggagctcgaggaggcgaccaaccgcttcgacgaaagcagagaactcggcgatggcggcttcggcaccgtctacaaagggtacctcagggacgggcgcgtggtggcggtgaagcggctgtacaacaacgggtaccggcgcgtggagcagttccagaacgaggcggccatcctgtcggggctgcgccaccccaacctcgtcatgttctacggctgcacgtccagccacagccgcgagctccttctggtgtacgagttcgtggccaacggcacggtcgccgaccacctgcacgggcagcgggcccccgagcgcgccctctcgtggccgctccgcctcagcgtcgccgtggagtccgccgcggcgctcacctacctgcacgccatcgagccgcccgtcgtgcaccgcgacgtcaagaccaccaacatcctcctggacgccgactaccacgtcaaggtcgccgacttcggcctctcccgcctcttccccctcgacgtcacgcacgtctccaccgctccgcagggcacgccagggtatgttgatccagagtaccaccagtgctaccagctgacggacaagagcgacgtgtacagcttcggggtggtcctggtggagctcatctcgtccaagccggccgtcgacatcacccggcaccgcagcgagatcaacctggccagcatggccatcagcaagatccagaagtgccagctggaggagctcgtcgacctcggcctgggctacgacaccgacccggccaccaggaagatgatgacgatggtcgcggagctggccttccgctgcctgcagcagaacggcgagatgcgcccgccgatcaaggaggtgctcgaggtgctcaggaacatccagggcgagtgtctgacgtcggggaaggatggggacaagagcaaggacgggcccttctctcccaccacggttcacgctccgtgggacagcaggtccacgacgcccaacaccagcagggactaggatagttagtgcttgaggactgagaccggccgaggtttaattcgtgtctgtattgctgctgtgtgactgctaggcatgccatctgttttcaggcttcgtagttagttcctggtgatgtaaatatttgttttgttggtgctgtcaggacagagggaatgcacatacatgtgtaagagtggcgaatggtattatacatatatatacacgggtacttactgaataaatagatagatgtcgcttgtgact

SEQ ID NO: 32752 - DNA, 3204 bp, Zea Mays
tcaagcgctgtgagccgcagtaaatttgaaatgagcaaggacaacagaaagggcaggaggagagccaacggaccatgtacttctgtacctttataaaattcgataagcgagcccacggggcaaacagtcacttgttcacaggtcgcagcaactcacgtgttcacgagcgtctcactgagcggtgggtcacctccagcgcgatgacaggtggagccggtgtttgaacgcggcagtggctacgccgctacgggcctggctgctactcacaagtcacaagcgagaggagcatgtcgttttcgtttcagtgctgctgcctgcaagccagcaattgcttctccttcctctccctccctctctcttcccgaccgtttgcgccaccggaaggtcctggaagctggaacattgtgagatgaggagcaatagacgacgccttggaggaagaggaggaggatggggtggccagggcggtggtgtaagtgtggccgcttccttcgccgcgctgttgggctgtgtcgtggccctcgtcggcggcgccgccgggcagggcccccggcccccctccgactacaaaaccctcagcggcgccgctccacttgtggtggccaaaggtggattttcaggagtgtttccagattctagccaaggcgcctattctttcgcgatgatcaccagcgcaccggacacggccatgtggtgcgacgtccaactaacaaaggatggtgttggagtctgccttcgggatataaatatgaaaaactgcaccagtgttgatcaagcctaccccgagagaaagcggacctatgtcatcgatggtgtgcggaaaactggatggtttgtttcagacttcaccattgctgagcttcagtctgtttctctaacacaagcaatttggcctcgcactaggagattcgatggcatctatcctatcatcagtattactgactttcggtcccttgtcatgccatctcctgtttggttgaatgtacagcatgacatcttctacaaacaacatggtttggacatgaggaactacatactttcgatcaaaaagggtgtatccatggattatatctcatcacctgaactgggcttcctcaaaaatatgtctggaagagttggtcgcaaaacaaagcttgtgtttagatttcttgaaaaggccctcttagatcattctataaatcaaacatatggttcactgtcgagtaacctaccatttattaaatctattgcatctggcataatagtccctaagagttacatttggccggtgacgaaggataactatctactgccatccacatcaattgtcacagaagcccacaatgcagggctggaaatatatgcctctgattttgccaatgatagaattatcccctataactacagctatgatccgttggcagaatacctgaactttatcaatgatggtggcttctctgttgatggtgtattgtcagaacacccaattactgcatcagaggcaattggttgttttactaaactgaattcaaataagactgatcatggagaacccttagttatctcacataatggtgctagtggagactacccggactgtacagacttggcctaccatagtgcaattgatgatggtgcagacatcattgactgtcctattcaagtgacaaatgatggagttcttatgtgcatgagttccactaacctgcttgacactacgaatgttcagagaacaacttacaactctctggtttctgtcgttccagatattcagcctcaaccaggaatcttcacattcaacctcacttggtccgacattaacagtaatgttttaaaacctaaaatatcttctccagtgagtggttatttccttgtaaggaacccaagatacacaaatcaagggaagtttttgaagttatctgactttctagcaatcgcaatggataaagacttgtctggtgtcatgatcattattgagaatgctgcatttttagtaaattcattgggaattgacattgttgattctttaaccactgccttaagtgctgctggcttcgataatcatcctaccaaggaagttctgatcaagtcaaaagatagtgatgttcttgtcaaactgaagcagcagaaaacaaaatgcaagcttgtttacactctaccctctggcatcggggatgcttctaattcctcgttgaaagacattaagaagtttgctgaatatgtagctgtggacagcaaatctgtttttactctaagctctgacttcatcataagacagaacagtcttgtgcaagatctgcagtcagcggggctagctttgtatgcagaggtgttccagaatgagtttgtagcacaaccattggatttcttcggagatgaaactgtggaaatcaattactatattcaatcatttaatttatcaggcatcataactgatttcccgaagacagtcagaagatataaaagaaacacctgtacagttctgggaaaggatatgcccagctacatgcagcctcctcaggctggttcccttgcacagtttctacaaaccttcaaaacccagcctccatctctgccaccaatgtcgacgctgaattcttcaagcgtggaggagccacctcttcctactgttgcgttaagaagtgtatctgatggtagtgcctcgggggcgaccaagactcctggcacaccttctgatgctccaacggctacagtaaatgctggcatgctacttgtgatggttttcacagctttgctaatctgagaagccacatgagattgtatagtagacgactgaagctaatctgatctcccttggattcaggtcaagaacaggtaccacaggatgaggcgcttggaggatgctgcgatgtgttcatgagaggtctaggccgtcgtctcccagtcaactgtgggttgctggaccgttgtctccttataatataattatttattttgtatagaactcctattatatagtaaagttgtgacattcgatcatgtgccatgatttatcatatgtgtcagacttgctcccagcatacctggtgattatgttcgcgcccaggtcttggtgccccaaaacccgtgtgtgacataagaacactagacggagtagttacggttgttttaaggacctattgacttttgactcatcttatgcttgatgctgcttcaaaaacttgtcatttaaactgcttattttctatattcttgtctctgttg

SEQ ID NO: 32753 - DNA, 1309 bp, Zea Mays
cacggtcccacacacccgacgtcccgccctccgagcccacctcccaatgtcacctccctcgcatgtcgacccgacgcgtgaagtttggttgataacaccactaaacaatgatctatacatacacaagtgtcaccctgccagttgattaccttattaaataatgacctatgcctgcataagtattacccgttgcaacgcacggtcatatgcctaataaaaggcataaacctggcctcaccccaccgcgagccgaaccggagcgtcaagcaaacatccgtcgatcccgattccgaccactgcgctcgcgccatcgcgccatccacccggcattgtgcgcccgagccgggctcgttggatggcgtccggaggcgccgcccgcggtcgccttgctgaggagcgcaaggcgtggcgcaagagccatcccctcggctttgtggccaagccggcgatgctgccggatggttctgtcaatctcatgctctggaactgcgtcgtccccggcaaggaaggcgtcatgctgtcaggcaagcagcacctggttgcagatgtaccaggacagtagttaatccctgtgctatagctagtagtattttattgaaccttacttgtggccagatgtaacatttgaaacgagctgatcgatttgtaactaaatgaatcagaagcatgattgaatcaactgaaaatctgaaagactgttgctgcggagcaggacgagccattattaaagactgactgattgggaaggtggatatttcccggtcactctccatttcactgaaaattacccaagtaaccccccaacctgcaagttcccacgaaggtttttccatgtcaatgtctatgattctggggatgtatgcctgtcaatacttggtgatgcatgggcgccttctatcacagtgcggcaaattctaataggcatccaggagctgctggagaacccaaacccagcctctcccgcacaggattttgcttacgatgtttttgcagagaatatgccagaatacaagagacgcgtccgtgagcaagccaagaggtatccgtcgctcgtgtagccgtggacctctgcaacacaattgctgctaaccaagtagtcactcactttggtgtagtggaacttgttcatgacgtgcttaactatggtgtctagttagccgtacgcttgttggaactgctaaagtgcagcttattggaactgctaaaatgcccttgactacgtcttattattatggtttatcagtatagtgttgtcaacatccaaaatttgttttggccctgtagaatactcaaattggtaacccctaac

SEQ ID NO: 32754 - DNA, 9611 bp, Zea Mays
tctttccagaagaactccggagtccggatctctcccctcgcactcctcgatctgactgttcaagaaaaaaaaccccttgatcggaagaaaaccgaccgggaacattttatcctgtcctgttgcaattcccctcacgcgatctcgccgtgtccacttctatcactacctggccacctggggatcgggttgggctggattggatttccgaaccgaatcctgcgggctcgcctcgcgtcgccgtcctcttcgccgcggaggtgatgcgctgttgccgccgccgccgccgctagcgccggatcgggggcgatgaacatcgtcaagggcgtcgccgatctcctccgcaagtcgacgcccgcctcgccgggggccggcgccggcgggggcggcggaggcggagaccgaggaggcgtcgggtccccatccgccgacaggctcgccgccccgccatccccaagggtccgcttcagtgacaatggtgaggaaggagtccttaatgcgctttggcacaagtatgagagtggcattgacaaggctgagaagaagaagactctgcaaacatttgtcatgcattttgtaaaagcatttaaagattgggagccaggctatattgagcaatcaatcgatcatgaatcgttatcagatgatacaattttaggatgctctactggtcatccttctgaggtcatccttattctcattcaagagatttctcaaataacttcatctatcactgagagcagcagctgtccagaatcctctgctaacatttcggagttattgggtgacctgggattaaacgcagaaggtttgacaattttagagtgcttgacaattctcacgcgctcagtgcataactgtaaagtgtttagttattatggaggtgtgcagaaggtcactgcacttttgaaagccgcagttgtaaagctgaagaccttgaccagcttgcttgccgcagatgaacaactgtcaaataaaactgtagagaacatgaggacgatgcaaaaggttcttgtgtacattgttacaataatttcaaacttcatggatctggaaccaaatacaacaaggatttcacagtttatactaaacagctccaggcataccctatcgagcaactatttggccacagttgctccaaatacttccaaaagcatggtttttgatagaaattggcagaaaaaggccattgtttcagttatggaagctggtggtgtcaattggttagtagaacttctaagggttattcgaagattgaatttgaaagagcagtggactgacttgtcactccactttataactttgtactctctgaggtcaactatatctgaaaatgttcgtgcacaaaatcatttcagaagtatagggggactggaggttctattagatggactgggactgccatcaagcaaattttcagtctcgaagcagtcttttgttcccagtgatgaaaggagtggcattctccagctccagatactatatttggaaattctgagggaagcagtcttcggtaatgtcaataatctgcaatttttgtgtgaaaatgggcggatacataaatttgcaaacagtatctgttggcctgcatttatgcttcaggagtatcatcagcaaaaaattcttaatgctcaggccatcctgaaagctgataaagaaagcactgggccttcaccaacattggaatctttctcaaatcctgtagatattcttgatacatcagaatggaacgagtattctgtaaaattaagcataacactttgctcatttctccttcctcccaaggagatcaaatactgccctgctccaactgatgttacccaaatttcactatccatctcattggcttactgggagcaatgtgcaaggtggattataaaggttctttcaacagttttcccgtgcatgaaagcttgtgctagtgaaactgatttgcctaaccatataaggattttagcaaataccatgcagcattacatgctttgcacgtttaggaaggttcttatttcagcaccagctctacttaaatcttttcgagaggagggtctctgggatctgatattttcagagaaatttttctactttggatcatctttggactacattcaacagaatgatcaacttattgatgctcccaaatcaatcgattccaaaagtttcagtgaaaccgatgtcaacgttcttcaagcagaagctatttccttcttggagtttgctgcaacactcaatgaaaactcaaataacttgaatgcttagcattggtaggtgcacttgaacattgtacctatgatcctggattggccggtggtattgttaagagctttcacgtgatcctacaacttgcaactgaacaaactctagcttctttcaagtcaattgatgtgctcactagagtcctgaaggttgcatgccttcaagcacaagaaataaggaagctgtcccaagatgacttaaatcaaaatggttctcaatccagaaatgctcagacgacttattcagatgagagaattaagaacacttgtgcatttgtgaaactggctttcaaccttttcaaggagtatgccacaatatctgacattggaaggattacagttttatgcaatgctaattgcatcgagtgtttatttgatttgttccaagaagaatacctcaggaaacacatattggagcaagtacttgccttatttaggttaccttcgtcatcagcacaacaccacgcagcaaagatgctactatgctccaaatatcttgagactttcactcgtgcaaaagaaaaggaaaaggcttttgcagaattgtcaattgatctattagtcaatatgagagaggtcataatgatagaccgtgtgtattatcaaaatctgtttcgcaatggggagtgcttcttgcatatagtctctttgctgaatggaacttttgatgaagcagttggggagcaattggttcttaatgtccttcggacactgactgctctacttgctgaaaatgatgagtcaaaggttatcaaacactgcaaagcttgctattggacttctgtaagtggattccaagtcctaaactcctggatgccctacttgacatgcttgtcgatgggacatttgacataaatgaaaaagcaacaataaagaatgaagatgtgattatgctattaataaatgttctgcaaaagagcagcacttcactccagcattatgggcttatggtcttgcaacagttgctcaaggggtccattacaaatagaacttcttgtttcagagcagggttgcttagtttccttcttgattggtttaaagttgagaaagggaatgacattgtaatgaaaatcgcagaaataattcagatcattggtggacacagtatttgtggaaaggatattcgaaaattttttgccctccttcgtgacgaggagattattgcaaagcagcagcacagttcattgcttttgacaagtgttagtcacatgctcaaggaaaagggtcctgaagctttctttgagtttagtggtcatgactctggcattgaaattaaatcatcagttcaatggccttacaataaaggtttatctttctgttgctggctaagggtggaaagtttccctgagaagggtttgatgggtctttactctttcttcactgaaaatggaaaaggatgtttagctatgattgggaataatactctaatctatgagtctgtcaatccaaagcatcagtgtgttttgttatctctaagcctccctatcaagcaatggaaattcctttgtgttactcatacaattgggagaaccttctctggagggagtcagctgagatgctatgtagatggcgatctagtatcaagtgaaaagtgcaggtacacaaaagtaaatgaactaatgactcgctgtagtgttggtacagaattgatgcccatcggtgaagaaccttcttctcttggctttgagaacactcttgcttttactggtcaaatgggccctgtttatgcattttccgatgctctctcccctgaacaaataaggggcatttataacctaggaccaagttacatgtactctttccttggtgatcagaatttgcttacaaatgatgactcacggtacaagggaatacttgatgcaaaggatggcatttcatcgaaaatgatttttggcttgaatgcacaggctagtaacaatcggactttgtttaatgtatcatctgcactggatggtcttgacaagagtaagtttgaggcaaccaccatgggtgggacaaaattatgctcccggcgcctgctgcaagaaataatctattgtgttggtggcgtttctgtatttttccctcttctgatccactttgatgatgctgtggttcagaatggagagtttgccaccagagatcaattggctggtcaagttattgagcttgttgcatctgttctagatggaaatatagcaaatcagcaacagatgcatcttctttctggattttctattttagggttcctgttccagtctgtttcaccgcagctgctaaatatcaagactctttcagcatcgaaatacatgtttactattttgaagacctctagcatgtcagatattctattgagagatgctctttcacagttttacttgaatccacatatctgggcatatgcaacctatcaagtacagagagaactttttttgctaaaggtttctcaacatgatatcagagctcttgtttcctttcttgaacgaagtcaagatgttgcatgtgttgaggatatactccatatgattatccgcgccctttcacagaactcgcttgtaccatctttcttggagcaagtaaattcacttggtggttgttacattttcatcaatcttcttaagagggaatttgagccaatccgcctattgggccttcagcttcttggaaagcttttggttggggttccatctgagaaaagagggccaaaaatttttggcctccctgtaggacgacctagatccattgctgaagatataaggaaaggggcaacagcagcacctcaactgtttttttattcaatatctgatagacttttcaaatttccactttcagatcatttatgtgctagtctttttgatgttcttcttggtggagccagtcctaagcaggttttacagaaacgttcccaatctgatgctttaaaagataggagcatggctcctttttttgtccctcagattctggtttgcatttttaaatatattcaatcttgtcgagatgcttcagtgcgtacaaagattttaagtgatcttcttgatttgctggattcaaatcctgtgaatgttgaatcccttatggagtatggttggagctcttggcttgaaacatctgcgaagcttgatgtacttaggaactacaaatcgaattctgtagccaaggctgacggtttggagaccaatgagctgattcttgtgaggaacatgtattcgttggttctctcctattgcatattctctgtgaaaggtggctggcatcaactggaagatacaacaaatttccttctactgaaaattgagcaggggcagttaccaaattcctccatgctccgagacatttttgaagatctcattggaagccttcttgagacatcttctgaagaaagtgttttcaattctcagccatgccgtgataatatcttgtatcttttaaatcttagtcatgaactctttgttgaccaaattggaattaaactcttgtttccttcacctgacatgtctgcacatttgtcatctgatgacatcaactcggcagttctagaaattatgaatactgagggcaatggtctgcttacaaggtccttactaagggtaagatcccagtatgggcaacttgatgatggtgcacgtttccatgtcatgtcacacttgattcttgaaactgtgatctatggaaagtctatgcttacaactaatatagtaggcagagatgattctactgaagcaaataacagtaaggaggctgggttcattcttaatcttgtacagaaggaccgggttctcactgcggctactgatgaggcaaagtacatgaaggatgcaattgctgatcgcatgaagctggtccaggaactccattctaaacttgatgaacgctcaattcaagacgttgaacaactgcaaagttttgaggatgatgtacagtttgccaagactgctgctatagctgcggacgacagtagaaaagcagctttccagctagcatttgacgaggatcagcaaattgttgcagacaagtggattcatattctccgtgctctgagtgatgagagggggccatggtctgctgctccttttccaaataatattgtgacatactggaaacttgacaaaactgaagataaatggcggcgccgactgaagctcaagcggaactataagtttgatgagtgcctttgtcatccatcatccatcaaatctagtaacgataatgctgccccaactgttgacccatctgctaatgccaagataacagaaaaaatgaagcacttacttttgaaaggagtgcgtggaattacaggggatatcagttctgaatcatgtgaggatagcaacgacatgattgatcctccccagaatgtcccgccagagaaccacactgttagtgatacttctgattctgcagattcctcagattatcctgctattgttcaaaatagaaaagaaagttcatcaaccagtagtgataatgattatatcgaggtgctatcatcagttcactgtgttcttgtaacccccaaaagaaaactagctgggcaattgactatcacacgaaatgccctacatttttcttttgaatttctagttgaagggactgggggatcatctgttttcgacagatttcatgataaaaaagattcagactccaagaatgagatgggaggtgtggaaaaactgaagggcaatcttgatggaggacgaggcaatgctgctgaatctagcgacactcaaattaaaaatcaatctggtaaaatcaaacaccatagaaggtggaaaataactaggataaaagcagttcattggacacggtacctactacaatatactgccacagagatattctttgatgatgcaaacgcaccagtatttcttaacttttcatcccaaaatgatgctaaaagtgttgggtctcttttagtttccctgaggaatgatgctttgttccccaaaggaacaaccagagacaagaatagtttaatttcctttgttgacagaaaggttgcccttgaaatgtctgagagtgctagggaaagttggagaagaagagaaataagcaactttgagtaccttatgattctcaacactcttgctggacgatcttacaacgatttaactcaatatcctatatttccttggatattggctgactactcttcagaaaagcttgattttaacaaatcatctacattcagggacctttcaaaaccagtaggtgccttggatgcaaagcgctttaaggcttttgaagatagatatcttaattttgttgatccggatataccaagtttttactatggatcccactactctagcatgggaattgttctttattaccttctaaggcttgagccttttactgcgctgcaccgcaatcttcagggtggtaagtttgaccatgcagatcgtctatttcagagcattgaaagcacatacagcaactgcctatcaaatacaagtgatgtcaaagagcttatacctgaattcttttacatgcctgagtttcttgagaattcaaattcatatcaccttggcataaagcaggatggtgaaccattaggtgatgttggtctccctccatgggcaaagggttccccagaagaatttattcatatcagtcgagaagcccttgaaagtgaatatgtaagctctaatctacatcattggattgatctcatatttggttacaagcagcgaggcaagcctgcagttgaggcagcaaacatattttattatctgacatatgagggtgccgttgatttggagaacatggatgatatgttacaaaagtccgctattgaggaccaaattgcaaattttggacaaacaccaattcaaatttttcggaagaaacacccaaggagaggtcctcctataccaattgtgcatccactatattttgcgccacaatcgataacagtgacttctgttgtcccgaccatagtcacccctttatctgtattattcattggtttgttggactcaaacgttgtcatgatgaatgaggggctcatactctctgtaaagctttggctaacaacacagttgcagtctggtggaaacttcacattttctggatcactggaacctttcttcggaattggttctgatgttatttctccgaggaaaattggcacttctttggctgaaaatgttgagtttggaagacaatgcttagcaactgttcaaattcgtggtgacaattacttaattttgtgtggtaattgggagaatagtttccagatcatatctctaagtgatggaaaaattgtgcagagcatccggcagcataaagatgtagttagttgtgtggcagtttcatctgacggaagtgtgattgcaacgggaagctatgacacaactgttatgatctggtatgcatttcaagggagatcaaatgacaaaagatataggaatgcaaattacgatctatcaactaaggatcatgtcatcattgaaagcccttgccatatcttatgtggccatgatgatattatcacatgcttatttgtcagcacggaattagacattgttatcagtgggtcaaaggacgggacttgtatgttccatacactgcgtgaggggacatatgttcgatcgattcgacatccgtcaggtgctggtttgtcaaaaatggtaacatcacagcatggcaggttagtgatatactctgatagtgacctttctttgcatatgtattccataaatggaaagcatattgcttcttcggaatccaattgtcgtctcaattgcatggagctaagttgctgtggagagtttatggtatgtgctggtgatcatggtcaaattgttctccgctccatgcattctcttgatgttgtttggaggtacgagggagctgggaaaacaataacttccttagttgtgactcctgaggagtgcttcttggcgggaaccaaggatggtagcttgattgttttttcaatagaaaaccctttgcttcgtaaaaacgccatgcaacggcacaaggcaaaaccttccattggtggttagaggtgtagatcaaaacagtaccagaacttcttgctgcatttcaaataaaggttatcaatccgcaataattataacagagaagattctataactcctgtataaatgtacatacgtcatcagatcgagtttaccattctgaagagtgcatgtgccgatcacaatcaagaggataattcttctaactgcaaaacacatactatggtagcagccatgtagataaggattgggtaaatagagaaaagatgcgccagttgagttttgatacatgtggaccacattgtctgtctggggagataaatttaagagagagcacgtggttgcgaaacaacttttctgcctagctgggtgaacatgccaaatttgattaactttcacc

SEQ ID NO: 32755 - DNA, 895 bp, Zea Mays
caaaacacaatctaaccagctgaataaagtggacaggcagagtgatagtggccaaaactaacctgtatccatggacgccctcggcagatctaggtcatgcatgccatcggcagcagaacacgagacccttcaggaggtgttggtggacccaaaaacccaaaacacacgaatgaggacggcagtagatgtagttaggctgccacaatgcgaagaggggacggagaggggacgcgtagtacggggaggcatgtaaacaaaacgaagaaaggtacaagccctgtgggtgtgaaatgatgagcattaccgacgaccataacgcgatagtgtcgagacctgtttgttctgtagatccgcgcggcagggaggtcggtgaggagcgtcacacaccgtatcccatcctttcttgtagcagcagcaactgcgcgtggggcctcgctgaagcagggcccgccatgacagcgtgagagcagcctcaacgcgcgtcgggacctgcttcgcgcggcgagatcggcggggagcgcccagaccgcatagcagcagctgctgcgcgtggggtctcgtcgaagcagggcccgccatagcagcgggagagcagcctcagcgcacgtcgagacctgctccgcgcggcgagatcggcggggagcgcccagaccgcatagcagctgctgctgcgcgtggggcctcgtcgaagcagggcccaccatagcagcgggagagcagcctcagcgcgcgccgggacctggctccgggtgtcgtggatctgtgcggcggcgagatcggcggggagacgcgacggcggatctgctccggagacacgacgactgttgcgccagcctgctccaaccgggtgtaacggaggtcatgggctcgtggctggcgagttgccccaacagcg

SEQ ID NO: 32756 - DNA, 4735 bp, Zea Mays
cgcaccgccagtccgccatcggccaccgcaacagtgcagaaacagagctaaccctgatcctcccctcgcagcctgcctgccaccatcagcggcgctacacctcgccgctgccgccgctggggataaacaaacggaacgaacgcaggttcacctcggatctgcggctcgccggactccgaacgaacgtcacgtcactgaacggacgccacagatttggcctgctccgccccacgggacgcctagccggatttgacagctccacgcgcgcgcgcgcgcgcacccaacccgcgtcttctccggcctgccagtgccgcggccggggctccatccccatccatgcattcgccgaggtcgcgcattcgcgtccgcgacccacacccaaacccgcaccggccctcgggtggcggacgaggaggaggaggaggatgcctccgccgccggtcaccgcctgctccgccctccccgcgttaccggcgacgcccgcagaggcacaccccgccgccgcggcgcggcagcgatcctcaccccgacatctccgccatcgcccgccaccgcatcctgctcgaggccggccgcttcgccgcgcattacctggtcgcccagggcgtcctccccgaccacgtgctcagggacagggaagacccgcccgccagccgcgggaggaatctagacggcggcggcgatcctagatcgagctggaacgatggggactgggcccgcgcctgggaggatgacgacaggcaggcacggaagtcgacgagatgggacaggagaagccagagctttgacgacaggggtaaaaagtaccacgacgccggccgtgatgtagaccggggtgcccgccggactcgagattacgatgagcccaggagacctccgatgtcgagatcctactcgcataacgaccgccgcccttccggctccgctgatggcggcagagtggatccaaggagcaggagcaggagtagaagcagggccaggatccgcagagatttggatcacaccaaggtgacagactctggcattattcctgctgatgctgctgatgatggagactgtgatgtgcactacggtcatgttgatgaaatgccaaggcagcagcggagggtgcctagttcagtggtggttgcagacagtgccgatcaggcaatggctaccgaagacggggaggcggagttcgatatccatggactgaatcgcactcgagacgtttctgaagacgaggacggtgagtttgcagctgctcgcttgaatggtgaagatgatgttcatccgttgaaatctgttaaggaaccggccttgcatagggggtcccagctcagcaatgccgtagaggacagggaagctgccaatgcacccaccatggtcatggatgcttgtacgagggaaacatcaggtgaggacaatgcctactctgaagcaacaaatgaaatggtggctccacatccacatagtgaaggtaaaccagagctgccagcttcgtgcagaccttttgacctcaacgtcgtcgaaactccagatgcctgtgaaatggctggtgatcctcaagcagaccatgtttctgatttagttggctggatacaccagcaaactaactgccatgcttcagaatttcaaggtcaagatgagcgtcacatgctgaagaatgggcacgacttgattaggtatgatctgaacagcgaggctgttgaagacgcacaggatattcacctgctggaggatgagaaattacctgtaggtcttggcattgatgcgcatgatacgactagaatccaatgttggcgcggttcgcatttacgtctgaatcaaaatgctggtgagctggaacatgaaaacgactgtgtgattggtgagcagctgctgctaagtgatggcatggatggacatcttgtccgcgattaccaaatggcgtcagaacccaagatgggtgtctatgatttgcacagctacaatctggaaagcgagaaaatgctcctagatgatggtgcagagaaacacgcacatgataattgccatctacacgacgggcaagtgcttttcaatcagtctgcgaatctacaggctcacaatagggccaatgagcgaacaattcctgtgatcaatctcgaagatgatgattatgaagagcagtctgatatcagggagtttctcgaatccaaaagttatcaatgcctgggacatgcccttctctgagcttgggaagtgggcaagtggccatgttgtttgccaagacggctgcgagattctgcgtcagtcagtgcaatatgtcgtcatcctggagcattggaaacaagatttgcaatgttttaaaggtggatgcatcatgctccatccatacataataattgattgaagaaaggaagtcgttcaggtgctgtactaggagaggatacctgactcaccgacctggcctcagcactcagcagtcagcagcagcttgtaggcgtcttcaaaacttcagcttcaccttcttgtagttgtgttcctttcctttccagtttccatgctggcccggagcagtgagctgcgtctgcgcatgaacgcaaagtaaagctgtgactgtgactgtgactgtcaggaacaggaagtactactacactactggtggcctgtgtgcgctgtcccctgtggagggaaaccaacaaggccaaacacacacgcacgttgggccgagaaaaaagaaatagaaatacgggcccatctcatctatgttctagttaatggaaaatccggcctgtgtcactgatggtagatcaggcccaatgaacacgatcacagccacaccaacgcaccacgctcggctgcgagcttgcgaccccaccgacacacacagcagggaagcgaggggaaggagaggcaaggcggcgcggccagcggcccaggatatctgcgcgtgcgatcccgaggaggcgtcggcgaggtgggatgatatcgcagttcttcgttctgtcgcagcgcggcgaccacatcgtcttccgcgactatcgcggcgaggtgcccaagggaagcgcggagatcttcttccggaaggtcaagttctggaacgacgacgaggcagaggaggcgcccccggtcttcaatgtcgatggggttaactatattcatgtcaaagtcgctggactattttttgtggtaaccacaatggttaatgtctccccatcccttctcttggagcttcttcaaaggattgcacgtgttacaaaagattatctcggcgttcttaatgaagattcattgcggaagaactttattttggtgtatgaattgcttgatgaagtcattgactttggatacccacagacaacctctactgaagttctcaagtcgtacatattcaatgaacccattatggttgatgctggaaggctgccaccgcttggtcctgctgctatgttcatgcaaggcacgaagcgtatgcctggtacagctgttacaaaatctgttgttgctactgagcctggggggaagaagagggaggaaatttttgttgatatcattgagagaattagtgtaacattcagctcgagtggctatatacttacatctgagattgatggaacaattcaaatgaaaagttacctcactggcaatccggaaatccgtcttgctctcaatgaggatttgagcatcggaagaactggatcttcttcatacgattacagaagttcttctggaggaggaacagtcattcttgatgattgcaatttccatgagtcagtacatctggacagttttgatattgacagaactttgactttaataccgcccgatggagaatttcctgtaatgaactaccgtatgacccaagaatttaagccaccattccgtgtaaccgcactaattgaagaagctggaccagcgagggctgaagttctactgaaaataagagctgacttctccgcgagtgccactgctaacacaatcgtagtacaaatgccagtgcctgcatacacaatgagagcgagttttgagttggaagctggagcagttggacagacaaccgattttaaggaaggatccaggagacttgagtggaatctaaagaagattgttggtggttctgagcacaccctccgtgcaaagctgacattttctcaggagtcacatgggaatatcacaaaggaagctggcccagtgaacatgaatttcactataccgatgtacaatgcatcaaagttgcaggtcaggtatcttcagatcgcaaagaaatcgaaggcatacaacccttatagatgggtgcgatacgttacacaagccaactcctacgtagctcgtctatgaggaatcagcatctgtactcttgtttccagtccattttttttgggtgtaatatttgagcgttatcatggacatagtggcgtgtattgtgtaactgtatattgaggttcgcataccgctcagctcctgtagtaacaattgtttttcgtcgtgcaatgtgcagatgaataattcatgttctaatgctgcaaaactgattgaggcgagtacctattgtcttgcataattcctgcgaggttttagaaactgtgaactgacctcgcctgtgggacattgggtcctattgtttcgcataatttctgcaaggttctagaaactatgaactgagctttggccagtaaagctctttgtattaaagtaataatgtattttcagttgagttcaggtactcatgtattcccgttttttttccccaaaaggatatttggtatgagtttttctttctgcagtttggtag

SEQ ID NO: 32757 - DNA, 260 bp, Zea Mays
caaaaatcaggggttgttttgttcctggtgttagttcatctgtagtaatcaagcaaaaaactatgggcaacaatacaaaagctggcacgggcgtgtgcctggtgacgttgccgtctcaagatggctccgaaagaggtgagcgtggctacagatctgagctgcagcttggtaggctgggcgctttcgcctggttggaggcttggagccttggaaggttctcgcgttggacaggtaggctgctggctgggcacacctttgct

SEQ ID NO: 32758 - DNA, 4210 bp, Zea Mays
taataggcaatctctggtagggtagaaacagtaccagatagggagggtcggcaacgatgactcggtaggcgtgcttcatcgccgccggcagctcctccggtcggttgtagtcgtagaaggtgaagtcgccgccgtactgcccgaaccgctcgtcgtactccagcagctgcgcgggcactccggggtccgtcttcttcaggtaggcgtagagcgtcgggcatgcgatgcaggccacggcaccggcggcggagcctgatccagaaggggagacaaggcggacgacctcctccacgagctcccgcgcggtacgctcatcataccagaactggctcaaccgccagtcctccgggaccagctctaccccgtcttcccctcctccagcttcattctgctcctccggacgatgctgttccgccagaaactcccggagcgcctccatcgccgcagcgctgagttgaggcacgttgtcgtcgtcgtcttcctgctccctgacctccccgctcactctctcatcctccataccgctcgcggccatcacatccaccgctggtctgctactctgctgcgggggcggcggcgcggggcaattgggcaaacactccgctggtccactccttcgatacgacgaaccaatggttttagcgaaatgagcatttgtggagttaccacatgggcctcgttggcccaaaggcccagtgagcctgacggaaagagcaataataaagcggagtggcaatggaatcgctcgcaggggaggggaacgagtgggaagggactgaagaagagcgagagaggtgggtgaccgccgcgcctccgtccagacttccagttccaggcgtggcgaactaggcaagcggcacgctccgccttcgcataccctccgcgagtgagctccagttgcctccaccgccgtactcagcagcggagaccggcgagtcaacaggtagcagagggggaggaggggagcagttcctattcgcccgggcaccgaccgcccggagcattcccgttcccgctgctgcgtccgctagtttgccgtcgccctgttgcacgtacggctagggtttggagatagatccgcccgccgccccgccggctcgtgtagatgcacgccgtgctgcagggaggagtagaggaagtgcctggctcgcgtggttttggttccttgttctgaaggcttcgtagcgcgcgatccggttcggttgcaatcggtagtaatgtcgggctcgtcggccgcaggggaggacatagtgcagcacctatcgtccaattccaacccgtcttcgtcgaagctcgccaagctcgaggcacggatggccggcaaggctgtctccgcgccatcgtcaccgccgcaccatcccatgtctgcccccgtcatatcgttcatggaccaggaggagctgcctgagacttcctcttccgatgacgataactgtgaggagttcttgatacaaaagaataccctgaagcgtccgagatctccagatggtgacaacatgcttgctcttggaaattttgagggttcggtaaatgaggcagcaaagattttaggcgtcacagatacaaaaccttccttggacaattcaagtaggaaaaaacaaggccgtggaaggggtcgtgctggtacaggccgagggcgtggctcaagggctgctgatcaaacacgattgacttcaacttcctcagcagctgtaacaaatggccaactagataaattaaccaacaaggaaccccgatcgagtgttcaactgggccatgacgacagagctgctttacaggacgaattgtcaacattacgtggcaaagttgcatttttggaggaagacctttctaaatcgcatcaagaagcaacaaattaccatgaacttagtgataggttagcaaaggaattgaaggatctcaaagatcatgaccaacaaatgagattaaagcaaatgaaaatcctgtccgatctgctgatagctgtgtcaaaagcagagaggcaagaagcgagaatgagaataaggcaggaatctttcagacttggaaatgttgctgttatgagagctgggactatcatatctgaaacttgggaagacggtcaggcaataaaagatcttaatgctcacctgaaatctttgctggaaactaaggagactattgaaaggcatcgtaaatcacttaagaaaagacaatctgacaagggtgatggcagtgatgctgagactggcatgtctgaggaggacatcctcttacaagatgaaatatgtaaatctcggttaatgagtataaaacgggaggaagaacagtatatgagagagagagatcggtatgagttggaaaaggggaggcttatacgagagatgaagcgtctcagagatgaagatggctcacgctttaacaacttccaaattcttcaccatcgttatgctctcttaaatcttcttggaaagggagggtttagtgaggtttacagggcttttgatttggtggagtacaaatatgtggcatgcaagcttcatggattgaatgctcaatggagtgaggagaaaaaacagagctacatacggcatgcgattcgtgaatataacattcacaaaactttggttcatccaaacattgtcaggctatgggatatatttgagattgatcacaatacattctgcactgtcctagaatattgcagtggcaaggatcttgatgcagtccttaaagctacaccaattcttccagaaaaagaaggaaggatcataattgttcaaatatttcagggcctggtttatctaaacaagaggggccaaaagatcattcactatgatctaaagccgggcaatgttctctttgatgaggttggtgttgcaaaagttaccgactttggcctcagcaagatagtggagaatgatgttgggtctcaggggatggagctcacttctcagggagctggaacctattggtatcttcctccagaatgctttgacctgagcaaaacaccatttatttcatctaaggtggatgtttggtcagctggtgtaatgttttaccagatgctcttcggaaagcgtccttttggtcatgaccagacccaggagagaatacttcgggaagatacgattatcaatgcacggagagtggagttcccttcaaagccagctgtatcaaatgaggcaaaggatctgatacgccggtgcttgacatacaaccaatcagagagaccagatgtactaaccatagctcaagatccttatctctcatacgcaaagagatagccgctatgccggagaacactaaggcaagggtagctgatcatttatgagattatttatgtatggggatggataatcttgcgaaggagcaaagtgttccacaagctcaagaagaccacaaagggtgtaactgtatatgttgtaaattttagtctttcccatcgcagcaatgacctgaaatccagaagccatcagttcaacggacagcttctttgtagcgtagagaaagcaggcattggtttgaacggggcatgcgtaacgtgatggtttcttggctggtgggctgtgggcagtggtcctgttgatggttggtttttgtttgctcatactgtcggtaaggtctgccaaatcagaaaccaccggtgacaggcgagagctcacatgctcacctccgaaaaaaatctcggccttgcactggcaggatggactggattttgcgtattgccaaaacagatttaaggtagcatgcatcaatacaggttactttggataacctatagactcaccacagccacaagcacagaagctcttcgtacaatttcagagagtaccgatgtgccagatttctgctggtgccaatttgtttgtgatcgctgtcacccttgtacaacactgggatcgctcattgagcatacacaagttatgcaatttgcttttttattatagtcatctttagggcgtcgttttgttcggaacggattctttggaactttaatgttagttttatttgtgttaaaactgaacgtggaatagttccaggttatataatcccagctaacctaacttgcacttaggagatgtttggtttgagaaatcactctatctaaaataagttagtgtatcatgagttcattttctaaatttggtgggatgatctcattccatatactaagtaactaggaagaatgaggtgatgatatattaactcattttattttacaaaccaaaaaaaaatgaggagtaagaag

SEQ ID NO: 32759 - DNA, 298 bp, Zea Mays
tgacgggctcgtgcatgtcacctacacatataaccggacgcagatcaagcatgtggttcttcggcccagttgaatagggtcttgaacttgccattgcagctggacgggtggaggattcaagcgtgtgatgtgtctgctcctgtaggacagttggagggagaacctcagcgtgcttgttacggttttctaccttcctgttaccgacaatctcgtataaaactatacactatacagtgtgcttatgtgaacttgcgactttgtcttcttattaagtttttgaccgtgttgggcacgctgg

SEQ ID NO: 32760 - DNA, 1201 bp, Zea Mays
gttgtccatctatttcaggctctatgccgtgggtatcctactgagtttgcatcatatttccattattgccgctcactgcggtttgatgacaagcctgactgttcatacctcaagcgattattccgtgaccttttcattcgcgaaggttttcagtttgactatgtgtttgactggacaatactgaagtaccaacagtctcaaattgccactgctccaccccgtgcaggccatggcgcggggccttctgggttggcacccgtgttacagaatgataggcaatcaggccctgaggaagcaaggactagtggttggtcatcaatggatcggcgtcgtgccccactaccaattacaagtgtggggacattatctaagcagaaagcaccgatagggaatgatgctactgtttctagagatgctgtgatatctggaccaaattttatgggaaggtcaagtggatcttctaggaggcctgttgtttcgagtagccgtgatatggtggccactgacagttccgagccttcacgagcacgtgcaaccgacgcaagcccaggggcgttccgcagagcctcaggtcctcagagaagctcacctgtccattccgcagaacagaagcgctcatcctcaggccggcatccgtctaacgtgaagaactacgattctgctctcaaaggcattgaaggtcttcattttgatggcgacgagagggttcagtactagagccgcaggaaattctacatgcactgtaaaaatcataatcaggtggtaagcatcgtgtttcctgttcgggttttggatcaacaggaaatgaaatgctggaaggaggatctggtcacgggttgtgcggtttcaggtggtcctctgagcaaggtaaataaacggtcctatctgaggcgcttcatgcctagctctcataacgttgtcgttgtgtacgtaaatgcctcttgtagcctgaatgtcaggcgcccggattcatgaatctattttattgttgtattccttacgatgttccatcttgggactacaatgctgcaactggtagggcttgatttggaacactggaattcgagcatgtagaatttttaaatcggttcattggacgaatttgtctgtaacacgtacctgacttgtaatgtgatctgtcaggacaactgatgttatttgccaatgtgataatcacgaaaaagaagggagacttagaaga

SEQ ID NO: 32761 - DNA, 1033 bp, Zea Mays
gcccactgctcaagcagcgacgacttccgcaacttctcaggccaagggagggagggcagcaaagaaagcaagcaagaaagaagccgattccactggtggttaaggttttggattaaaggagagaggtgcagagaaaaaaagctgctgcaggttgcaactccctgggccaagcagtagcgcagcaagttcagcaccaatggcagccatatgaaatataaggcaaagcagataaaaagcttaattttttttcaagaaggtaaaggcaatgacagaaaagtgaggagggtcagaggtgtacagatatggatgagggctgaaaagaggagcaggaaggcatgccccatctgtgctacaagggtcggaatggacttgataggacatttgactatgcaacacggaagttatttcaagatatccttttttaactatgctgccgttgctgatcatttgcatttttacatttttcacattatactacagttgaagatacataggtgtcatggtcgggcgcacgtcacggtcatgttgaattgtaacttttctctggttcttgagccagcaacatgaccggtttaatggtgtttttgagaattctgttgattccttctaaatgttaaaattatgttcactaccaggttattagcttttgtactgcacttccacacacatacatattttttcttttttcttataccttccatgtcgtctggtccagaacttgtacactgtggggttaattatggatatggatctatgaaatattattagcatgaaaatatacatggcgtgtatggaacaaaatggactctaatgctttttcttgtgatgtaggatgcttttggcgctgagaggaggaaagctataagatgctaaatctctccattgcatacggaaaaacgtaggaagatttttgttaaggaagcaaaagatacactgaaactctggtatagcaatagaaagaaggttctggcttggcaagtgaaacagaaacagctagcacatgagaagtgtgaattttatactttgctttggc

SEQ ID NO: 32762 - DNA, 849 bp, Zea Mays
gtgtgtgtgtgtgtgtgaattagtagtatctctagatacgttaattcgatttgagacattccttgcgacttcgcgacagcaacaactcactggtgagagacataagccgaatgcagcagagcaactacgggagggaaggattctcgcatataactgtcacaggtgctcttgctcacgggacgaaggaggtggaagtgtggctacaaacatttggtccaggtcaaaggaccccaatccacaggcattcttgtgaagaggttttcattgtcctcaaggggaaaggcacgctcttactcgggtcgagctcgctgaagtacccaggacagccgcaggaagttcccgtctttcagaataccacattttcgatccctgtaaatgatccacatcaggtctggaattctaatgagcacgaagatttgcaagttcttgtgatcatatcacgcccaccggtcaagatatttatatatgatgattggagtatgcctcatacagctgcaaagctgaaattcccctacttctgggatgaggactgcttgccagcaccaaaagatgaactctaggttaagtggttcctgcaatttatcaacttcgtgttcgtccacaatcctggtggactacgattcacatctacaagttgaaaaccattagtgtactcttcatgtgtagttttgtgttgtgactctgggaaatccatattgacaacgtttataaaattaagcacttctggagctgagctactgtggtctatattctagatttttgaagcagtattggtttgtttcgacaaaagatttctgctctttattgtgatatcccagtgttaatcatatgggttttaggtaatcattc

SEQ ID NO: 32763 - DNA, 2691 bp, Zea Mays
atatgtgtgatttatttgtttctaaatattttccatgcatattctttccaaaccaggcggctgacatcattgctgtttctacctcgttgttggataccttgccagcagtcacaacacctactgaaagggcagatgatgatgatgagacacccatggatgttgatattaaaattaatcttgatgttgatttggaaagacagataactgcagcaattgatccaaagctacttcaacatttggtgaatgctctcttcagaggtacattaagcataaatgattctgatctgtctgaaccatcagatgctgaagtggatgctgtaggatgtatttgtgcttttcttcatgtcacattcaatacattccctctagagcgaattatgactgtactggcctaccggactgaaattgttcctgcactgtggaacttcataaagcggtgccatgcaaaccgaagatggccatttttttcgaagtttgcatcttcattacctgctgatgctcctggttggctccttcccatgtctgtattctgtcccatatacaagcacatgttgaagatcattgataatggggagttttatgagcaagagaaacccctttcccttaaagatttgaagtccttggttcttattttaaagcaggcattatggcaacttttgtggattattccatcctcttctactcagaaagtgtcatccaacccttcaggccttaagaagttgtcagtggagaatgtcaagatcagagctagggttgggttgtctgaattgctcacacagttgcaagactggaacaaccgacttccattcacttctgcaagtgatttctattcccaagaagcaacaagcgaaaattttgtgtctcaggcaatacttggtaatactcgagcatcagagatcataaagcttgctccttttttggctccatttaccagtcgagtcaaaatattcacttcccaattaacgagttctagacaatcaatatcacattctgcattgacaagacaacggttcaaaataagaagaaaccgacttctggaagatgcttttgatcagctaagtttgctttctgaagaagatctcaaaggaccgattcgagtttcatttattaatgaacatggcgaggaagaggctggaatcgatggtggtggaattttcaaggatttcatggaaaatattactcgagccgcttttgatgtgcagtacggtctcttcaaggagacggctgatcatcttttgtacccaaacccaggatcaggattggttcatgaactacatctgcaatatttcaattttcttggaagtctacttgggaaggcaatgtatgaaggcatacttgttgacttgccatttgcaacgttcttcttgagcaagatacaattttttaaatgatcttccttcattggatccagaattgtatcgacatcttctatttttaaagcattacaatggtgatatctcagagttggaactgtattttgttattgtgaataatgaatatggtgaacaatgtgaagaagaacttctccctggtgggagggacatgcgtgttacgaatgataatgttattacttttatccatcttgttgccaatcatcggttaaactaccagatccgtgcacaaagtacacacttcttgagaggttttcaacagcttataccaaaagactggattgatatgttcaatgaacatgaaattcaggttcttatatctggctctttagaaagcttggatattgatgacttgcggtcgaacaccaactattctgcaggatatcatccagatcatgagcttgttgagatgttttgggaggtcttgaagagcttaagttcagacaaccagaaaaaatttctcaagtttgtgactggatgttctcgtggccccctccttggatttcagtatctcgaaccgaaattttgcattcagagagctggtgttccaggtctggaggagcatgcagaccgcttgccgacatcagctacctgcatgaaccttctgaagctccccccctataaaagcaaggagcagatgcaaaccaaactattgtacgcgataaattcagaagctggttttgatctaagttgatcatgatcgggattcagtatttgcagttcagatagtcgctattaaaggcaccaagggccgaactcaaccaaccatcggccccatttgaagccccatgaatgaaggaaatgaaggaaaaaaagaaagaaacgcagttgtttctcagagtagttgaatgtctggagggaggctgcaatatagctgtctgctaactaagggcttcgttctccaagagaaataggcagacgctgtctaatcaatcatgggcatgtacatatgtgcatcattttatacagaaattttatatgtatctaatcaatgctggtttgcggtcatctggtcctttttggcgcatcacttgctcaccttatcccaatttagggctgatttgttaacaatagaattagatgggatacatgagaggaaatccattactatttaaaattaaataacaagggattttctctcatggatctcatccaattcttttgttaccaaatcagcacttagtctttggaaggaggggattgaggggtgtaatctagcttatcaattatataaacacttaatgacctatttatggattactataatctaggtatctagattatataatctacataataa

SEQ ID NO: 32764 - DNA, 6450 bp, Zea Mays
ctagggcgcactcgcaccctccgccggtcctgaactcatcgatcgcagaagcgagagagagagagagaggaggccgtacccacgccgccgcttcgccgccgccgacctccgtctctcgcttccaccatctctctccttttcaccctctctcgcggccaccctcggtcccctccctgagccttacccttgactgagtggtttccaatttcagttccactccctcttccaccactattcacggggaggcgcggcgaatcctgcgagattcctcccggcccacgcgtgcgcacgttggcgatacagggctagagtttcgtctccggcgctttgcggagttaattaggagaaggaactggagaatgtgtaggtggtgggcgctgaaaccctagctgttcgggacgggcgtgcgtgcggggatggcaggggagctggggcagcagacggtggagctgggcgcggtggtgcggcgtgcggcggaggagtcttatctcgctctgcgggagctcgtggagaagtcgcaggcggaggccgaggggaagggcatcggcgccggagccaatggcagctggcagcggtccgacaccgagaagaagattgacttgctcaagttcatcacacgcacacgccagcgcatgcttcgtctccacgtccttgccaagtggtgtcagcaggttcctttggtccattattgtcaacagctcggatcaactctccacagccatgaaacatgcttcacccaaacagctgactcgctgttttatatgcacgagtgcttgcagcaggctcgggctcctatgttcgatgttccttctgctattgaagtcatgcttacagggggttatcagaggcttccaagatgcatagaagagataggaagtcaacataaactttccccagatgaagaaaagcgcgctctgcgaaaattagatgctagcgtgcggtacagagtacttgtgacaccaagacctaaagaagtatctaatgtttcagtaactgatgggatagctgttttccgtgtggatggagaatttaaaattcttcttacattaggttaccgtggtaatgtagacttatggaggatattgcatatggagttactggttggtgagaagaagggtcctattaaactggatgaaagtaggagatttgctcttggtgatgatatagaaagaagaatggcagcttctgagaatccctttgcagtgctatatgctatacttcatgaattctgcatctctcttgctatggacactattattaagcaagctaatgttcttcgacagggaaggtggaaagatgccataagatctgaactcatctctgacagtgccactgtacaaacgggaaatactcctctaatgcagcttgttcaagatgcggagttcgattcaagtggttttaagatacctggcctgaaagttaattactggctagatgagaaaagcactagcacagcagaacctgattcatctccatttattaaaattgaggcagggctggacatgcagataaagtgtcagcatagttcatttatacttgatccatttacagataaagaggcgagcctttctcttgatctaagttgcattgatgttgagcaacttattttgagagcagtttcttgcaataggcacacacgccttcttaatattcagagacaactgtgcaaaaatgtccaaatttttcagtccccaaaagatgttgtcttgacacgagatgttgcagcagcgaaggacccaatgatgaatgcggagaagggtttctcagattgttttgggaatgaagtgcttcaagtaagggcatgtggtcaggcatatgttagtcttggaataaatatcaggagtggccgctttctcctccaatcaccagaaaatatattaccccgtgctgcacttatggactgtgaggaagctctaaacaaagggagtacatcagctaccgaggttttttcaagccttaggaccaggagcattctccacctacttgctgcaactggaagtttttttggccttaaggtttaccagcagtctcagggcactctgaagattcccaagaccttattacatggctcagatttgatggtcatggggtttccacattgtgcaaatgcctattatctgttgatgcaacttgataaggacttcaggcctgtttttcatttgcttgagacacagtgtgatgcaaatggtaatactaatgcaagtggagatgtgaaagaagctattagatataacaaaatcaatataggacagatgcaaatacttaaaaatgagatgaatgagaacccttttgatgtgaagctgcaggccctacaaagtttagtggactctgctgacatgatggagagtgatcttcctgtccaaaatgcaattgaacctcttccactacttcctgcttgttcaccatcattttcatctattgttgatgaggttttcgaatatgaacgtggttctactgctgcgcagaatcgttgtcttccagttgatattcaaggaataaatgctagggttgtctcaccaatgcatgatggatgcttatcttatacccaagctaataataacatgaatgttcatcctaatgtcagtttgaatagctatttcccaagtaactttagacatttacaaggtgcaaataaatcacttcagcttgtgccttcaagcaacgataacagcaatcaaatccctgctcaaagctcacattcagggaatcttgggaatgctacgcctggccatttgattggatcttcaactacaaccggaggaaacactatctttcagatttcttatcaagtatcccttcattacgaggactgcaacctagtgagccaagaaagcggagaaaaaaaacagaatcagtgcagagtctcctgcctttgcaggcacactcttctaatttgcaatcaagaggcagtctcacctatggagatgttcttgctgaaagaaataattgtgttccggcaactatatatgcttctgtgctactacatgtcataagacactgttcattatgcatcaaacatgcccaactcactgctcagatggattcccttgcgattccatatgttgaagaagttggtctgcggagaccatcgtctaatctttggttgagattaccttttgcacaggatgattcttggaaccatatatgcttgcgccttggtaaggctggaagcatgtcttgggatgttaggataaatgatccacatttcagggaactttgggaacttaatggaggaagcaccaaaacacaatggggtgttggcattcgcattgcgaatagctcagaaatggattcacatatctcatttgattccagtggtgttgttttaacttacaacactgttgaggcagatagtgtccagaagcttgtgtcagatttacgccgactttcaaatgctcgttcttttgctcttggaatgaggagactgattggtgtgaaatttcaagacaagctagatgacaaccagttaaccatggaggtgaaatcacaatctgttaataaaggtaacagtgatgctgctgacaagctatctgagcaaatgagaaagacattcaggattgaagctgtcggtctaatgagcttatggtttagctacggcaccatgcctatggtacacatagttgttgaatgggagattgctaaggctggttgcacaatgcacgtttctccagatcagctttggccacacacaaagtttctggaggatttcgtgaatggtggagaggtagcatccttcttggattgcattcggcttacagcaggaccattacttgcccttggaggtgcaattcgtcctgcaaggatgcctgttgctgtctcatctggatatagctctatgccaaaacagccgaacatccccacacaagggcctttagtaaatggttcatcttcaactatacatcacgcacctggcccctcaaatgctgcatctgcccatttaggcagtcataaccttcatgctgctgccatgctttcagctgttggacgcggtggacctgggcttgttcccagttcattactgccttttgatgtttcggttgtacttcgtgggccatactggatacgcattatatatcgcaagaaattttctgttgacatgcgctgctttgctggggatcaggtttggctccagccagctactcctcctaaaggtggaccttcagttggtggatcgttgccatgcccacagttccggcctttcataatggaacatgttgctcagggtctaaatgctcttgaacccaacttcatgaatgctacacaggctagtggacacttaaataacaatgcaggagttccacaaactgctcctagtgcaaatcgtttaaatgctacccctggtgtttctatggtcaggccaacatctggtgttgctaaccatgtagcagccagtttgagtcgagcaggaaatgccatgttggcttcttcggctcttgcttctggtattagtggaacttctgtgcgacttactgctggagctggtctccctgttcacatgaaaggtgaactaaacacagctttcataggactgggggatgacggtggatatggtggtggctgggttcctttggcagctcttaaaaaggtgctgagagggatcctaaagtacctaggagttctatggttgtttgcacaattgcctgaacttttgaaagaaatactaggatcaatcttaaaggacaatgaaggtgctctcttgaatttggatcaagagcagcctgcactccggttctatgtcggaggatatgtatttgcagtaagtgtacatcgggttcaactgcttctacaagttttgagtgtgaaaagatttcaccaccagcaacagcagcagcaggctcaaagcaatgctcaggaagagctagcagcagttgaaatcaatgaaatatgtgactactttagcagacgtgttgcctccgaaccatatgatgcttctagagttgcttcttttatcactttgcttacattaccaattttggttctgcgcgagtttttaaagctgattacatggaagaaaggtctttccccggttcatggggacattgctactgcacagagggctcgcatcgagctttgtttggagaatcactcaggatcagcttcgtctgataacaccgagaacagcagtttagccaagagtaatattcatcatgatagagcccacagttcagtagaatttgccctgacatttgtacttgaccatgctcttattcctcacatgaatgtagctggaggagctgcctggcttccatattgtgtatctgtgaaacttcgctattcttttggggacaacaatcatatagctttccttgctatgaatgggagccatggtgggagagcctgctggttgcagtttgaggagtgggaaagatgtaagcagaaggtttcaagagctgtggaaactgtgaatgggtctggtgtagctggagaggtaggccaaggaaggctgcgaatggttgcagagatgatccaaaagcagcttcaactctgtctacaacagctaagagatgacccactttctgcaggctcgactgcatcatgaacttgcttggaatgagctctatcaaggccattgatgtctgtcatattcagcatggcctttggctttgttaacgtgtagatgtgaaggaatacacatttggtagcagtgacagtttcgcctgaggcttgctcagatgacaattttgtacagtataaatggtggcggttgactctgatggacctttagttagcccatttgaacgtggcctgtaacatagctagggtgggtaataatgtgccaaggtggaattgctcagggatgcaaaatgatcttcgggaattggttgtctgtatcatctactgtaatcgtgtcctttttctccctttctgatggatagttcatttttggattcgttatcatctttcttctgtctgtactatgttaatctagacattggtggatctggtatatgtgttgttgtacatgatatattggcactggacttgagactgacgcatttgacgtcttagtattagcaggacatctctagttgtgttcagagtgattggacacaaaaaatattgcttggagcttttctttagggctagtttgggaacttaaatctcgaccccatagattcctggagaagatttgagttcccaaactagttcttaatgtttcttttttttttctattgcatcttcttagtaaatgatgtttttgtaactgtaaaaaccgtgccggtcaagattgatacctggatggataagatgatgttgggtcagatttcttgctcatggttaggaaattgatgtgagcactctggccagtttgtttgaaactgatattcgtgagttgtgattggaagcgtatggataggctttttaatcgtgttaaccgtcatacgggtaggcctttttagttctcgtgcttctacgtttgggacacaggtgtcagtttttgtgctttaa

SEQ ID NO: 32765 - DNA, 849 bp, Zea Mays
gaagaggcattggtcggacccgcgtggttctcccgtgtcctctctctctagtgtcgacgagtgggcgaacgccgccaccgccttacgccagtcgccaggcgctcaggttttcatcttcgggcccttcaccggcgaccagcacccaacaggctttgatgattgctgtacaaggatgatatggcctcccgcccaaagctgtctggtattcagaagcaggttttggcgctgtacaggggattccttcggacagcacgccttaaggcccctgaagaacgccgcaggatcgagtctgttgtctttgcagagttccgtgacaacgcaaggagtgttgaccgtaggaactttgtacacatagagtacttgttgaggagagggaagaagcagcttgagcagctcaagaatcctgatattactggactcgctacccttgtagtaaagaaatgaggtccattcattgccagaacaaagtatcatcatgataccggtgtttctaatgtgaagatttggaacctgccactgatggtgtccaaataaaataaatatgaccacagattacagatttgatatccagggactttctaatcagcctattagaatctgaagataaatcttgtagcacctgtccggtgacccatagtaatattattttactcttgctgtaagcagaggttaacactaaaaaaagtattgtgattggtctgaactttttgtgcggtataaagcatgtgattcagctcaacttgacttttccaactttaccgagcatatacaattgtgattaatatagaggctcttaaggtgtttaaatgtgctatttacaaaaaaaaatcgtagagtcgtctatgaatt

SEQ ID NO: 32766 - DNA, 4603 bp, Zea Mays
ccaacatgccagcttcaaccttgctatagacgcctaggaccgaatctgcttggaatatgcctaaatgtcgacataatgtcgacacctttggcgtctgccacatgcttgtcagtatgcttcacaggaaaacacctggacgccatgcatagagcttgctagctccattgccgccacttgtccatgctctgctgctcctccttgcctataaacagacgcccttggcctcatcctctctctctccccccacaatgtcgtcgcccctcccctgcctctccctcctccgcgcccggcaccgccatgaccaagcagcagctaggtctgcgtgcgtgtgcaaatggagagaagggatgcgttggagaagaagatggaaagagcatggtcgtgccgcccagtgcttgccggggcgcgctagcgacttgtgcccatggcctggccggcggccggtgtcctctgttgccaagcgttctctgttgccggagaagaaatgtgcgtgcgttctgaaggaagaagaagacccctttgggtctatgacgtgtgggcccaaggcagggttcccttagggtgattggttgctggtgtgacttggcctccatccctgccaccgggatagacggtcgagtgggttattgcttccgcaggagaggaccaggaggagtagtgtggccagacttcgccatgttactcggttcttctccgttagttatttccgctgcattaaaatttatggttattatttttgaaactctgataatgtaatcactaatgatacttattaaatttgtggtattatgttttattgtatttctctgtgcctcaccttcgtgtgagctagtggtattcgatcctggtaagtggctttatcggactagatccgagggactgacagattattcctgtttaagtgtgttgctgcccttaagggtgcgacttgggcacttaagctggaataattcgggcggttccgccacagttttgcgccttatgcaattgggaacccaacatacaccaatgttgagggaccaaatatgcctatcgagggatgtaatatgcatgtagagggatcaaatatgggtattgaggggaaaatggtatgtgagacacaacaccactaccaagactgatcacgttatgccaggtgttactaatgatttctttgggcacaaagacgtgggtcaagacgacgtcgaagtttaggttggtaaaagaaaacaagtgaacttttttcgtagcaaaattgcattattattctgagtcatcaacattatttatgaaagtatggaggctttagaggagaccgcaacataacatttttacgaagagtctaagggttgtacccaaaaatcacaatattgtgatctgttatttagttgttgatactttaaggtcaattcagttagtctgatgttagcttcaacgagtgttattagttctagcaaaactccttctagaggagaacaaagtgtatgctaacatgtaatgtacaaagaagctagcgagttcgttgattatgggtatcgaaaagatccacgtgtgtaggaactattgtatcctatattgaggtgaggattatgaaggcttacagagatgtctaaattatagtgctaatagatacaagacgaacaaagattatctcgggaaagagaatggagcctctgatgaagacctccagttagtagtattataatgttctaaaaccagtagatttttttgtaaaaatcctagaaacttcgcccaagtgtatttgatgcccaggataatgaacaaagatcttttgccttttttcttgtcacatttttattagagttaaatgcattgtagcccatgtacttgtcaagagatgtcatttaggtatacgaactttggaaatacatttatgggtccttaaatttattaagtggcataccgcagtggtcggtatgatccaaagatgaacttatcatttaccatttttacaagttcttagcatgtttaagggatccagaaatgcattttcaaagtttgtggatctaagtgacatacttaacatttaactccttttattatatcaaaaaagtttaaatgcatcaatagcaaggaaatgcatgaactatgtttaggatcattttacatacatgatgactctcttgtacatgtgattttattttagaatgtgaacatcattactccgttagtattacctgttctctaagtatcatacagtgacgttcaggttggctatagcaaataaacatatactccctccgttcttttttatttgtctcattttagttcaaaaataaactagttggtgacaaatattcgaaaaccgaggtaatatgtgattggttagctgtaccgtctcgtcccgcgtcaccacgtgcgttgactttatctgagtttgtgtttggttgcctgcacgtgtgaagtgcaggctgtatagacagacataaaataagttatattggttgcatccacacgtacgcctaaaacagtcgtacgtggttggccaggctcacgcgagattatacgcgtgggtacggtcatccaatcaggcgtatatgtaccaagtaccggattgcatcatcatcgacacgtagatatatgttgctacggggcaattatatcggttccacggatgcctaactgaattttgttgtcactgccgtgggggctctcatgctccaatcttcatggagtccactccacagaatcagatggacatggatttgcttcccatgccaattgcaacgagaaaggaaacatgtttgagaattttcgtcatgaaaaacctgcaggtggactcgattcagcagttaatcagttcgggcacatttatctccttgcgatcatggctgaagaatctgagggccggatccatctatgtctgcacgtatgggtcatggcgtgtctgcaagcatgcacactctactgcacatatctgctgccaaccaaactctcccgcgttgttcttcttcacaagcaacgcatgcaactctcttcagcgcgcctatataaacggccgtgggcatgcagcttactcactcaccaccaggtcaccatccaatccagcaaccagcaccagcaccaacctgagcaagccttgcaaaaagagctgcactatatccatcgattctgttctgatcttgttcgctagcttgagtgttcagcccgggctgcaagcctgcaactaaccacctgcactgcagcgtgattagctctacaaatcgcatccagcgggaagctgatgaagcttgtgtacatggtgaccctcctaccgttgctcttcatgtccggcgttcttgaggctgcaggagcgggcaatgacagctcggctgacggcacgaacggcaacttgcacagctctggcaccagcagacccgccgccgcgcccaggggaaggtcgctgcaagcatcgcagagcagcgtgtacagcgtcgaccgctacggtgcccgtggcgacgggaggaacgatgacacgcgggcgctggaaatggcgtggaaggcggcgtgcgcctcgccacggccggccgtcgtgctcgtccctgacggcaggcgttacctgctgaagctcctcaccctccgcggcccgtgcaagtccagcgtcacgctcacggtgaagggcactctggttgcatcgccaaaccgggcggattggagcgacaatgacaggaggcactggatcgtgttccggagcatcgacaagctcaccgtcaacggcggtggcgccatcgatggcaacggcgagaaatggtggcctcactcgtgcaagatcaacaaggctctcccttgcaaggaggctccgacggctctgtcattccactactgcgtcgacctgaaagtggaggatctgaaaatcgtgaacagccaacagatacacatgtcagtcgaggattctgcaaatgcgctgctggcgcggttgtccatcacagcgcctggcaccagccctaacactgacggcatccacatcactcgcagcaaagatgtacgcgtcacagactgcaagatcaagacaggggacgactgcatgtcaatcgagaacgggactcacaacctccatgtctccaaagttaactgtggtccagggcatgggatcagcatcggaagcctaggagacgacaactcaagagcagaagtctccggcatcaccatagattcagtgcaactacacggcacaaccaacggagcacgcatcaagacgtaccagggaggcagcggatacgccaaggacatcacgttccaaaatatggttatgtacgacgtcaagaacccgataatcatcgaccagaactactgcgacaaggctaagccatgcggagaacaagagtcagcagtgcaggtcagcggtgtcgtcttcaagaacattagagggacgaccagtaccaaggacgccatcaagatgaactgcagtgagaacgtcccatgccaaggcattaccttgcagaacatcgacctgaaaatgcaggacggcaagggcaacacaagaagcacttgtcagaatgcaaaatggacagaatttgggacagttcgcccgcagccttgcactgccataaagtagggggcaattgaagtctgttgctcgtgctttgtagtctgtacagatggagtagtcatactcatgtatata

SEQ ID NO: 32767 - DNA, 1693 bp, Zea Mays
aactgctccaaaaattctatcctatgatctgacggtggtgatctatcgcttccccagaccccagaccccttttcccaacggccacactttcatcagttcccctttccacggcgccgccggaatccccacaaagcccccaaaaccctacggccacctcgccacccccaacgaaaacccagaccacgagatggcccccggtggagagggcaagccaagcacgggcggcggcggcggcggcgtcaagggtgggaggaagcgcaagttccttccccacgggaagccggtgcggaagggggcctacccgctgcgccccggcgtgcagggcttcttcatcacctgcgacggcggccgcgagcaccaggccacccgcgaggcgctctccctcctcgactccttctatgaagacctggtggatgggaaaggatcggatgagaagcctaaaaacattccagacaagccactgaacaaaaagataaagtttgaggactctgattcctcagatgatgaggatgaagacaactctggtgaggaagccgacaatgggaatgtgaatgatgtggagaaaggtgaaaccgctccatctgagaagcaacaggaggtgcttgatacctctgataccgtgagtaaggacaatgaggaacaagcagtcactgctgatgaaccaagagaaaagaagcaacgagtggaagatcctccagtttttgagcaggccgtgcaaaaagagactgctgatgaaccaaaggagtccactgataaaccaaaggagtccagtgaaaaaaatattgacgatttaattgatgaggacctgaaagaaataggggacaggaaaaagaggctctttgcaagcctcgagacaggctgcaatggatgcatattcattcaaatgcataaaagagcaggagaccctggtccagttgagattgtacaaaacatgatgtcatctgctgcattgactcgtaaacatatgtcaagatttattctgcgagttttgcctgttgaggtggcatgctatgcatctgaagaggaaataacaaaggcaattagtccccttattgaaaagtacttcccaaaagaatgctcctcaggtcataagtttgcagtgttatatgaagcaaggtcaaacacaggaattgatagaatgaaaatcataaacgcagcagcgaaatctgtaccacaacctcataaagttgacctgaagaacccagacaagactattgttgtccagattgcaaagaccatatgcatgattggagttgtggaaaggtacaaagagctctcgaagttcaacctaaggcagctgacctcaccggagtcggagaagtaagcctatgagtgacaaaatcttccaggcaaaacgtggaccaacttaaatcagcagcagcgtcaggtggttaggcgctagcgaattaaattaaggccggccgaacctcactgtcttgaaagattcagatgttctaatgtttaatgctttaccaccagtggttagtggttgctggttcatgcttcccaggggcttaccaaagacgtagaatctatcgttgcagctccattgctctgagcatttctatagcttgaataaatctgcgtgctaggtttctatgcatgagacctgaaatttaaagagatgttggggtccgtgattttctttgattccaactttgcaagggtctgctgttcatttatctgtttatta

SEQ ID NO: 32768 - DNA, 1252 bp, Zea Mays
taaaatacctggcgcctgatcacggaaagggacggcaacaaatcgccgtgcgccagcggccagcgcacagccgagctccagagaggaggcggagctgcgggggacggggggagacggaggaggtcccggcgtcccgcgcctccccgattggacaacttaatgacccctagtccctagtagcaagtcggctttgtgcgcgcgtgctctgctgcccacccggccgccccatttgtttactgggtgtctgggtccagtccccgccccgaatcttttccctcctcccgcaccccaggccgcagcagcagcaccggcgcaccgccacccactcgccccgcctccgtgcccgcgcaactcgcgcctgcagcgtgtgggagatgtgatcggagcccggccgtcggttcgagtgttttcttctgcctctgggctgtggcgcggggaggaggcaagctggcggtgagatgggtcggtgcggaggaggaagcggagcaggagcaggagggggagctttgggcggctgtgctctcctcaccgccgccttggttatctcaacgctcgtgatccagggcgctggaggatctaagcaatctcatgcacctgctgttgctcgcaaggttcttctatccataacgaattggcacccacacaattacttggatgatgtacttcatccatcacaagtacaagatcaaaggctcgaacgtttagtgtcattgacttcaccgcctttgcctgcaattgggcgacgaatgcaaagtccagcagcttctccagaaacagcagttcatccagctaaacatggcaaggatcatggaactccagtttcagcaccttcaaatgttagtcatcaccatgcgatgcctgcgaataatacacatggaaaaactcatggaactccagttttggcaccagaaaagagaaggcatcaccacttgcctgcaaataattcatatgtgaaaggacctgctgtttctccctcaaagtctcccatcatccacaggaaaggacatggtgttccagttgctgcacctccaaaagaacactggagctatttaccacctgcaaatcgtagacaccacaaaggttctcgtcctgctccacgtaaaagtaacaatacttctgcaccaagccatgtatatcctggtagtcctgcacctgcacctgaacgtttgctcatcaaaggaaagggcaaggaaatttctgctcatgctccacgccatcccaatcattaccattcgcatcataattctccaag

SEQ ID NO: 32769 - DNA, 3613 bp, Zea Mays
cccatgtgtaagcttttctcgcactcgtactccctcctccgctccggctaggaggctgctccctccgccgctccgccttcgtcgcgcggccatcgtttccggctctgtccccggatatctcttcgccaccgcttcctgcgccgcggcgccgccacaaccgaaggcgacccagtcgccttcaacactatggtgactcctcccactgtcgagcaggaggacgaggagatgctcgtgccccgccaggaggcggtcgacaccgacgcagcgcagcccatggaaggtactgtggtggcacagactgaggtggtgagcacggcggagagccagcctgtggaagatccgcagacatcacggttcacttggacaattgagaacttcaccaggttcagtgagaagaagcactatttagaggtttttgttgttggcggattcaaatggagtgtgctgattttccccaaggggaacaatgtggaccacttctcaatgtacttggatgttgctgactcaaccagccttccgtatggttggagccgctatgctcagtttagtcttgctgttgtaaaccaaatccagccagagtttacgatacgcaaagagacccaacatcaatttaatgctcgtgagagtgattggggtttcacatcttttatgcctttgagtgagctctatgatgcaagtagaggttacctcgtgaatgatactgttgttgtggaggccgaggttgctgtccgcagaattgttgactattggacatatgactcaaaaaaggaaactggttatgtgggcctgaaaaaccaaggagctacctgttatatgaactcccttctacagacactataccatataccctacttcaggaaggctgtatatcatatgccaaccactgaaaatgacataccatcaggaagcattcccttggcgctgcagagccttttctacaagctccagtacagtgacagtagtgtagctacaaaagagctgacaaaatcttttggttgggacacatatgattctttcatgcagcatgatgtacaagagctcaacagagttctgtctgagaaacttgaggacaaaatgaagggaactgtcgtagaaggaacaattgagcaattatttgaaggtcaccacatcaattacattgagtgtataaacgttgagcataaatctaaccgcaaggaatccttttatgatcttcagcttgacgtcaaaggctgtcgtgacatttattcgtcgtttgataaatatgttgaagttgaacgtctagagggtgataacaagtatcacgcagagaatcatggtctacaggatgcaaaaaagggcgttcttttccttgatttcccccctgttttgcaactccagctgaagcgctttgagtatgattatatgagagatagcatggttaagattaatgatcgctatgagttccctctgcaacttgatctggatagagatggtggcaaatacattgctccaaatgcagatcgaagtacacgaaacctttacactcttcacagtgttcttgttcatagtggtggggtacatggtggtcactactatgcattcatacggccaactttatctgagcaatggtataaatttgatgatgaacgtgtaacaaaagaagatgctaagaaggctcttgaagaacaatatgggggtgatgaagagttaccccaaataaaccctggtttcaacaacgctccatttaaattcacgaagtattcaaacgcgtatatgcttgtttatattcgtgaaagtgccaaggagaaaattatgtgtactgttgatgaaaaagacattgctgagcatttaagggtaaggttgaaaaaagaacaagaagagaaagaacacaaaaagaaagaaaaagctgaagctcatctttataccataattaaggtagctcgagatgaggatttgaaggaacaaattggaaagggtatatattttgatttggtggaccatgaaaaggtccataatttccgtatacagaaacaaatgccttttagttgtttcaaggaggaagtagccaaggaatatggcatccctgttcagtttcagcgcttctggttgtgggcaaagaggcaaaaccatacataccgccctaatcgtccattgaccgttcatgaggaaacacaatctgtggggcaactgagagaaatatcaaataaggcacacaatgttgagttgaagctgtttttggaagtagaacttgggctggatttgcggcctctccctcctcctgagaagggcaaggaagatattcttcttttcttcaaattctacaacccagaaaaggaagaactctgtttcatggggaggctctttgtgaaggccttgggaaaaccttcagaaatcctggcaaaactaaacgaaatggctggatttccccctgatcaagaaattgagctttttgaggaaattaagtttgagccaaacgtgatgtgtgaaactatagacaagaaactcacttttcattatagtcagcttgaagatggggacattatttgtttccaaaaatcaccaggagcagaatatgatgcacccgtgcgatatccggatgttccttcatttttggagtatgtccataataggcaggttgtacatttccggtctttggagaaaccaaaggatgatgatttttctttggaattgtcaaagcttcatacctatgatgatgttgttgagagagttgctcgccaacttgaattggacgatccagcgaaaattcggcttacaccccacaattgctactctcagcaacctaaaccacagcccgtcaaatatcgaggagtggtgcatctgtcggacatgctcatccactacaatcagacgtctgacatcttgtattatgaagtgttggatataccactgccagaattgcagttcctaaaaaccctgaaagttgcatttcaccatcctacgaaggatgaggttgttattcatagcatcaggcttccaaaaaatagcaccattgctgatgtaatatatgacttgaaaactaaggttgaactgtccagtcctaatgctgaactacgtgtactagaagtcttctaccacaagatctataagatctttccactacatgagaagatagagaatataaacgaccaatattggacactacgtgctgaggagattccagaagaggaaaaaaatataggcccaaatgatcggctaattcatgtttatcacttcaagaaagatattaatcagactcagattcagaactttggagaccctttcgttttggtcgttcatgaaggtgagactttagcagaagtcaagaagcgcatacagagtaaactgcaagtctctgctgatgaattttccaagtggaaatttgcatttatatcaatgaatcggccagactacctccaggattcagatgttgtacctactggctttcagaggagagaggtctacggagcttgggagcaatatcttgggatagagcacgctgatactgcaccaaaaagggtctatacagtgaatcaggtcccatctcatgcacgacgctttgggggagctttcagaaacttgcggtatttgttggggaaaaacctccatgttgatttagtgatgtacggttgagatgtagtatggtaaagtttct

SEQ ID NO: 32770 - DNA, 184 bp, Zea Mays
cttaaatcaaatacttcagtattggtctctagagaggaagctctgccaaccattactaataactgagaaggcaaagagtgcattctggacaacatccaaatcacaatcagtgttcttagtgaacttgtttcctatcctcacatgatggtgaccctactgctatttttattaatccatccatact

SEQ ID NO: 32771 - DNA, 1684 bp, Zea Mays
acccattctctgttcgtcttcgtcgatccgaaacgaaaaccagtaaccaccctccaccaccgcgtgctccgtgctcattccccatctgccatctcggctcctcccaacccaaacgacaaaaccctagcctcctcttccgtgtgatgggatgccgtctaaaccctacccccactccctgacctcctctacttcctccgccgccgtggcccccgcgacctggatgtccgcatctgcatggacggcgcccgagtcctgatcgccgctagtgccaccgccgtctgctgcctcgcctgcgctgtctggatcttccgctcctcttcctcctcgttccccgcatcctcaaataagcaccaaccccctcccgccaacttctgcggctgcgcttcctgcggctgccgtgacgccaagtccgccaacggcgagatggccgtgggcggggagaacaagaagaaggcgccggagcctgctccgccggaggcgccctccatgatggagcagctcgtgcccgagatcaccacccacgcgctcagctacctcgactacaccagcctctgccgtctctccatgaccaactccgccatgcgccgcgcagccgacgacgatggcgcctggaaggcactgtatcacaaggattttacggtggagcagggtactataaatcctcctaatggatggaaggcatactatgcggctacaaaagccattattaaccttaatgcagagttctacaatattatcagggaagggtccttaccagcaatgagccgtttttggcttaatgcggactatgtcaagtgtattcatgcgactggggagttctgcactgggggagtgcatttagtggtgcttgatctattgcttcgttagcatagatgttaggtctccttgctctgagtctaagggtggcctgggattgcgaaatggatggagtatgctataagagagatactgataggaagccctgctgagcctggttgtgggaaattttgagcattgcactggtggagaagcagagaaattttgagtcaacacttgaattatttgatacaacgcagtgatggagagttggggcatgctgttgaactggggccaagacggaggaggggggcagggcattgccttgcagataagggacgtccgtgtgcgtgtgctcggtgaggtggcatgggtgaacatgaaggcgaacgtgctgttccatgtgaccaacgtctacgagctctgtaacggcaggtggtatatggtccatcaccacagctcgctcatggctgaccctcctccgcacaatatgtttgcttgatgtgctattcttgagcggagattagattatcggacgaagatttcctacctcctccccacaacccttttattcgttgtggatctgctgtttgttggtattgctctggatctccgttccgcagttttgtacagatgtgttttaggtggtaaggcttattataaattggtggcgccctggttgccgcggctgacttgatttatctggcctgcttccagacggtgcgagttgatgagtaaaatcctcatcttctagaacggtcgaagctcaatggtgtttgttctactgactggactgagtcatggtctggtagctgatgatgattccgaatctatggcattcatactatactctagttgaggtgctaattgtaattgtcgctagggaaac

SEQ ID NO: 32772 - DNA, 2685 bp, Zea Mays
atttattctacctctttccaatgtcccattttccttgtgaatcactagtgtcgcaaatcccaatctcccagcttgcgcctaaaccctagcttgcctatcgatggcgccgaagaagcgcaaggccgatcccgccgagtcccccgccgccgtggaggcagccaccaccaaccaccgccacgagccggcgtcctcggagcccaagccacgcggctccatctacttccccatcactgacgacccgcccgaacccaacgccgccgaagaggacgaggacgagggcgccggcgacgacgaggacgacgcggaggacattgtcaagctacttgagccgctgtcgcgggagcagctcgttgcgctgctccgcacggcggcggaggcgagccccgccacgatggcggccgtccgccgcgccgttgaggccgaccctgccagcaggaagctcttcgtccacggtctcggatggggtgccggcgccgaggacctccgctccgccttctcacgcttcggcgagctcgaggactgccgcgtcatctctgacaagcaatctggtagatccaagggctacgggttcgtcctcttccgctcccgccgctctgcgctccgcgccctcaaccgccctcagctccaaatcggtggtcgtcttgctttctgtcacctcgccgcctcaggccccgcacccccagctcagtctcagaaccctatctccaacgccaaccccaatgctaactctaactccacgagcaacgcttctggatcctcatcatcacaaactgacaatatacaacgcaagatatttgttggtaatgtgcatgctgatgtggacgtggaccgcctatatgagtattttgcacaatttggtgagattgaagagggcccgttgggctttgacaagaacactggcagaccaaagggatttgcattatttgtttacaagtctgtggagagtgctcgccgtgctttggaggagccaataaagaattttgatggaaagacactcaatgtgcagaaagccatagatgggaggaccaagggctcatctggaatgaatacaaatactaactccaatcccactactgcatctgtggtcgccgcccagatgactgctccttccagtgttgccatcagcccatatgatgcatcagcatatagtgctactgtggttcctgacatgagttttgcacagcaagctgctatgctgggattaggtgcacagcaacaggcattcactcaacccaatgcaatgcttgccatgatagcagcaatgcagaacccagctgcgctagggatgagtccagccatgcttgctgctatgaacccagccttcgccgctgctgcattgggtgcaggggggcagcaggcacacacagttggtcttacaggttttggagctcagggttttgggacaccgtcgtttggagcaggtgccgctttcccaaatgcagcaggtgttcaagcagcagcagctgcatatcaaggaagtggagctcctcctggctttcaagggccacctgggtttcaggttggccaggcaactacccagacaagcactgcagcggcagcggctgccgcagctgccactgctgctggttatcaggctggggcatctgggcagggccaggtgcctggttctcaggtcggaggcactggttttcagggtggatattgacagaactagaaatattctgaatcggaatctagtggacttgctttgcgttgcatgaactatttatgggtatgggcacggtttggcctggttccttgcggggccattggcttattgtgctacaaggatggcagagctataatactatttatccagcacagtcggtgcctcacaaaccggaaagggtcctatctgtggtgtgccagacttcaagatgaggggaaagaagagtgatgagctcgaacctgtcgatgctggcgatgaagatgatgatggtggtgacgatggggacgaggatggtgactttggggaggagggtgaagaggacgtctcagaaggggagggatatgacaacccaaagggcaatgagaccaagaagcaaagaggtgatcctgaggaaaatggtgaggaagatgaggaagaaccagaagatcaggagggtggcggcgacgacgatgatgacgacgatgacgatgatgagaacggggatgacgaggacgacgacaatggggatgacgatgaggagggtgtagatgaagaagacgatgaccaggacgaggatgaggaggaagatgatgatgaagactcgctccagcccccaaagaagaggaagaagtgaagatcttctgccgctttagttaccgtgcgctgagttctgcctggcttttcgtcatatcctcgcatttcaactttcccatagagagttaagaaggatccacacgttcagcagcacgtgtgggcttgtaggagctttatgatttgaggcaattagggacaactcttatgtcattgttgcttgcttctgtggagtcgaacagatgtttcgctaacataattcgacttgagtgatgaaagcctccagattgaatatgccttctcttttatctcgtatggaatcattgatgcagccctggttgatagcgttccttcaataaatgaattatattggcatcatgacagcttcatgtgaattgcacgtttatactgtgcgttcaaatctcaactaatgtatgactgatcgg

SEQ ID NO: 32773 - DNA, 840 bp, Zea Mays
atcaccttcaacccggcaatagcctcccaggacgtgagcggcgcgacggcgtcatcgtcgaggaggttctggcggaatgagagcttgcggagatgggggagttggccgatgcgaggatcaacagaagagaggcggttggcggtgaggtcgacctcctccagcgtgggtgggatctccacctcgcttagatcgtgcagctggtagctcgtcaggtcgagggcttcggccatggggcggcgcatggctctggcgcggtctctgcaaccgctgcacagcgccgtctcggcggcccggctgacgtcgcggctgggggcggaggtggaccgggccgtgtcgcagggtacgctctgcagttcctacccgggagtctgagtctgatacagtgtactaatctttgcaacgctacaagacaggtctcagtgtccctcgataatgaaaggaactgctccagatggcagcaacatcagcagcagatagttgtaagacttggtcatcataataatcattcttgttcaatggttacgttgtttatttagtggcactttttgctatgcgcttaccataatacattcctggtaacggcttttcttttgaattctatgtgtggtcaaggttttaaagagcatagtcatgttcatgtacgcctgtctccatttatatatgtggagatatgggcatcagttcaaagctgggatcaaatttctgggtagcatcccggcaaaatgtgacattttgttgcaaatgttgtttcattacgtttaaagtgtttttttctcttgaaatatagcgaagattgaattgaagttgatgttgggacattcaaacttacgccatcttcag

SEQ ID NO: 32774 - DNA, 2681 bp, Zea Mays
gtttggcgggcgccgcgcgtatgtttctcgttgcgacttggaggagaaggagattcgccgtctcaccccttccctgcctgctccctcgtctaagaaaagcgggcagagcagagacggcggcggcaggccatcgcggactcccgctcaccctcgtctgccaccgcctcccaggtcaggggccgacggcgacgggtggggaggggcggcagaggtagtccgaggggaggctgtggagcggagggcggagagaggccacgccgtccggagtctccagttccgtcgccacagcttcctgccgcgcctgggccgaggtaaacgagagggatcgaggaagaagtatcccccggagccccttcccccgaacccgaaggctccggaatggcgcactgggttagcgacagtgatggcagtgacaactttgaatgggatagtgatggcaatggggaggagccagcgaacttcaatgctgctggtgccggttcatcagctctgagatcaacgaacactgatgctccaggtccatcaacacgggtaatccatctaactgatccgtacatatgctactatatgttcttcagttcatgttactcagggatgttcaaaccacttgtgccaacctggccggggtgggggtggatacatatggtcatcatgaacataatcaggatcatgattagcgtacagcgacacgaacactctcaatgttattgttaccttgtttgtagtggctacgattgtaatgtttctgtttgtttgtggggctgcttttaaggttgctaatggcaatgggaaggctgggccatctgcctccttggttcaaaagtatatggacatgggtttcacggaagagattgttcggaaggccatgaaggacaatggggataatggagcagattcattagttgagcttcttcttacttaccaggaactaggcaatgacctcaaagtggataacggcttcgcttctggttgtgccccccaaactgttgatgatagtgatgatgacgacattctagaaaactgggatgatgaggatgctgatggtgggagaagcaccagggttgctaactctattgatgattctgaagacgaggatttcttaaatgagatgtcacagaaggacaagaaagttgattccttagttaaaatggggtttcctgaagacgaggctgcactggctattactagatgcgggcaggatgcatctatttctgttctggtggattccatatatgcttcacagaccgcaggagatggttactgtggcaatttgtctgactacgagggtaattccaatggagggagaaacaaaggaaggttcatggacgggaacaaaaaaaagagaaaaagatatggaggtcaagcacagggaaatagaggcccattagatggtagctgtgaagaacccatgcctctcccaaatccaatggttggatttaatttgccggaccattggacaagaccagtagacagatcgctgcctacacaagctattggaccaccatacttctactacgagaatgttgctcttgctccaaagggtgtctggactaccatatctagattcttgtacgatattcagccggagtttgtggactccaagtacttctgcgctgctgccaggaaaagaggctacatacacaatctaccacttgagagaaggtcgcctctcctccccttacctccgaagacaatatttgaagcatttcctcgtaccaagaggtggtggccttcatgggacccaaggcggcagttcaattgcctccagacttgtacgtctagcgcaaaactgttagagaggattcgtgtaacccttgcaaacagttcggatccaccacctccattagttcagaagtttgtgctggaggagtgtaggaaatggaatctggcttgggttggcctaaacaaggttgctcccctagagcctgatgagatggagttcctgcttggctttcccaaggatcacaccagaggtatcagcaggacagagaggtaccgatctcttggaaactcgtttcaggttgacactgttgcttaccatctctcagtcctcaaggataggtacccacaaggcatgaacgtgttgtctctattcactggcatcggaggagccgaggtggctctccataggctcggtatacgcatgaacacagtcgtttcagtagagaagtctgaggtgaacaggactattctgaagagctggtgggatcagacacagactggtaccttgattgagatcaatgatgtgcagacgctgacagctgataggatcgaggcatatattagacgaattggcggctttgatctcgtgataggtggaagcccatgcaacaatctcgctgggagcaaccgccaccacagagatggcttggagggcgaacattcttcattgttttaccattattttaggatcttggactccgtcaagtccatcatggagcgcctgtagtttttagaaacttttgatgttctggttcgtagaattgtagccgtctttccctgtgatcaaacttgtgaatgatttgaaggtcgactggtgtaatattcatgtcactctaatttaggctactttcgttaattacctcttgtgatcaatgcaaattgaaaggcaggtttcatttcttaagtttgtatttctcaatgcgagatctagtatctttgtcgaaaaaaaaaacctaaaa

SEQ ID NO: 32775 - DNA, 433 bp, Zea Mays
cccttgtccaccgccaacggcccaccagtccaccacgacactagctagctcgttcgtccaaacgtccaccagcgagaaggcagcagccgccagcaaccagttcgtcactgcctaaacctaacctaatccattagcagttcggcactgcgggtctacggcggccggcggcagcagtactacggagcccccagccagccccaggttgcggcagcggcagcaggtggccaggttgcggcagcggcgccctgggacctggtcggccgaccctgctcgagtgctcggcgtcacagcttctcctttctacgtgcagcggttcacaggttcaggcattcagcgccacgccgccgtcgcccccaagccagcgctcagggtgccttggaagtacgctagcttgttgtcatgaagaagtcattcaagttccttccagtgagtt

SEQ ID NO: 32776 - DNA, 2405 bp, Zea Mays
ctctctctctctctctctctctctctctctctctctctctctctctctctctctctctcgctctctctctctcgctctctctctctctctctctctctctcccccccccccgggctaagtccatttggcttctcctccgtgtcggacgcccgctggtcgctgactcgtgttgctgttggggcggcgtcgacgctgcaaagttattgctgctggcattgcggcgcggtaagaggagaggagcgaggagggatcggcggagaatgaagatgaaggcgctggcgtgctgccggcggcggccccaggacttgagcatcgacatggaccaagagcccgacagggtgatgacatataatggcctggagacctgcattatcaactgttccgcctatgacgatgatagtggcatcagtgcaacaacatgcggagatggctgtgtcaccgctgattcccttgatgatgaagtctctagctgctttagtaaagatgcttctggttcttccttctcttcacactgccttagcaagcaggaggagcattcgctagatgagttgggtacacccatcgcaattcatctactccctttcaaagcgaagaaaccaatcacatataccttgagtgcttcagatattgaaaacatgaagaaaaaatttgcgaagcttttgctcggttatgatacttcaggaggcgctaggggcgtttgtgcggctctggccttgtctaatggcataatcaatctctctgctactgtttttggagaactctggaagctggaaccattgtgcgaagataaaaagatcaggtggagaaaagaaatggactggttgatgtctcctacaacttatatagtggagctggttccaaggaaacaaagcggagcagatggatgcacatttgagattatgactccaaaggcccgctcagatgttcatgtgaaccttcctgcccttcagaagcttgatacgatgctcattgaagtaatggactctatgatagatacagagttctggtatgaggagagtggtagcagagctgatggtccggtgaaaattaccggcccaaggaagagtaaaaagtggtggctcccatctcctcgtgtccctgagcaagggctatctcgatttcagcggaaaaggcttgtttttcaggctaagcttgttcaccagatcctcaaagccgcaaaatccatcaacgaacaagtcctgttccacatgcctattccggcagctgttatggatgcccttccaaagtctgggagagctagcttgggtgaagatttgtaccaggctataacgaccgagtatattcccatagaggaaatatttgtttccctcagtttgaaaactgagcatagtgtgctcgagactatgaaccagttggagggggcaatgtttgcatggaaccaaagaatcttagaggagcgaagcaagaggtcaccgggacgtcattcctggagcttcatgaaggacagctcgtcagaactcgacaagatgtctgcatgcatcgaaagggtcgacacccttgtgcagcttctgaaagccagatatccgaacctgcctccaacttttatagatgttctaaaggtccagtacaatgtggatgtggggaatgcaatcgtggaggcatactctagggttcttgtcggggtagcattcagcatactgtcgcgcgtggcggagatactgctggaggatgacctggtcaagaggcccaacacccccatggcctcactgaagttcgacctctcctccgacgtgtacttggccggcataacagagacgccgccgggacacgtccggaggtcccttatggatcagatcagcatggtcgacgggcgcttcaacgctgctgtgaagaagaaaggagcgaagcagctgaggtggtgaggacagtcggctgttgtgtgaaatcttttggccatgtacagggtgggtgatgcagagcccagtgtccgctccacaaggacacaaggcaaggttaccatagcaatagcgccagtgtaatgtatttggcaacgagtttatagcttactgtaagagcaagcattaggcgaatcctgcctgtcgaagtctccggatgttgctgttccgtctgaacatctgatgctcttggtcagcctctgctgcatttcttgctggcacctgatgatagcatgtctatggcgagggaccttgcttgagtgcttgacgggttcatgctgacgcgtcttccgctctggaagcagtccgcgtgtggacgcttgtggaattgagactttagagaagagaacgaattccgaagtcagattgggagccagtcgggtgcaaaagggaaggaaatgcactcggcccaacaaatcttccccgcacggtcattcggtcagcgatcctctagttataggaaaggaacattgtttttgttttgatgga

SEQ ID NO: 32777 - DNA, 3845 bp, Zea Mays
agccttcacccctgctcgctgtgtcttctccacttcgccctgcgtacgctctcccgtctcactctctctccccctccacctcgttcgtggcgacgacagggcgaccgccgctgccaccgccgcctctccactgtgtgcccagtgctttgtccggccgttcgccggcgacgggcactcaccaccaggtgacaaaggaaaaggaagaggggcagcaaatcggtgcgctgctgttcatcaaatgctggggaggaaaccaacagatcaggggcctggtgaaatgctgcgcagcgagggtgactgactggccactccgcccgccgacccccgtttcgtgcttactggcatgctcgcagcataaaggaatcttctcggaattagccccccttcctgtggtcgtgacggccccaagtttcaagacatggaccatgtgccggctctagttcttgccgggtgctgcttcctggccctgctgcctggctgggcctgtggccttggctccatgtcgtccattgcggtgtcctatggggaggatggtccggtgttctgtggcctcaactccgacggctcccacctcgtcgcctgcttcggtgctgatgcatctgtcctgtacggcgcaccacccaacatccctttccttggcctcacggcaggggatgggttcgtgtgtggcctcctgctcgacaccaggcagccatactgctggggtagcaactcctatgtcaagagcggggtgccacagccgatggttgagggcgcaaggtactctgagctcagtgcgggggacaaccacctctgcgcactgagagctgctcaagatgggggtcgtggttccagtgctgctacatcgctgattgactgctggggatacaatatgaccgccacacatgctgttgatgaagccgtgtcgactgtttcagctggttcggtgttcaattgtggcttgtttgctcggaacaggacggtgttctgctggggcgacgagacggtgagtggtgtcgttgggctggcaccgagggatctgcactttcagtctataggcgcgggcggttaccatgtctgtggggtgttggagaatgcacaggtggtgccatccagtgctatcggtgatggtgatgtgaacatagtgccgatggatgcaatgagcactgtggttggcgggcggttccatgcttgtggcatcaggagccttgaccaccaagtggcttgctggggcttcactcttcataacagtacatcgccaccaaaagggctgaagatgtatgctcttgtggctggggattacttcacttgtggagtgcctgctgagacttcgctgatgccgaggtgctggggcaacagtgggccattggcattacccatggccgtacctcctgggatttgtgtacctactgcatgcagccatgggtactatgaatatgtgaaccatggtgaagttggcagcatcaaggtgtgtaagcctgcaaactctagactctgcttgccctgtagtacaggttgcccggaaggcttgtatgagtcatctccttgcaatgcaacagctgaccgtgtttgccagtttgattgcttgaagtgtgtcacagatgagtgcctgtcattctgcttatcacagaagcggaccaagagccgcaagttgatggcttttcagatgcgcatctttgttgcagagattgtctttgctgtcgtcttggtactcagcgtgtcagtaaccacttgcctgtatgtccggcacaagcttcgacattgccaatgctcaaatagagagctgagactggctaagagcacagcatactctttccggaaggataacatgaagatccagcctgatatggaggacttgaagatcaggagagctcaggaattctcctatgaagagttagagcaagcaaccggtggcttctcagaggattcacaagtcggcaaaggcagcttctcatgtgtattcaagggcatactgagagatgggacagtggttgctgtgaagcgtgcaataaaagcatcagatgtgaagaagagctcaaaggagtttcacaacgaacttgacctcctatccaggctcaaccatgcacatttgctgaatttgcttggttactgcgaggatggcagtgagaggctcttggtttatgagttcatggctcatggatccctgtaccagcatctgcatggcaaggatccaaacttgaaaaagcgactaaactgggcaaggcgggtcaccattgctgtacaggctgctaggggaattgagtacttgcatggctatgcttgccctcctgtaattcaccgggacatcaagtcgtcaaacatattgattgatgaggatcacaatgcccgtgttgctgactttggtctgtctatattgggtcctgcagatagcggtaccccactgtctgagctgccagcagggactcttggctaccttgaccctgagtactaccgtctccactacttgactacaaaatctgatgtctacagcttcggggttgttctcctggagatactaagtggcaggaaagcgatcgacatgcagttcgaggaggggaacattgttgaatgggcagtacctctgatcaaagcaggggacatttttgccatccttgatccagtcttatctcctccctcagaccttgaggccctcaagaagattgcttctgtggcatgtaagtgtgtcagaatgcgaggtaaagatcggccttccatggataaggtgacgacagctctagagcacgcccttgcactgctgatgggcagcccctgcatcgagcagcccattctaccgaccgaggttgttcttggaagcagccgcatgcacaaggtgtcacagatgtcctctaaccactcctgctcagagaacgagcttgctgacggggaggaccaggggatcgggtacagggcaccttcctggataacttttcctagcgtgacctcatcacagaggaggaaatcatctgcatccgaagctgacatcgttggtcgaagggccacagacggcaggaacgtcgggagcagcataggtgacggactgcggtcactggaggaagaaatcgctccagcttcaccacaagagaacctgtacttgcagcacaacttctgaagaaattcaggagatgcaggaacctgagcagcgactttctgccattgttgagcagtattttaagttcggcctttcatgccctgttgaagtgttcatacgttctatataatagcagcctaaaaacagggagctaattagtactggaagaattctttttagcgtccagaagcattcatctgtagattcgtatggtcccttttattttcctggtacaatttatcttctggtggctgcagttgatggattatcgtgtatccttagcttgcaaaactgggtagtttccttaatccttcagatcatctctctggctcccgatgctgtttctgcatcctaaatggcagtagctttgggaaccaactgcatgtctgggtcgggtcaccatgttcagcattctttcgcttgtatccttgtggaaggtttcttcagttgcttgatttgtgattcgcagcaacaggctgtctgcccattcttctcttcagagacaggtgagatgtggttctcagaggtctacctcagcaatggctgctgtcatgttccatgatcctgtttagggtgctgttttgaacacaatgaaaggcaggttgttgctaaccatttaatgtttcttggacctagctaacttgccattatgtctgatgcctgatgccaatgcttcttccagaagtcatcttagtttgtaaggccgtacgcactgaatgaattttattgcttctgggacagaaaagattcaataatgtctcaggctttcatctttaat

SEQ ID NO: 32778 - DNA, 1936 bp, Zea Mays
ccgggtgggtgcgagtgcgacgtcgacggtcgacctatccattgacgcccatcaccgcgtccgcgtcccatgcaagctgcatgcgtcgtcacgtgtggtgtggtcgtgtggtgtggtgcagcagctagcactagcagagcaggccagacggtgccgtgccggtgcaagcctgtcgttgcactcgcgccgagcgaacggagcaccgagcagtggccgcgacggctcctcccgcgtccggccaagcaccgcaatccccatcgcctatgtcctcacgcgcgcgatccccatcgcccgtcgtcgtcgcatccgcggcaggcaccacgcatcgccagagtctggaacaggcggccggccatgcgtcaacagctaccaggacggtgctcggttcgtctggactctggactcaccgtggacaccccacggtttgtacggcgtatgattgtgccctcgatggcgaacgccgtgcgccggccggccgccatggaggagcgcagctaaaacgtggagcgaggctgggagacacgctcacacacatggcagggcattcaagtggcgaagtgaaggtagcagagcagagcagaggaaggagaacaagtgctgccgtcgctggactcgagcggcgacgtcaggctgctggagatcggcgacgctgagctgctgccgctggacggcgccgcggggccagagagcctcgtgttcgccggtgggtacggtgacggcggtgagggcggcccccgttcacgggcgtgtcggacggccgggtgcttgggtgccggcggagcggcgctgggccgagcactcctgctccgcgcgcagacctgctggacagctgcaggggctcccaggacccggggcgcgagcacgagtgcgggcgcccgttgggcctcaagttcaaccccgacacgggggagctctacgtggccgacgcctaccacggcctgcgcatggtcgcgccgggcccgggcggcggcaaggcgtcgaggccggtggcgccggagtggtggcagggcgcgcgcgccttcagcttcgccaacggcgtcgaggtcgacccgggcaccggcgccgtctacttcaccgagacgagcacgaggttccagaggcgggagttcctgcgcatcgtcgtgtccggcgacacgacggggcggctgctgcggtacgacccgaggggcggcggtggggtggaggtgctggccgacggcctggcgttccccaacggcctcgcgatgagcagcgacggcacgcacctgctgctggcggagaccaccacggggaggatcctccggtactggctccgcccgacggctcccaaggcgccggcgctgctggaggaggtggcgcggctgccgtggttcccggacaacatcaggatgagcccccggggcggcttctgggtggggctccacgccaggaggggcaagctcgcccagtactgcatctcctacccctggctccggcgcctggtgctggcgctgccgccgcgccacgtccagcgcgcctcgtcgctgctcagccgcctcgggcggcaggtcatcgcgctgcggctgagcgaggaggacgggagggtggtggagatggccagcgtccacggggatcttcggagggtgttcaggtccgtcagcgaagtggcggagaggaacggcagcatctggattggctctgtcatgtcgccgtttctcggagtctacaagttgcagtagaggcatttacgcttaaatatggattcagtagcttattatagcaaaggaaaacatacatcgcatctatatttgtgtataaaattccttgtgtcgtcgatggacatgttcatctggccagaggttgtgaaaagcgtctatgcatctatgaactgaatgcatgagatggtcctgggccccattcaacttgtgtgaagccttgagcaactaaacttatcgtgtttcgtgttaatatatcaccg

SEQ ID NO: 32779 - DNA, 4652 bp, Zea Mays
cgtcactctttaataaatgtttacgatattttaagtagattctcggtttcgtctccaacaaacttcactctgcaaacagtgtggaacagtataaattacagtgccgcattctctattttacacgatccgaagacagtcttaacagtgatagacatgtgatgcggattgtcgtgtggaagatggcacgcggactctcaccaagtcaagagctaaccttatacagaaagcagtggccactgtatatttttttggcaaacaaattcacttgtcactgatggtgcatcaggtcttgtaaatataagcatcaggccaccagctagtacagaacaccaatcacttttccgcgatcgtgtaatcgtgtgccaaggcaagaagcaaccggcatggcaatgcgatcgctgtgcttgccgctgctgttgttctccgtgtccatctcaatcccccccgccgtatcagcaaacgaagagctggcctcgcttctggccttcaaggtggcggcgatcagcggcgggtacggcgacccgcttgcttcgtggaacgagagcagcgccggtggcggtgggtactgtagctgggagggggtgagatgctggggcaagcaccggcaagtggtgaagctgagcctgccctcacgtgggctcacaggcgtcctctcgccagccatcggtaatctgtcatccctatggactctcaacctgagcaacaacgggttccacaacagcatcccggcgagcctcggccgcctgcaacgcctccataacctggacctaagccacaatgccttctctggtaagctccccgccaacctgagctcctgcaccagtctggtgtccttgggcctaagctccaaccagctccatgggcgtgtgcctcccgagctcggtggcagcctcaagcgcctcaggggcctcgatctcttcagcaacaacttcaccggcaccatcccggcatcgctggccaatctgtcgtctctgactactctggaccttggattaaaccagcttgagggcagcatcacgcccgatctaggcggcatccagggtctccaatggctctcactggattacaacaaactatctggcgagctcccgcgctccctattgaacttgtcttccttaataacgatgcaggtccaaggaaacatgctccatgggggcattccgtccgacatcggtagcaagttccccaacataacgatccttagctttggcaagaaccagctgacgggatccatccccgcttcactctccaacctcaccactctccaggatgtcgatcttatcacaaataggctaagtgggcatgtgccccgggcactggggaggctgcgagctttggaatcactaagcttgcacgacaacatgctagaagcaaatgacacggagggatgggaattcatggcttccttgtaaactgcagccagctccaaagcttgactatcagcaccaacatcggtcttactgggtggctgccagcctcaatagtgaatctctcgacgaccatgcaaggcctcatgttggctgacacagggatcgtaggaagcatccccttagaaattggcaatcttttcaacctccagttcttcagcgtgtcaaatacttccgtgtctggtgcggtcccagatagcattggcaagctggtaaacttggttgaattaaacctgtacaataccaatctgtcagggcttataccttcatctattggaaatctttcagagttagctgcgcttgttgcattcaatagcaatctggagggaccaattcccaaaagcatagggaggctgaagaacctctatgcccttgatatctcaagtaaccgcctaaacggttcaattcccgtcgagattttccagctaccactcctttctagatacttaggcttattacataattcattatcaggtaccctacccgctgaggttggtagcttgataaaccttaacatcctggcgctgtctagaaaccaactgtctggtgagatacctggtagcattggggactgcaccgtgttgcaggaacttgggctggatgacaacttatttgaaggagccatacctcaatctctgagcaatataaagggcctaactggactcaacttgtccatgaataagttgtctggcgtcattcctgaagccattggtagcatgcgcaaccttcaacagttgtatctggcacacaacaatttgtcagggacaatcccaataatattgcaaaacttgacattgtcagaattagatctatccttcaacaatctccgtgccacataaatgtggtgaaaagtaacaaaaaagagaagttgaaatctcttacaataggcctagcaacaaccggtgcactcctgttcttagcttttgctattgctgctcaattgatctgcaagaagcttagacaaaggcagacgaggtcattccaaccaccaaaaatcgaggaacactatgaaagagtttcttaccagacactagaaaatggaaccaatggattttcagaagctaatttgcttggtaaaggaagctttggggaggtatataaatgcacttttcaagatgaaggaaatattgcagctgtgaaggtttttcgccttgagcagactagatctataaaaagttttgtggctgaatgtgaagctctaagaagggtgcgtcatcgttgtctcataaagatcatcacgtgctgctcaagcatcaatcaccaaggtcaagagttcaaagcacttgtttttgagttcatgcccaatggtatcttaaatgattggattcattcaaaatctgccatgcccactttgagaaatagtctaagcctggaacaaaggctaaacattgctgtcgatatcattgatgccctggactaccttcataatcactgtcagccaccaatcgtccattgtgatctgaagccaagcaacattcttcttgcagaagacatgagtgcccgagtcggagactttagcatatcaagaatacttccagaaagtgcaagtaaagccctacagaattcaaatagcacaattggaataagaggctccattggttatgttgccccagagtatggtgaaggttcttctgtgtcaactattggtgatgtttatagccttgggatattactgcttgagatgtttacgggaaggagcccaacagatgatatgtttagtggttctttagatctacacaggttttcaggggatgctctaccagagagaatatgggagatagccgatacaacgatgtggattcacacaggtgcatttgacagcaccacaagatatagaattgaaaagtgcttggcttcagtatttgctcttggaatatcatgctcaaagaaacagcctagggaaagaacactcatacatgatgcagccactgaaatgaatgctatcagagattcgtacctccatattagcagatcgcctatggtggaatgtggagtggacaactctgcagtaatttgcaacgataattaagtagtaaaactgaaaatgggccataagactccatatggtccttggtatacataaccggatatgtatatgatgctgcatctctatcattttctgtctaaataaacaacctgcatttattgacaccagataaggtccagagtgtcctcaacgtcaatgtgcctccttttcttgaggattgtcattgagatgtattagtcaatatcctctccttccattgtcaacaactcatatttctgtaaataggtgcatgcaagtctaaaggatgttttgtaaatatgtcaaacagatcaacaatggagagtctcactggttgtcagtatgtttttttatgaataattggtaataagatgtgagtccaaatcctgccatatgaaagctgaaaagtttcaaacacccaccccagtccaaatcccacaagctagttataaatgtagcaaacattcagaataacaaagaatgagtggtactgatgtgattcttgaacaatcaacaccataggtgattgtccgcataccttccttgaaactatgtttgtctaaaaaaggaagataaagtttaacatcagaagaaatttaagtatttaaccatggcaaacttagttgaattaggtttctacaacaccctcttgccaggctcatacattcttctattggaaatccctcaaagtttgctaaaaattgttgtatgcctgcattcaatagcaatcttaaaggaccagttttaacttaactaggcaagctgaagaacctgtatgaccttgatatgtgacgaaccgtctgaacaactcaactcccatagagattttcaaactaccacttcaattccgaattttgtcatccaatatttcacataacaaagaaaaaaactaaccagcagagaacaatcacaataagaacgatctagatcagaagtgacaagtaataagcattcctttcgaaaagaagcgattaagaagtaaccactactacagatccatttagggacaccacctcattagcgtcatcatgatccacattgcaaccccaagtccaaactgattacatccatataatccattccaactcattactggtattagtgtattaccacggcagcacggctaccagtagggaatagcaggtaatgagatgaactgaggcacgactaccaataccactgctactatttccagtcctagaggctaacctaagatgagg

SEQ ID NO: 32780 - DNA, 2333 bp, Zea Mays
catgcctgccctgcttgtatggtcgccgcccgtcggtatgtagaggagtatataaactccccgagggcgagagatttccctcgaaaggtggaagaagcaaagcatctcattccccaggccaccccccctctgccctccctcacctccccccctctaccttttgtagctttcccattccccctcttgcgtgcaagcatcttctccggttctccccgctctcccatctttaaccgccccccctccctccctctccgtggtcttggaggagctcgctgttctacggctggctgcctgccgcggcgatccctgtctgttcgtttccgtcgcgcgggagccgcggttgcttttgcttgcttgcgttgccgcgagagaatcgtgagcagagagtgtgacctggccttattggcgtcttccgtgggcgggggcgggggcctgggccggggccgttgctggctgtttgttcgttgcccatcgatacactcctcccttgtctcccccgcatgcaatccgtgtgtgtgtgtgtgtgcgctctgcctctgctcgccggcgttggtttcgtgtgtcgcctgcctgtcgtcctcaccgcaacgctactcgttaccagctatcaactagcattgccttctccttccgctacaagaatctgacgagcccccctctccctcccgtcccggcgctgttcccagctcgctcctttcgagagtgtactgtttagtccgcgcgcattgctcggaccgagccaccgagttcttgccgcgcgccgcagcagtagagccattgccgcgttcgctcgcgccgcgcggttcatgcgccaggagtctgaggcggctacctagttaacggcgggggcatgcgtttcatcacaggcggcggcggcggcggagtaggaggaggagtaggaggaggcggaagctcggcggcgcggtcgtacgagcccatggccacggccgacaccacgagcctgcactactggctgcactggcgggtggggctctgtggcctgtgggtgctggcctgcatggccgtcgcgggctacctaatctggcgtcacgagggccccagcgccgaccggcgtcccggcggcgcgggcgcgggcctgtcgtccccgggcgctgcggctgacggcggcaaggagaggtgtcacggggtgctgtacgacgacgaggcgtggcggccgtgcctccgggacatccacccggcgtggctgctcgcctacaggctcatctccttcttcgtcctcctcagcctcctcgtcgtcattgtcatctccgatggcggcagcatcttctactactacactcagtggaccttcattctggtgacgatttacttcgggctcggcacggccctgtccatctacggctgcagcaggttcgccgaggagaacgtcgccgcggcggcggcggcggcggcggcagacatggaggacggcgcgggatacgtcgtcgcccgtggcctggggcctgctgctgctaagccggccttggatgaacgagacggtgccggagaggtcgctgggttctggggctacctgctccagatcatctaccaggcaaatgcaggcgcggtgatgctcacggactgcgtgttctggttcatcatcttcccgttcctcaccgagaaggactacagcctcaacttcctgttgatcgggatgcattcggtgaacgcagtcttcctgctgggcgaggccgccctgaatagcttgaggttcccgtggttccgggtcgcctacttcttcctctggaccgcgctctacgtcgtcttccagtggatcgtccacgcagctacgccgatgtggtggccttacccgttcctcgacctgacatcgaacctggcacctctgtggtacctcgcggtggcggcgctgcagctgccgtgctacgtggtgttctggctgctgatcaaggtgaagcaccacctgctggccaggtgcttcccggtctcgtacgtacgctagctaggggctagggcacaagcaggcaggcccgtcttctccgccgccaacggtgccctccccgatcaagcgaagaacagaggggagtggcgcgtggtggaagggaaggagatgcgtgcagtttttttacagggggtataaaaactataaaatagtttggtgtacattggaaggaagctaagcatggtggtagtctttatttgagaatttttttgtattttttttgccgtggtggagtggaagtgaacaggagagaggttcagggcagcagggaatggctgtgtatagctttgactgattggatgagattgaaatgaaatgaaatggagaagatactgttccttgacatcttatatttacccgtaccattccatcc

SEQ ID NO: 32781 - DNA, 2133 bp, Zea Mays
ggtaccagtacggcctcagccagcctcctgtacttgcataggggaggctaggggctagtagtgcaatcctcacagagaagaatcccgcgagcgagcgagcgagcgcgcgaggcggcaaggacgaacccaagacgtacgatggcgaggaggctggcgtacacgacggcgctgaccacgctcttcagctacgggctgctcttcgccttcggccagctcagggatctcttccgccacctgctcggctgcttcagacccaacaaggacgacgacgtcaagcaggggtacgcgccgatctgcgtcggcctggaggatttcttcgtgcgacgcctctacctgcgggttcaggattgcttcggcaggccaatcgctagcgcaccggactcatggttcgatgtggtggagcgtacctcagacgacaacaacaagacattgcagcgcacctcaaagaccactagatgcctgaacctgacgtcctacaactacctcgggttcgccgcggccgatgagtactgcgtcccacgcgttgtcgactccctcaagaaatactcggcgagcacctgcagtgctcgagttgatggcggcacgaccaagcttcacaccgagctggaggagctggttgcgcgttttgtcgggaagcctgctgctgtcgtcttcggcatgggttacgttacaaactctgccaccattccctgcctaatcggaaagggtgggctgattatcagtgactcactgaaccacaactcgatcgtcaatggcgcaagaggatccgatgcgactgtcagggttttccggcacaactgccctgcccatctggagaaggtcctgagagagcaggtagctggtggccagccgcggacgcacagagcgtggaagaagatcgtcgtcgtcgtcgaggggatctacagcatggaaggggagctgtgcaaactccccgagatcatagccgtctgcaagaagtacaaggcctacacgtacctggacgaggctcacagcatcggcgccgtcggacggtcgggccgcggcgtctgcgagctcctcggcgtcgacccggccgacgtcgacgtaatgatgggcactttcaccaagtctttcggatcatgcggtggatatatcgctgcatccgaggagatagtccagcacttgaagcacacctgtccgggccatctgtacgctacctccatgtcgccgcctgcagtgcagcaggtcatctcggctattagagttgtccttggggaggatggctccagcagaggtgcccagaaactggcgcgcatccgtgagaacagcaacttcttcaggtcagagctcaagaagatgggctttgaggttcttggtgacaacgactctcctgtcatgcccataatgctctacaatccggccaagattcctgcgttttctcgggagtgctttagacaaaaggttgccgttatcactgtggcgtttcctgtgactcctctccttctcgcaagagcacgtttctgcatttcagcttcgcacactagggaggacctgacgaaagccctcgatgttatcagcagagttggtgacctcgtgggcatcaagtacttccctgcacaacgaccaaagattgctgaagctggtcacggcaattgaggcggtagagaggaatgagccctgaaattaccccatgagtggctgaagttgttaagagtccttttaaaagttatcaaataaatagattatcatggaaacaagcacgcgcgcattgatcagtttcgtcgggattctgtcgtattagctgtgttgagcctgcttttgagccggcggacggttcggcactgaggccggacggtccgcggtccggacagttcgcgcctgtgggccggacggtccgcgcatgcgcagagcagtttagggttccgagttttgtgctacgattgttagctatattcgcgggattagctcggaatcagttgtgtaaagagttcaggctccctcctctataaatagagaggtctacggccgatttgtaaggaacaatcgaatcaatacaacttctatttcgcattttattctaggagtagttctagtctagtttaggtttagccttccaatccccaattcttcgtctctcttcgactctacgtcgattagaggagtctaggtcggccg

SEQ ID NO: 32782 - DNA, 1749 bp, Zea Mays
cacccacacaaaccaccatgccaccgcggaatccacccactattttgcactgtttgtttttagttccctttaaaatgccgcggccggcgcggcgcatccggctgcgtaccggcccccttttccacccacccgcccacccctcgtttcctgcaattcgccgccatcgttcgctgaacttgagcgcgtctgccgcctgccaccaccgctctctgcctctctgctgctctgttctttctcccgccggggcagaggagggcggggaggcccgttgagcgagcctcggtcggtatggggatctgcgcctcgtccaagcgcgtgcggcaggaggagcaggactccgacgagaacgtggtgtacgtgatggacgagcagggcggcgggggagaaggcgaggacggccgtggcgcccgcgcggcggcatcccgcaaggtggcctccctcttctcgcagaagggcaagaaggggcccaaccaggacgccgtcatactctgccaggtccgcgctcgcaccaccacccctcctgctgctgccttgcccgaggaattctctcgatggattcggcatggaggacggcgtgttctgcggcgtgttcgacgggcacggccggtgcgggcagttcatcagcaagctggtgagggactacctcccgttcatgatcctgagccaccggaacgcgctcctcatgggctccgacgacgacgacgatgatccggcgcagctgctggaggagtggcgggaggcctgcgccaacgcgttcgaggccatggacaaggagctcaagctccaggccaacgtggactgcaacttcagcggcaccaccgccgtgtgcgccatcaagcaggggaaggacctcatcgtcgccaacctcggcgactccagggccgtgctggcgaccatgtcggacacgggctacctcaaggccgtgcagctcaccaccgaccagaagcccaacgtgccccaggaggctgagcgtatcaagcgctgcaacggccgcgtgttcgcgctcaaggacgagccgtcggtgctgcgcgtgtggcttcccgacgaggactgcccgggcctcgccatggcgcgctctctgggcgactaccgcctcaagcgccacggcgtggtgtcggagccggaggtgacgcaccgccgcgtcgcgccgggggacctgttcatcatcctggccacggacggcgtgtgggacgtgctcagcaacgaggaggtcgtgtccatcgtctgcgccacgccgcggaagcagcacgcgtccaaggccgtcgccgaggccgcggcgcagcgctggcggaccaggtacccgacgtcccgcgtcgacgactgctccgccgtctgcctcttcctgcgggaccaggactgggccagcagcgtcgccgcggccagggccaaggcggccgctagccgctagtgctagtgctagccggggcggacggcggacgaagctcgctccgacgataagcctgcggacggcgatccataacggcagctaatgtactgggagtgtaattaagtgctgtaacatagtgttaattaagctctgatgtttttgcgaggagagaaaaaagtcgtttaattctcagttttgagttttgactcctgatcggtgaccagctgaccttgcatgttatggtgtcggacgaagcgaatggctggcaggaacgccgtttgtactctgtgtggcatgtaaattgttaccggttgaagaagagttaccagtccaagtgcctttttttgtcgatataaatgtta

SEQ ID NO: 32783 - DNA, 976 bp, Zea Mays
ctctccgtctctctatctctctcggtctctccagccccgtagcccgcccgcccgcccgcctcccaaccgtcccgcgtgagtgcagaaaggcgccgcgtgacgagtgttctaccacctggtggcctggcctctacctatatataaccccaccccgcaccacaccacagagatccatttcgaggactcgtactaggttcggcgttcgtagctcgtgtcgtttctgaagctagatagctagcgacaggcgatggcgagccgcaagtgtctcggaggcgagggaagcgcgccggcgccgcacgtcctcgcggtggacgacagctcggtcgaccgcgccgtcatcgcaggcatcctcaggagctcacagttccgcgtgacggccgtggacagcgggaagagggcactggagctgctgggcaccgagcccaacgtgagcatgatcattaccgactactggatgcccgagatgactggatacgagctcctcaagaagatcaaggagtcgtccaggctgaaggagatccccgtggtgatcatgtcctcagagaacgtgccgacaaggatcaacaggtgcctggaggaaggcgccgaggatttcctgctgaagcccgtccgcccgtccgacgtgtcgcgcctgtgcagccgcgtcctgcggtgagcacggcggcaagtagtagcacagcatgctggcgcgcatgctcgtggtagttcttttggggatgcatggtggtagctgtagcagcggcattccgaagctctgtgtcttctcatcgagcatggggctcgtatacgttggatggatatggaggagtccttgtcgtgctaggctgctatagtgtgctcgcggaaccgtacaagtggtcatgctctgttagcctttccctgtatgcatgttcagttaaatgtgttcagtaaaaaggatgttgcctttctgcctagctgcatgtacgccgagttgccttcaatttgaacttcattt

SEQ ID NO: 32784 - DNA, 1567 bp, Zea Mays
ccacagtccacatgctctctgtgcttccatctttgacctcccgctaatcacaaccaccgccattaaccacagcctaaagcaggcggttgctccccccgcttaaaccctcgaaagattggattgcactatttgcagggactggctggattccagcatccagctcccgcacggccacaccgacgaggcgaacgggccagagtcggcgatcggcgtgtctccactctacaggcgacgacgaaaccagcagcctcagcgccgaccactccgggagcggggcctcacaccctcaggatcaacgggagatgccggtcgccgccgcctcaccctcgcactcgtgaactggcttcctctgcgacgagccggggcgggctcggattcggcggatcttgtgggtgcgtggcgtcgggctggtccggtgctagattgatcccgcattcgagctgcggcaagcgtctgggtagtcgcttctcccgagggaaaggaaaacaaagttgcttggccgactttgggatcaaggatcggcgaaaagaaagagaaaggagggatctttttgggaggttctgtttgagctttcagggtttatatcgtagccttgggcaactccgtgctgatggatttcttcaagattaagaagttcaggaaggggaataagagcgcccggggcgggggagaggtaatagaatccgacgacgacgccagcgctgggaatgtgacccctcggggcctggtggagcagaagcctggcatcggggaggggaacaatgccgaggtggcggtggatggtggaggcgcgggcaatggggtggttgaagaagaggaggacgacgacgatgatttcatcacgaatgaggtgaagcggaggctcaaggagctcaggaagaacagcttcatggtgctcatccccgaggacgagtgcgccgaggtcgaggaggatggcgacgaggaggaagggggcagccccacggagtggctggagtcgggtgtcggtgacggcttcccgctgtgtgggttggattcactgtatgataagtactgcgagagtatgctggtgtttcataagatgatcgcacagctcatgaaggatccagagtcactgaacatgtccaaaaagtctccaagatcagcatcaaaattggcgtctaccctgcgcaacctctcattcaaaagaaaagatgagctcccggaggattgtgaacaacttcaacaacagcaaagcggatatgatccttaccagacacttgagactgcatatgttgctcatattgcattaagctgggaggctctgcattgcacctatgtgcacctgagccttatcgttgcagcacaacctgataatcctacaacctataattctgctgctcaagcattccagcaattccaggtcctgctgcagagattcattgaaaatgagccatttgagcatggtacccgtgttgagatatatgcacggtctcggagcttgttgtcaaagttgcttcaggtccccacttttcaaggtatgtcagatgttccctgtttgcatggcacaaattaatcctgtttgtttacatgaaaaaatggttccaga

SEQ ID NO: 32785 - DNA, 798 bp, Zea Mays
  misc_feature (797)..(798): n is a, c, g, or t
agggcttccccgcgtcccctcccgtgcaagccgccgcctcctcctctcgttcgtgaagcctcctctccctcgcgcacggtactgccacccaccacctccacctcgcactcgcgcacccaccgtcgcccgccaccccgctcttcctcaccccctcctctgcctcgcgcaaagcacaccctactacaggcggcaggaccgcacaacttgccccagatccgaaacggtctcctgtctcctcaactcacgcatgacgacctcctcagctcccccatccgcatctcgcgaaggtacgcctatgcactcgcacaagggggtagtgctggcagctgaccgcctggccgtaaccagacggcgctctgcacgatctgtccctagttggtgtggtagctagtgtacctcagcatggaattgggagcaggtttctcttccaattccactgcgaaattgagattctaggctcttggtgtggaagatcaaggtgatggaggtggtccaacaacagtttctaacccaagtggacctcacagctttggtagctgagcacgcagcggatgggcggacgttgttgtttcgccacatggaggagacgggccgggcggtggctaaactgcgaccggaggagatggggaaggcgctgggggagtcgtcggaggattctgatggcaaagagagtaatcgctctcattgttgagttccgtggcatccaggaggacaagaggagcaccatcggtggggaatcaccaaggtggttcaacagatggtgctagaatcacgtatgtccgcaatgggatcacgcnn

SEQ ID NO: 32786 - DNA, 1039 bp, Zea Mays
gcgcgaggcgatgctgcagtctccgcctccattccggcctggtgtccaccctttgtcgcttcttctctgcgaccatcgtcaccaccagccaccatcaccatccctcccctcggcctcgcggtcgcagcggtcagagcctccgagatggagctccgcctctgcctccgtctccacgcgcgcctccctcctgccacgacgccaccgcctttccaggcgaccgcggtgctcccggcctcccgccgccttcggacgggtggtagctacggggttgctcttaggcggcacacgaggcgttcgagtccggcaatctgcgcttcaataaccgacggcgagcagggcgtggctgtgaaggagaggagcgtctcggtgatcctcttgtccggagggcagggaaagagaatgggggcgaatatgccaaagcagtatctacctctactaggactaccaattgcatttttaaaaacattctgtcaactgaaggaagtcaaagaagttgtggtagtgtgtgatccagactacagtgatgtatttgaaggttctattgacaacttgcaaataccccttaaatttgcacgcccgggaaaagagagacaagactctgtttttaatggacttcaggaaattgatggggattcagaactagtttgtgtccatgattctgcaaggcccttagtttcttctgaagatgtaaaaaaggtcttagaagatgctgcagtacatggagcagctgttcttggtgtgcctgtgaaagctacaataaaggaggccaatactaattcttttgtagtgaaaactcttgaccggaaaactctctgggaaatgcaaactccacaggctatgaagcccaatttactcagagatggttttgagctcgttaaacgggatggccttgaagtcactgatgatgtatccattgtagaatatctaaaacaccctgtgtatatcacggaaggctcttatacaaacattaaggtgactacgcctgatgacttgctactagctgagcgcctgatgaatgaggaatagagcaatgtgaagc

SEQ ID NO: 32787 - DNA, 241 bp, Zea Mays
cgaatccgtgcgacgcggggctggatctcagtggatcgtggcagcaaggccactctgccacttacaatgccccgtcgcgttttaagtcgtctgcaaaggattcagcacgccgccctttgggaagggagcttcgaggcggcccgccgcggcgcgtcggccaggcgggctgagccaatggcacgggcccttgggacgcgaacgccctaacgtgggtcggggcgggcggcgagcagaggcgccg

SEQ ID NO: 32788 - DNA, 2294 bp, Zea Mays
gagatcctcaggttgatgcgacgggaagattggcgggcggacacggacccaaccccacgtccccacccaacgcatcgtcctcgcgaacaaaaccgacgcgcccaccccgtcccggctccggctgtgtggctcaccttccactttcccccacctccaccatcgtgcctcagcatcagcactcgaatgccacgagactgacctctccctcgtcgccgcagccgcgatgcccgcaccgaccgccgagccggcgctcccggcggccttcctctgcgtcccgtccccgctcctctccacgccgctccccggcgctgcactctccgcctcccccgcgccctcctcccaccatgcctccttcctcccgcgcccgcgcggcgggccccgagcgctctccgtcgccatctccgtcccgggccccactttctccgtggcgtcgcggctccatcagatgtggggcgagttcgcgcggttcgtgcggctgcacgggaaccaaatagcgccgctcgggttcgcgtccatgggcctgggtttcggcggcggtggcggggataacgtcggcggtgggggaggagggggtggaggggatgtggatggggtaggcgaggtagaggaggccgcggcgcgggccgaggcgccaaagaaggtgctgatcctcatgagcgacacgggcggcggtcaccgcgcgtctgccgaggccatcaaggctgccttcacccaggagttcggcgacgactaccaggtatttgtcactgatctgtggactgaccacactccatggccattcaatcaactgcctaggagctatagttttttggtgaaacatggacccttgtggaagatgacatactatggtactgcaccgcgtgtagtccatcagcctcattttgctgcaacatccacattcatagcaagagaagtggcaaaaggtctaatgaagtaccaaccagatgtaattatcagtgtacaccctttaatgcaacatgtccccctccgaattctaagatcgaaaggtctcttggataagatcccattcgcaactgttatcacggatctcagcacttgtcacccaacatggttccataagcttgtcactagatgttactgtccatcaactgaggtggaaaagagagcactgaaagctggactgaagcccgcacagattaaagtctatggcctccctgtccggccctcttttgtcaaacctgttcgaccgaaggatgagctgcgaagagagttaggcatggatgaagatctgcctgctgttctattaatgggtgggggtgaagggatgggtcctattgaggccactgctaaagcacttggtgattctctgtatgatgaaaacctaggggaacccactggtcaaatacttgtaatttgtgggcgtaataagaagctggtcaatcgattgcaatccataaattggaaagttccagttcaggtgaaaggctttgttacaaagatggaagaatgtatgggtgcttgtgattgtatcattacaaaggcaggacctggtacaattgcagaggcaatgatccgtggcttaccaattattctaaatgattatattgctggacaggaagctggcaatgtcccctacgttgttgaaaacggatgtgggaagttctcgaaatctccaaaacaaattgcgaagatagttgccgactggtttggcccaaggtcagacgaattcagggtaatgtcccagaatgccctcaagctagcacgacctgatgctgtgttcaaaatcgtccacgatctgcacgagctcgtcagggaaaaatgttttgtgccccaatatgcatgtgcaacataaaaggccgtatcctctattttgtgtttgcttaatttttttaaccccatgcggcactagctatagctgattgtgaggattgcgaatattgattgatttgaaacgtttccgtaagagaaatgaaaaatgtattgaatgctctagtttaattttccgaaatactttttcaggctagtactgttgtgggtgctgcatgcagattgggttacgaacccaacccgatgaaattttcaatggattacttggacgacatggattttcttgggacatgtctaactctaatcctggaaagttgaaaggagctggtaggatctggtcaaagtcaaacaggctggtaggatctggtcaaagtcaaacatgcgagcacagctcttaaggctatctccaacagatcctcaatctcatcacctatctcatcttctatttcaaacttcattatacaaacagtgtaaaaaatagtgtcatctataattatgtgttcttt

SEQ ID NO: 32789 - DNA, 2547 bp, Zea Mays
aaaataatcgtactgtagaagccgagcgcaggagatccaacaacgaaactccccttcgttccttcctcgtgttcttctccctcctgccgccgcggcccgctccgctcccgagccccgttgcacctccacccgccgcttccgtcccgtctcctgccaccttcctctcaccgcaatcgagtcgctgcgcctcctcccgcccgccacctcccgcagccgcagcaggacgagctcgtcgccgccgtgtactaggttggagtgtctcgatttgtcaggatagcttgtataactgaagctttcctttgtatgatgatgggggcatgccatggatcacaagtgagggggctagggtttagtatgtggtagtagctcctgcttcagcaaaagaagcaaggatcactacttttgctgtttgttccgtggaggatctgaatcctatcggcattgattcgggtggcgtcagctgttctgggtggggtagtatgatgaaacagatatttggacggcgcaaggcgtccaaaactgcaggcaaggagtgtggcgggaggacgttcaaccagctgctgtcaggttctggatttgctgacctgagtggccagctgccaattctgtctagtactggggacatctatgggaatggaaaccgtacggggttccaagactcgaggataaatgatactttgttctcttccaacttccgactgttgccgagctttaaggatgtgccaaatacagagaaacagaatctgctcatcaaaaagttgaacatgtgctgcactctgtttgactttgaggatgcggcaaagaacataaaggagaaggagataaagacgctaatgttgttggagatagatgaatatgttaggactgctaacgcgaagttccctgagatcattgtggaggcaatcacaaaaatgatttcagtgaacttgttcaggacactaatttccccacccagggagaagaaggtgcttcaagcttttgatctagaagaggatgaaccattgatggaccctgcgtggccacacttgtaccatgtgtatgagttgctcttgacatttgttcagtctccagaaaatgatgctaaactggctaagaagtatattgaccattcctttattctaaggctgcttgagctctttgactctgaggatgctagggagagggatcgccttaagacggtacttcaccgtatctatgggaagttcatggtgtaccggccatttatccggaaagctataaataacatattctaccagttcatatatgaaactgaaaagcacaatggaattgcagagctcttggagatttttggaagtattatcaacgggtttgctttgccactcaaggaagagcacaaactgttccttggaaggaccttaattccacttcacaagccaaggtgtacttcaatgtaccatcggcagttgtcttactgcattacacagtttgttgaaaaagattgcaaacttgcggatactgttattaggggcctcataaaatattggcctatcaccaacagcacaaaggaggtgctgttcttgggtgagctggaagaggtactagatgcaacacagcctgctgaatttcaaaaatgtatggttcctctttcccaccagatcgctcactgcttgaacagctctcacttccaggttgctgagagagtattatttttctggaacaatattcacttcgagaatttcgttaagcaaaacagtaaggtgatcctgcctatcatcctccctgcattggagaaaaatataaatgggcactggaatcaagtcgtgcaaagcctcagtctgaatgtccgaaagttactctccgatcgtgaccctcaaatgtttactgaatgcttgcgaaaatacgaggaagacaagggcagggagaaggaatttaaactgaagcaagagttggcatggaaacgtctggatgagattgcatcagcaaaagtcacaagtggtgaggctgtccttgtgtctccaaccttgcctcgtcaaccttcattcttgtagcaacctgcactgaatgagtggtccttgcagagtcgttagacattgtacaggattgggttgtagataaaagggggtatatgaagccttcaaggctggtgagcgaaattgaagaaagagatctgagaagccaattgtgcatcatttctgtaaatcccatgccatggcttcttttggcattctggtggttcagtctgcttctgtagtccgttgtttgggacaatgtattttttttcttgtaatggaaaatgttgagatgtcctgcaggcggcttaaatgataaaagttattaattttcatcacagagtgccatggcacgacagatggatacaggggcaccacaccacgtaagactttgttcgtttacaccaatcccgctctggattagtatggattggaattaaatccatgcctcaatccatgccccaaaataatccatgactacttaattttttttattcggttaaacccatcatggaatataacccaaatgtttgggaattttttaaactatggaagacatggattctatccatagccc

SEQ ID NO: 32790 - DNA, 1114 bp, Zea Mays
tcaaactcacatagaagcaactcatgtccagcaccagctgggcataatggtattcctactgcaccgtgcaatttctggccaagcgggccaccttatcatggaccaccaatcaattatcctgatatgagtcggttgaatatttctgaatatcctaggggtattcataataaccaaggtttgcatgccaactaccatccaaaccatcctggttacaatgattatagctacagacctccaactcaacctaacatgcctagcaacatgcaaaatattggacactggggagccaacccgggatgttcacagccatcttcggaccctcaaggtcttgtaagatatatcttaggtgctttggaagttttgaagactgagaagattcctccaacagagcaatatatagcagattgtatatggtatggacatggtgatgctaatatgccaaattttgatgttaagaaggcacttcaagttgccatgcagcatcaagctgttgtcaagaaaaagttagggaaaatgtcattctttctgggaaaagatgaaaatctctggaaatgtgttaatataatggatgataacgcaaaatacccaaaagaaactctagatgctgttcatgctttcatgtcttctgctccaggctattctgagataaagagttctcaatctaggttggcagccgttgtcgtttaacataatagtggctgatgctactactgccactggtggaaaggcttagcatcggtacattatctgcttgtaccaattgaacatgttgaggttctggtcgttggtgcaagctgcgtccgcaaaagctaagttctgttgaggtttcctagcacaatgctctgcattttgccaagtttggggttaagttgttttacacacagtatatgttagctggagtgaaacagtaagtagccttagactgctaaattttagtgggagtcaatctgtcaactattgggcatgttgaaagaactctgggcagccctggctgtggctactcctatgggtgataattgtggtggtaagatgcttatgcaatcaagcataaagcggttcagagggactatcgtcttttgttcaggcagtataccgatgcttgatgctggtggta

SEQ ID NO: 32791 - DNA, 7350 bp, Zea Mays
tccgctccgggccccagttgtctggcggccgtagctctggtccgtcggttggaccttcaagcactgcctttcacccctatatacttttcctggatccgccaccgcccacccttccgtcgttttgcccttccgtttcacttactggagcacactgcctcgaatgaggaggttatttctggcgtgctgccgctacctgcagttcacatctgtccctgatgctatcagagctacttcacctgttaacaatgtctacgggtcatggaggaggtatatcttcacaaacgctgataaggttctaccatgggaggcgccatcccgtgaaattctgttgaggaagataaattgtgctatgaaggatgggaatgttgaagaggcgctgcaatctttgagcaattacaagaagcttcacggtcttcctgagccgcgggtactgaatagtataattgtgtcgctgtcctacatgtctagtaggaggtggcttcagagggcatttgacatggttctctcagtttatcaaattaatagaaatcttctcaattgtggctcactgatgaggctagcattggcgctcgcaagagatcagatgcctatcccggcctccacagtcctgaggataatactagagagtagaaagcttcccgatgttgatatgctgaccatgtcgtttctgcatatgttgaagtcacaggtaggctcctaccttgccactgatgttctgattgagacttgcgagagctttttggaccaagttacagataggcgggagatgaaaaaactggacccaataaaaaacaatgccaccttgttcaatatggttttggagtcatgtgtgacctttaaatgcattatcaaggcccagaaaataatggaactgatgtcattgatcggagttgtggccgatgtaaatacagtggtgatggctagccgtgtctttgagatggttgggcaacgggatgagttgatacatatgaaaagaagcatcgattctttaacatctttgacatttcttcagtactacctgcatttttatgacagtctattgagcctccatttcaaatataatgacatggatgctgctgcaaagtttttaatcgatctgcatcagcaaccaaagcctggtgttttattttgcaatggtttgcagaaacaaagtatcatacaaattggctctggcaatctgaaaagcggatataaaataatgtttgatcccaaaaaagttgacaggggttttgtgttgggtacagaaagccaattcggccttgttgttcttactgatggaaaccttcttcatactgaaaaggctcttgctaaacttatcataggctgtgtgaaatcaagaaatatgcatatactgtctaacttttttattatgtcatgtcaatatggtctagagctaatttctcctcaagatgtggttactgcttgcattcaaatgggatggttgcatgctgctcatgatatcatagataacttggagtcagccgggattccagttgggattactggttacgtttctcttctgagagcatatgagaaggagaataagtcagaagaagtcaatggccttcttcaacagatacaaaagatggcatctaccatggatgatgttcatactgattcaccatttactatcaataatattgccgaagtagtgaaatatgaaatgtccttcagtagttcatctttggttgctgctttggctgatgaaattaaacattacaaccctggagagcacttggcattagagctcaataattcggttcttttcttctgcaaggcaaaaatgatggaagatgctctttgcacatataagtgtatgagagagcaaaatatcagacccacatctcatactttttgtcatatgttgtgtggttattcttcaatggacatgcatagggagatcaccatgttgtggggagaaataaagcgcagacatgaatatggagagctagatttggatagggacttgcttgatagcttggttttgaattttcttaaaggtggatatttttcgagggtgatggagatcattagttacatgtcaaaacataacatttactgtgacaagtggaaatacaggcgtgccttcctgaagctacacaagaacctgtataggaatttggattcattgcatgacaaaacagaagctcaaagtaaaaggattgaagatgtccgagctttcaggttgtgggcaagcattaagtagggacagcgaccaatttgatccctctcattttcaaattgggtaaagacacccctttgatgacttgtagtgcggtgccaagcaagcctgccttgttgccacctcaaggattactcctggcttgttgccctgaagcctcccttgagggaaaaaggcaaagaggcatcgatggtgttcgcagcacctgcagcgggggaagagggttgaggctgtggagagctttggggagctcagccttagggaggtggtgatgtttgcgctgggagaggtgggcctctccaagcagacggagatccagttggttgacgtgaccagcggcgtgttcggctcccacaccggctctagaaagacgttcttctacttgctccttgtttattgttcaggtatgaaaccggagaccatgttggtgtatatgcagaaaattctgttgagactgtggaggaggctgatgtgatggcccctggccaccggcgtgcgcagatgccgggacgtgagctctgatcaccaccaggacttggcaaacgaagcaaatacagtcttctccatccatgcagatgcagaagatgggtctcctcgtaaaggaggaggttccttggccccacctttcccatctccatgtactttgcggactacgcttctacgatatgctgatctactcaatccaccgaagaaggctgctttgcttgctttagcttctcatgcatctgatccagctgaagctgaacgacttaggttcttggcctctcctgctggaaaggggggaaggtttgcctcctcaatcatgtgggagcctgtggcgctgggtctgctcttttatcgaactgtcctgttcatgccggtgtggcatactatgcttgaggtggtggatggctccctccagaattcgtgtaacatgtgcattagtttttgggccttcaccaacaggaaggatccaccaaggagtttgttcaacatggatgaagggctggctccttttagaggtttcttgcaggaaaggttagcactgaaacaatctggagcagaactgggcacttcaatccttttctttggatgcaggaaccgtaatatggactacatatatgaagatgagctgcaaactttccttgaggcgggggcgctttctgagctaattgttgcattctctcaagaagggccaacgaaagaatatgtgcagcataagatggtggagaaggtcagcataaaattgtgtatccctaacaagtttgtagcaaagggggtacataattacagtttgagatgaggacatcatttatactgtttgagacgaggacattatgtatatacttggtacattagaaggccaccgaaaacaaattttgcatctggtttttgaaagcatgtaatcctatcaactatcgtgctgtctgcaatgttgggttggaaggtgcagttggcaatctacattttgtacatcggcattgttgcatggaagctgagtctgcacttacacgccttcagatcggacgggcacctgaccactggcatgcccaacggccaacgcattcctcatacactcggcgcgcgctgttcgtgcctgggtcggtcgtcggctaccgtccgccgccgcctggtcgaggcgagatgccgccagacaggacctactgtgtgctatggttattggttaggcagcgcgttgggctttgtctagtttgggccttcaattcagtgtctaggtagtaaaaaacgttttgggcctctacacagggaggctaccctttggtccgtcgtctccgctcctgccgacaccggcacaacaccgctcgcagtgactcgatccctgccgccgcagcctgctgattgcccgcaggccctcgccctgcccgatcctgtctccctgatccctccaccggtgcgatgccctctgccctcggcaggcggcagctcatctcgagtgctcccttctcgcccaccacggccgtgctcgcgtagcccggccggcgtcaccgccggaaaggtgtaggcgggaacacccgcgccgtgctgcaccgcccgtccgctccgggccccagttctcttgcgccagcacccacagcttgtagggcgcaggctggcggccgtagctccggtccatcggttggaccttcaaggttgcactcctattcgcctgctctgtctgacctgaaaattttggaaccaatggaagaggaagagtatagctctgaaacatctaatgaagaagatggcgaaaaagaaggaaatgctgctgagagtgatgtcttcagaccagttgatgtagatccagcatgtttaccaagagtagggatgatatttgactcggaggaagatgcctttcagttttatgtgacgtatggttgtcacgcaggttttggtattacaagaagatctaacaatacctttgatggtttccgctatcgctctacattcatatgttctaaaggagggcagtctagactgagatctggtgtgacaaaacctgcaagaaagcgaggtgtgaagactggctgcaaggccaagatgattgtgaaggatgcccattttcaaaatcgctgggaagtaattgttcttgagttggagcacaaccatccattggatccgaacttgcttaagtttaagagacatttgaagaactccccttttacgataaatccacctcaaatttgtgagtctgagggacaacagagcaactcagctcttgtacattcaagcagagttgttgatactggtataacttcgtcttctacacagattgaattcaaagccaagatagatagaaataggaaattgaagctcgcagaaggagacttagacgccttgttggattttctcaacaaaatgcaagaccaaaacccttgtttcttttacagtttagatatgaatgagcaagggcaactaaggaatgtcttttggtctgacgccaaatcacgcagttcatacaattactttggtgatgttgttgctattaatgtcacaaacttcagcgatcagtatgatatgcagtttgtgtcattcatgggaactaaccaccatgcacagccagtgttactaggttgtggcctgcttgctggtagatctcttggggcttatgtgtggctttttggtacatggttaagatgtatgaatgccaaaccaccacattcaataattacaaactactgtcatgatgtagcgatagctatcaaaaaggttttccctaacgcacgtcaccgtttttgcctttcacacatcttaaatgtgcttcctgaaaagttggaagaaattgataacaaagatgaaattatttccacattcaccacactagcctatgattatgttactatgactgattttgacagagagtggcaagatactatccaacattttcgtttggagagaaatgaatggctgtccaaactatatgaggtcaggatgcagtgggctcctgtttatgttaaggattcattttgggcaggaatgtctgtcacagacagaagtgatagtgtaactgactattttgatggctggttgatgtcaggaacctctttgaaaatgtttgtagagcaatatgaggaagctgttaaaggaaagttagaaaaggaatcttacgaagatttacgatcagctcagatgaggccaccaatggtgacggggttgcctgtggaagatcaagcagcaaaggtgtacactgcagaaatctttcagaagttcttcaatgaaataggacattcatttcattgcaattataatatacttgaacggaatgagtcagtggttacatacatagtttcggagcatgtcgatcaaacaaacaaggtagactacaaagttgcttatgataatgttcaaggtgacatatggtgcctctgccgtttgtaccaatccaaaggaatattgtgcaggcatgcactcactgtactgagacaggagcttgtgctgatgattccacaaaaatacatcattcatcgctggtgcaaggactgtaaacaaacttgtgcttccatatcccagcctgtctcagcagaagttgtggaatttggttccatgaactcagaatcaaaagaatatgctttgtcaatcatgagggaagtcagggataaagtgatttcatatgagaaatcactaagagatcaaagggttgacagccatgtttcaacagccaactttgcatacaatcctgtgaatgaggattttactgatgatgctttgcctatctctcttagtacaaagggctgggatcttacccaaggccaatctaaacgttcccgaaagaagaagctggcgaccccaactgttcttgatactttgaaaaagaaaactaaaagggcatataacaaaaggaggaatgccactgcaaacaccctgaacacatctgccactgcaactgacggcataactgatggcacaaatgtggagaacatttcgtttgatttgtcacaatacaacaatgccccaagcttccactggcctgaaagcagcagcaggtctcagctccactgagtaggcagcaatgcaatcgtggatgccttccaaatagactaagttctgacagtcttgtaagggcttgttcggttattcctatcttctgtggattagatgagattggaaaaaaatatgaaagattttgacttgaaagattttgacttgtttgggattaaaacgcacccaattccactcaatctacatggattgagagcaaaaccaacaagccctaatttggaaaaaaaaaaaaactagaggtgatggatcaggtttgacctttctattcctgcctaggactctaggagtcagtgaccacctgaataaaggtgaaaagggaagggattcaatgtggtgaagtgacatctaccatctatgtaccaatttagtggaacgggttctctacataatcattcctttttttccttccatggatatttgcagctcccgattgatttatctgaaccatgtaaattaggtcagatgcccctgaatcgacctgatgtttcactatggatccctcaggaaatcatatgccccttctctgatgaagctgtttgtaacaagatgtttattgcttcaccaagttcatctgttttcgctaatatttgttccgttcaatttctatgatcaaattattatatttgttctgtccagataatattttgtatcattttattctttttttctcaaacatgcaggagaactgtgtg

SEQ ID NO: 32792 - DNA, 2840 bp, Zea Mays
cgctctagtatccacgtgtattaagatgaatcgagatgtgaattaatttaatttatacccccgcccccaatccacccccaatacatatggattggggtgaacactatagtacccaaacaaagctgtaggcgtaagtgcacaccttgcattgctggctacaccggcgcacactacactatagtagcaggcgcgtgtagtatatgctaaaacatattcccttcattttttattttgtcatggcttagttcaaaaataaactagcttacgataaatattcaagaacggagctagtatatatttaaacagcctaaatcaaggcttcctttagctcatcaatgaaaaactccgtgcaacctgccctttgctaactttattgttttaatgtattattattattgttgttgttgttgttgttattattattattattattattattattattattattattattattattattattattattattattactactattatttattattatctgaaacatagtcagcagggcatacgcgacataaagttgcttctgatctgatggtatagggaacgctccacatttgcaactactcatgctgtccagcagcctgctcactagctcagagctatgtcagctacccaagcaataaaatactcctgaaaacatacgttaattaaacactatttactgcccgatgagcatgcagaaacacagctagccctgcgttgccatcggtgtactgcatatatggcagagttattaattaatctaaaccgacaaattcatttagctctccgcaacgtactgatgatgttctacaacatactcatgcatgaccttactggctactgcaccagcagcttgcagcctatatgcatgtctttcttccttgatgcatacatagtcgtactccgcatggccgcatatataacgtacgagttcctttaggctattactagcagcttatccatcttcatctttttatatttaaacttcactcttccaacactacacagtctaccttgtaaaacagttttttagacgaccatacaagtgaattgttaaagactgtttaattttggcggtctattattaggacattagaatttttttgacgtgtcttcccttcgccttcggacgtactccctccgtttctttttatttgtcgctggatagtgcaattttacactattcagcgacaaataaaaagaaacggagggagtaccaccgtcgacgcctcaccaatcaccatggcatggcatgcaccacgtacgagacggtagaactttggtatgtagagcttcgttcacggtcacgcggtggtggagctccatcctgcagactttaaccatgcatgcccgtgagtccgtgacgaccttcttttccctctctctctctccccctactgctatcatggtcatggccatgggctcatggctaacctgcttcggctgtcttcttcaccgctctccccgtccccacaccgtctgacctgtccgttttttttaaaaaaataattaattaattaaagccgccaaatttgaagaagagaagaaggagaagatgagaagagagaaaaactgagtgccgaaagattcgatcggagtgagatgtagactttcggcagcatatagttataaccttaatgattaatctatcacgagattattgatatgccactatatatatgccggcgtacgtacggccgtctgtatataactatatagttgcactatctcgttacattagaataataatactgcaggaaaggccccaatgcaagctgggtttttttttcttcttcagcgagactccaaacttcgaaggtgccgcgtgtgttttaaaaatatcccagacaatgcctgaaaagttgacagctgaacacatggctttttacttgaccagtatacagtggtatttactatttaccaacatagtattactatatcattaccccctgaaacgctcggtttggtttccgttgctgcatgcagggcgaaataagttccatcgagggggtccacgctgcctccagatgctgcaaagaggttgatgagttcgttggaaggaacccggatccgttcctaacgatgtatggattttcagtcagcaagagagaggaagccacgatcaatctcagcagtttctgaagaagttccgaggaaagagctgcctgagctactacctctcgtggatctgcggtggcgggtggtggtgcccgccgccgttgcagctcaagaggccaccggcgccgagctgctcctgcgcgccgcggctggggaagctctgctcctccaccgcctcctcctgctgcagctgttgctgctgccggttccgcgtcgtgtacgccgccgccggctgcgggtgctgcgcgccgtgcccgcgctgctcgtgcgactgcacctgcgcctgcccgcgctgctgctcctgcgcctgccccatgtgcagcgccgcgtgctgcgccccgcgctgctgcctgtgcctatgatggccatgagaaattttgcgtgcatgctagtagtagtagtacccggagatgatgatggatgactggcattttgcagcatggttttttttttggtttagtttcggcgacacgagtactgttgtaactggctgtacgtggctgatctggttagtgctggtgaatggtgtcgattccacattttccgctgagagttgccatgacatgcagccctactagtcttacgtacagcacaaaagatgcttagattccactcagtccttcggttattgcaatttaatgtggacgggagtgtattgaaatgtattgggatagattttgacttgctattaatttaaaccgacccaatatcactcaatc

SEQ ID NO: 32793 - DNA, 1201 bp, Zea Mays
atgatgaaattcacgatcactctgatgggctccgcgcaagcgagggcctctttcgagcatttgcaactcttcacagtcagtgcaatagtgaataatgggccttccgtcaaaaaggtctggaacgagctggttacctcttcagagcccatagtccggataggcccagcatccagtcacagtccggagtccggttggtactccgcaagttcgttttttttacgccggcggaaatcaacctgcgccgctgccttctccgttctcgccgtcgcctccgcctccgctgccgccgcgcagatcttcgagtacaacgggagcgccgtggtggcgatggtggggaagaactgcttcgcgatcgccagcgaccgccgcctcggcgtgcagctgcagacgatcgccaccgacttccgacgggtgttcaaggtccacgacaagctctacatcgggctctcggggctcgccaccgacgcccagacgctgtatcagcggctggtgttcaggcacaagttgtaccagctgatggaggagagggacatgaagcccgaaacctttgccagccttgtttcagccctcctctatgagaaaaggtttggaccatacttctgccaaccagttattgctggcctaggagacaacgatgagccgtttatatgtaccatggactgcattggtgccaaggaactagcaaaagattttgtggtctccggtactgcttcagagtcactttatggtgcttgtgagtccatgtataagccaaacatggaacccgaagaacttttcgagacaatctcgcaagcattgcaggcatctgttgatcgcgactgcctcagcggctggggaggttatgttcttgttgtcacacacactgaagtgcaggagagagtgctgaagggaaggatggactgatgagtgctgccatgtagttattctaggagagattgtttcttcattcgccctgacatactcgcccctgtcctacggcgtacagaattcagagaacctgtgcaccacgtttacttctcattctgaatgaacattgattcagtagttgccttcgcctttaatttctatgctgcttccgcctcagcattttggaattgcatggcttgtggcacttcagttctggtgatggacggcatacctgtttgaccagttaacagggacgtccgtgccgcacgggtttgtcttggaagaatgacagttt

SEQ ID NO: 32794 - DNA, 2523 bp, Zea Mays
acacgacatccaaatcgaagaacacgtcgctgacacaccacctctccctcgccgcattctccactctctggtcttcgccgtggtcggtgccttccaaatccaaaaaaccccaagccctagctgtagccgtcccccaaggtcgccgagatgtcttcgtggctgcgcagcgcggtgagccgggcagtggaggccggcggccgcagcggcgtcgcccgcgcggtcaaggggtacgccgataccgtcgcgcaccacgccggtcaggccgtcgcggacatcctccacgaccgcatgggcgttcagaactataaaagtttcaagaagacagtagcacgattggaagaggctgctgtatcatgccgtgggggtgaaagagttgaattgttgaaacgttggttaggagcattgcaagatgttgatgctgaaaatggaagttcagatttaaaggtgtctgaagctaatgacccttctggtgaaatggacactttgaaagcacaaactgttttgttctatgatgctgatattgatggtgcacctatgaatttttgtgatgtattcttgtacagccaagcacttgaaggtattacattgtccatgattctcgaacctccttctgaggaggaagtttcactgcttttggaaatattcagcatatgccttactggagggaaagaagtgaacaaagaaatcatgagtaatgtacaagacttggccaaggcattttcagaatacaaagatgaagtcctggtgaaacgtgaagagctgcttgagtatgcccaaagtatcatttcaggactgaagagaaatgctgacattgtgaggatagatgctgaaaccctagaattgcagagaaaactagacgagaagcagaaatcacgaggtcaatcacctgaatatcaagataaaacgtcagataagattgctgctgcaaatcttgaggtcttcaaagaagcacttggtgaactccgcttatgctctagagttgaagaacttctgctgaagaagaaatcaatcactcttggtgactccctggagattcattctcagaaggtagataaactaaaggttttagcagattccctggcatgttcatcctccaaagcagaacagcgtattttggagcacaggcgccagaaagaagatgctctcaactttcgtgtgaaaaaagagaatgaagtcagtgtttctgaaaaggaattgcttgatgagattactgaattggaaaagcaaagagatgagcttgaggcacagctgaagaaggttaatatatcactaaatgctgctgctggacggctcaaacaaactagggaagagagggaccaatttgacgaagcaaacaatcaaatcatatttagcttgaaaaaaaaggaggatgacctctcaaaatccattgccttatgtaatgtggaatccaatgttgtcaagatctggatcggtttccttgaggactcgtggaagctgcagtcctcatacaatgaacagaaggataataaaacgtgtgatgagctggagaaatgtgtgagtgattttctaaagttgacaaaacatcatctttcagcattcaaggaagtcctaagccaattgattgagaatatcgaaacatatgtcggtttttacttgccttgtagggaagaggaaaaagaacatggggatgatgaggcatctgagaggacagatccacgtaaatcccttgaagaggaatatctagaaacagaaaagaagattataattgcgttcagcatagttgatcacataaagaaattgttttattctggggaaggggctgattcaaggagagatgacccagaggtcaagagcttaattgaggagattgagaaaatgagggaatcgttcgagtctatagaaaggccaacactaagcatagaatctgagaaagcaaaaccactacctgttgagggatcgaaactgagtccttcacctcttcaggctcctgctaccccaaaagctgcacacgttgactcaccaaaatctcccatgaaacctgagcagcatttcgattcagatgcggagcttgcaaccctgggatcagagatcgggaaagaagacaaagagtactcagttgaggagataagcgggtgggagtttgacgagctcgaagaggaccttaagagctgacacaaagaatcgacaaacagaacacaattcgatttggttatcttcactgacatgtattatttgtctgggccttgcgtgggcaagaaatacacactggttgatatgtacatagtgctgtttgattgtgtattgtcgcgcactcgcgctgtcaatttgtcactgtcttaagatatacggactgagctggtgtaacttgggcgaggcatttgctatttgtttgctcttgccgcgaatatttttatcttacatgtataccgaaccctgttgtaacagttgtaaacgcggaaaacaaaattcgaacatttgacagaatttgctccgtagaacattggattgttgggtttgagttttacattgcattcctaatggatgaatctatcaggattcagg

SEQ ID NO: 32795 - DNA, 859 bp, Zea Mays
cctcaaacaccactaactcgcccgcaggctcgggaatcttttccgtccccgggacgcgcccaacaccgtctccaaaataccccaactgctgcatgtcctgcatgcgaaccaaggaaatcctcgaaatgccgaactccaccgtgtggcccggttttaactccaccaccgccaaatcgctcaaggtatcttcggatgacgaatcggtcggcggctcatttgcagcagatgaggaagaagacgacatcgctacgtaccgtcggcggcgacgtgcggtttgctagacgcgggccagatctctgatgcagaggaactaggagggcaggtgagctggcgtgcggtttcaaaagtttagggttttccggtgcacacaaaggtgagagtcagccgacgccgcgccgccctttttatacacacggcgcgacgcttcgggaaacccgcagtctaacagtgccacgtccatcaaaggtcgcatcaaaaacccccgcgggaccacttcgagcgagagcagcgtctccaccatctagcgacgtcttcggcacgagatgacttagtcgaactggtccctcggagggcaaatgttggggtgaaggcgaagacgctacccttcgcgcaaggcctttgtcgcctcgctacaccaacgaaggcgagatgatcagcacggttgcccttcgtcctctccactgcaagacgaaggccagactccgacgaagtctgctaatcccatgtgttcatctcgcccagaagaccacgtggaattcggcccactgtaacgggtcccgcatggacaagcatgttacgggcctaatctgtaatagcttttctgtaatgacggttgttggggacttgttctcaaatgctt

SEQ ID NO: 32796 - DNA, 1125 bp, Zea Mays
ggccgcatcctctccccccgcggccgagctccacccccacccacccacacgcacacactttgccggcggcgagcaccaccaggacagcaggggctggtgagggggcttcacgtttcagcagtatccctgtctctcatagagagggttcaagcagcatgcctgtacaacacatccaggcttcgagtagtacaccaccggctactggtgagcctcgcattggtatgcgtagttgccccatcgatgtggaagccatcgatgatgatgccgttatctattcttcaagaccactgcctcgagcaagacagcagttgaccacgacagaaagtattactatcataatagatgatgattccgaaacaaacctagaaacagcaggcgatgctcttgacgagcatgtgaacttactgctatctctgggcatagaacgctcgcatgagcctacaagtgcaaccaacaccttccctggaataagcatggtggacacaccaaaagtaaacaccttcaaggtgcctcctgaacctgtgaaggaggttccgaaggaaccgaagctcagctgcccgatctgtatgaacgagataaccgaagcggcgtcgaccgtatgcggtcacattttctgccagccgtgcatcaaggctgccattaaggcccagaagaagtgccctacctgccggaggaagctcactccaagacagcaacaccgggtgtacctcccatcgccttagtagcccagtgcagagtcattttgctacaagttctgccgtgccgggggctgtatgttggaggcaactggggggggggggggggggagcatagaggtcctgtttggttcgttcatttagtgtcataatcagttaacagggtaatctattaccattgctttatgtttggttagactatactgtaaacgattgcagtgggatgcaataccagccaatacaaaattattgccgctgctttttgactgttagccaactccgatccgtctttttggatcccacgttgcaaccaaacatagactggtaaccgttcacagcaaaggatagcaggtgcaataagttccattctcattaccactacctgttgccgaaccaaatagcacgtcttagtgttacgggaaaaaattgc

SEQ ID NO: 32797 - DNA, 2687 bp, Zea Mays
atggggtttaatagaatattaactaacggtgcacctatcggcttattctttggtggttccctattcctttacaatcgtcgtgtcaatcgttatttccggagagatggtcacacatggcggcggaagaaggatggaagaactgttggagaggctcatgaacgactgaaggttggaaatgttgatgctttgagctgctattacgctcacggggagcaaaatccaagtttccagagacggtgtttctggatgctggaacctgcatacgaacacattgtgctggtacaatatagagaggttgatgtggttagaaattattcatcacaactgtcaaatggcctcccagaacctctttcatccttgggatatccaaatgccatctgtggaaaccaataccacagctcctcttctggcgctagcgagtgtagtgagtcccatcagagctattctaatttgagttctgtaactgaagtaagttcctattccggtaacaaagagtacaccaaaaatgatggcggtttactgagcataccggaggttggacacacttgtctgcaacaaaatcggactgataatggtaactcgaaaaataaatctgggcttaatattgctttaaagaagatagctgagcagttaagtttgggtgaagatgatgatgactatattttctcaaatcaagctcattctgtgggaggcgacaaccaagtaaaacatattcaacaagaaggaacacagaaaggtttaagtaggaatatagcgccatcatgggaagatgtactgcagtccagttcaggtttaccaatttcatccatataccagcaatcggatgtcgagtatcagaaaaattcagaataccatccaccagaacgcctggacagcagtgatttacgcatacaacttgctgctgctaaaaagtttcttttaggaccagaagccaccgttgactcaccatctttgaactctgtgctgagaaatagagcgaactgtgtaactgatactatttcagcttatgacagtagatttggaagctctctgaacccagattggcaaacaaaaacagcattaacatttcaaagcaattctcagggctctgaaataacggagttgtttgaccatggtcattttgaacactactccagagaagatacaacattttctttaggacagacaaacaagtttaatattcgtgagatctctccagaatgggcattttcatatgagatcaccaaggtcatcattactggagattttctatgtaatccatcgaatttgggttgggctgtgatgtttggtgatagtgaggtacctgctaaagtagtccagccaggtgttcttctctgccacacgccactgcactgcagtggaaatctcagaatctgcattacttcgggaaacagagaagtttgcagtgaattcaaagactttgagttccgctcaaaaccctcttctagtttcacagacatcgcaccatcttctagacatctgaaatccagtgaagagttactaattcttgcaaaatttgctagaatgcttttgtctgggaatggaaaccctgaagttccagatggtgatccccaatctggacagtgtccaaaacttaagatggatgaagggctctgggataggttgattgaagaactcaaagtagggtgtgaaagtccattaagctcggttgattggattttggaggaactgctgaaaagtaaattacaaaagtggttatctgtgaagctcagaggattcaatggaacggattctatatccaagcatgaccagggtattatacacttaatctctgccctaggctatgagtgggcattgtcttcagttctcagtgttggtgttggtctaaattttcgtgattcaaatggatggactgctcttcattgggctgcttattttggaagctgttcattcagaagaaatacaaaggttgcaaaggtcgcaacatttctcaacatgagaagaaatgcagttaaaatacaggctcatgtaagaggccatcaagtgagaaagaaatacagaacaattgtaagcactgtcagtgtgctagagaaagtaatacttaggtggcgccgtaaaggtcatggcctccgtggcttccgagctgagcagcaatcaatggtcgaagcaatagaggaagatgatgaggaggatgatgacttcgatgatgacgaagcagtcaagatctttcgccggcagaaggtcgatcaagctgtaaaggaggctgtgtcaagagtgttgtccatggtagactctacagaagcgaggatgcaataccggcgaatgcttgaggaatttcgccaggcaactaattggaaggatcaaatgaagtaacatcaatatttgacagtgatttagagttattacttattagggatcaacgacttcatgtaaggagcatttatgtctcgagatctgccagcacccatcaatgacataaattaagtatttagggaatgtgttccagttgctactaattggccgtctaattgtacagtgttagcgaaatcgaaagtagattatttctgccacgatgtattttcactttctgtatttaggtatattttgacaatggcagatcaattaagtatattttttatgggttgttggcttcgccagtttggaaaaaatcagtttctcaacaatggcagaacttcataatgctgttaaaaaaaagacagcatgag

SEQ ID NO: 32798 - DNA, 1993 bp, Zea Mays
agccggaaccaataaagtgaacgtaaaccaaaatcaatccatccccggtgcagaacgcccaacgggcaacggctgtgctgccaaaagtccggaccacagctcgcgctgcccgccgcgccttgcccagacgtgcgctcccttctcccgcgccgtcgcctctgccctggccgacccgctgggcccagtgtgcgcagccctcccgggttaaggcggaggtgcttggggacccgctcccatggcgagcgccggcatcagcggcagcggggacgacgatgcaggagggaagctcttggcggatcgctaccagaagggcgaggtcctcggcgagggcacgtacggagtcgtcttcaaggccatcgacaccaagactggaaatacagtcgcggtaaagagaatctgggtagggaaggacaagaaggaaggtgttaacttcaccgcattgagggaaattaaactacttaaggagctgaaaggtcctaatattatagagctgattgattgtttcccttacaaggaaaatttgcaccttgtatttgagtttatggaaactgatctggaagctctcataaaagataagaacataatactgtctccagctgacacaaaatcatatctccagatgctgttaaaaggtctatcgttctgtcataagaaatgggtgatacacagggatatgaagccaaataatttactcattggtgccgatgggcagctcaagcttgctgactttggtctggcccggatgtttgggagtccaagaaggaacttcactcaccagggttctagtgacattgatcaacttgggaagattttcgcagcacttgggaccccaaaatcttctcaatggcctgacatggtgtatcttcctgattatgttgaataccaatatgttgctgcaccaccgctacgtacattgcttccgatggccagcgatgatgctttggatcttttgtcaagaatgcttacgtatgatccgaaagcaagaatcagtgctcagcaggctctagagcacaggtacttttcatcgttacctgctccaacaagaccatcacagcttctaaggtcacggtggaaaggagatcaagggaataacaagatgcccgatctgaacctgcagcatggccctctggtgctctctccgccaagaaagttacgtagggtgatagcgcatgaatggatggaaggtatgcacagagcagataaagtggacgagcatccttctgggatgaggcacaccgatgacatgcccagtcagaagagttctagaattccaatgtcagttgatgttggagctttgtttggcacacgacctgcacctaggccaacattgaacagtgcggacaagtctcgtttaaaacggaaacttgatatggatccagagtttggatttgcggagtaaaagaaactttgttaacgtgcaccattcttttcttactgagatgttggtttcgaaaatattctttgggagatatttccacagttcactcagagaagaggattgcattgaagccacaaaactgcaccgaaggattctgacacgatcaactgggctgttaccgtcatcggctcacgaagaggaaaactaaggagaggtcattctgatttatcctgagtcgcatggggtattatagctaaccgattccgtaaagaaggctcttagaaacagcatgctctatgccatgcgagtggagagtgttatgtggaattgggggcatagaaacgctcgctccagttagaaatgtgtgtttgtgctaaatgtgatctactagtcctccattctccgtggtttcaatttccttcaattcttgtacggacacttagctttgagcattcttcactcagccactctacgtatagtgatttttattgtaactaagagcagtgattttattgtaactaagggcagtgattttattgtaactaagagcaattgttgtgttctcgaaccaacattcaaaactgaataacacgatatcagcgcaatgtggacgat

SEQ ID NO: 32799 - DNA, 3759 bp, Zea Mays
cgccgtccgccgatgccgagctgcctcctccctggcatcgcgccacgcccaccgccggccgctctccgcagcctcctcctccgccgcagcagaatggcctcctccgggccggcacgcgccttccagctccgcctcaacccactcaccggcgactccgagtggctcgtcgtcgacgaggcggaaacggaagcggaggtggctgcgcctgcgccgacccaccataagcagctccttgccgccacctcctacctcgacatgctcaacgacgcctcccgcaaccgcgcgtaccgcctcgccattgacgccacggtaacggaccccacctctcgcgtcctcgacatcggagctgggaccgggttgctgtccatgatggcggcgcgagctttggcagctgctggaggtgaaggtaggggaagcgtgtcagcatgcgagtcctaccttccaatgggcaaactaacacggagggtactcagagccaatgggatggaaaataaggtcaaagtatttcacaagcgatcagatgagctcggagttggagtcgagcttgattctcgacctgatatattggtaagtgaaattcttgattctgagctgctgggtgagggtctcatacctactctacagcatgcgcatgacatgctattggtgaaaaatccaaagacagttccatatcgagctactacttatggagtgttggttgagagcacgtccttgtggaagatgcatgatctgcacagcaatgaagcaaatgctgaagatggtgtgaggcttattcccagtggaacacaaattgttctttctgtgaagtcacagcaacatgcgatgcaatgtgatgcgctggcagatgaaataagattgctgtcagaacccttcaaagtttttgaatttgacttttcggaacgtccagatagtcatcgtgaaacaaagattgagataaaagcaacagctgatgggcatgctcatgctattgtttcatggtgggtgcttcagttggattcttctggatcagtcttttactcaactgctcctagatgggtgagacaatccagtggtgtcgatttaccacaatatgccaatggttcgaaaaactattgtgattctcacatttatggaatttcccctggatttattcttataccatgcatgcagaactagtagtctattgttacttatataagtaaaaacttttattgacacgacaacacagtgctgaaatgcagtatatgctgtattttaaggaaaaaaacacaatgttactgtgcctgcatgatggtaatgctcatattgcaaactgtactgatgcaacctaatatcttgcaggaggaataattgattttggcatattagatttttgtgcatgatgtattttttaaagagtttgaatgctatttcgatatttttagtgtataaaaatccatttcgaagtagactggaactggcagtttctccatgcgaagctttcaagacttcactagttcatttctttgcctagaaactggaatagaatagccttctagaagggtaacaatattagggcagggtgtttggaatattttaagcttatttacaccatttgttcccctatttcctttatttgctaggcacgaaggattggtgtgatcattggaagcagtgtgtttggtttatacaagggacaggggctcctgcaaagaaagatcaaactctttctttgagcgctagccataatcaaactagcatctcatatcagttgaatataaatgatgaaggaagtagaagccccaaaagtaatcatctaacactgttaccagaaagggtagcactttatggtgataaagtttggagatcagcgttgataagtgtaatcaggaattatacgagcgaaagatcctctccgatctgcattgtggctgatgacagcgtgttcctagctctcattgtttcttttctgttaccatcttcaaaagtcctcgctatgtttccatgtcttagagacagtggcctcaactatcttcaagctgttgcagatgcaaataatttatccatggaccggattaaagtgattggtaaaaaggcatcgtcccttactacaaatgacttaaatcatgaaaaggttaatatgttagtgggggaacccttttatcatggaagtgaagggatgctgccatggcaaaatctgcgtttctggaatgaaaggactctgcttgatccgttgctctctgaggatgcattcatcatgccttgtaagggaatattaaggttctgtgccatgtcacttccggttagcctatcgaatatctacctttcctttatttctttgcttgggcataaagttattctttttgtgctgagaattacgatgatgcaggacttgtggagaagccgtcgtagccttaaagatgttgagggttttgaccactcagttgttaatgatactttaggggcctgtggtgacctgcctggagagcaacaaggcccttgcctaccttattatgtgtggcaatgcggttataccaagaaattaagtgaagtttactctctcatggatttgaacttttctgagcctatccactcttgttttggtgaaacaaaggtatcattttgattcttctggacaaagtatatcgctgttgacatttgtgtctctgctagtcacttcaaatatgcaagatattgagtactagcctaggtgaattctgacggaattgataaatattggaaaaagtctacataatgccctgaccttagtgatatcgaaccttaaaggttgcagcgttaccagtgaaagcaggccagattgattgtatatattgagcaaattttaatgacatcaaacctcaaagcagtatgactagtagaatagtgtccatgtccatgcgcaaatttgatacatgaatgatatttcttcacatgttcagcaagcatgcaagctattctgtcttagttctcccctcccttattactagataaccttactcttggatgcagctttgctctctcacctgaaatgtgcatgtagttttcttgctgttttctccccccagtctcctatgatcccctgtatcctaccatcttgcttgcaggttgagtttgcccacgatggaacatgccatgggttcgctgtttggatcgactgggtacttgacaaggaaaattccatagtgataagcaccgggccagagagcagatactggaagcaaggggtgcagctgcttagcacgcctgtacaagtgaacccagcgaattcggtgatgcacgtggaggcgaatttcgatgctgacattggggagctcacgtttaaatccaccacgctctcatgatgccaactgtaatgtgtggacaaccaagcctcatgcgtgtgttgttcttaaaagttagcatttgtcgctgcgttttgttcgtcggagctcctgatgtgagtcaagcactcaagctcatgattacgtgtgtgttctgtcatgctagcacaagcaactgcctcctcggtggagctgttttttcatggtcttgtttgttagcccctcacgtcgtgaggaagatgctctagctgctgtcaagaatcccctaccaaaacagagcctgccagagcatgtctctggccagtctccctcgaccctctttccttattccgtgtgtatatcattttcccaggtcccctctccgcctcttcctcgtcatttttctcaggtccctcttagcacacaagttcaaggagagaatgcaggctccatccatgtcatgggtgctatttaagttaggtttggcctatttttaactaat

SEQ ID NO: 32800 - DNA, 6738 bp, Zea Mays
atatggagtaagataaggagtataataaaaaaaatctggtgtagatattattagtccaccacagctgtcagccgggttccctgagcgcgcagcgcagcctgtggaccatacactttcacccgccccgacccgtcagtaatcgtgccatgattgcttttcgacctgttcccagggccgatccaagccgtccgtctcctcaccaagcggcccggatccctcctctccggccaccccaaaacacgcccgacgccagcgccaccgaaatcccccaacccatgcagcgcaagcattaccataacctcctcgcatatcggcccgcgctgctgccggaagcagatcggagcagcctcttcggctcttggcgacggatgttgctcgcttcgtttaccacgaccagatctgcgatggcttctgctcgcctcgctcgctacccaccagatcccggcgcctcccccctcgtcgctcaattctgctccgccgcgctgcgatcgatccgctcccagacgacgatcgcccggcgcggatcagcagccgccggggctgctccggcgtcgcgaatggccgcgctcgccgggccgacaagcagcgcagatcgtggggctcgccggcggcaccggcttcggcctcgtcttccgtggggacggcaggcgcgaggcggtgccctgcccgccgcggactgcctctgggagttcgcttccgttacggcacctgccatcctggccgtcggtcgggggctggcgttctcgtgaatcccgtggtgggccgggggcagaagcggtaactcgccgggccagagggccccagacgcaccgccgacgacccccggcgcgggcgcagatcagcgtgcgccgtgacctgcccgccctgcctccgctgctttcgaccctgggagcgcctgcccgcgccgccggggcgcttcgtatcgccgcttctctttttgttccgcggctcttcctcgccggcaggcggccggctgctgccccgcccacgccgcgtctacgtgtcctcaaggggctgggcgctcttgcctgtcaaacctggtgccgcctccggttggaaaccgtttcttacgggttaggagcaggaggtcagagactccccagagttggcttcgccgcgcgcatgcgatttgcggcggcggccgaagcctcgtacagccgccgctgggacgacgacgacaacggcgacgtggatgcctccgccgccgccggatcgaagggactatctataccgggagggccgcaggcacgacggcggcgtcggcgactcgctcctgccgcctgcccccacgccgccgcgctggcgggactcgccgtaccacccgccgccgccaccgccccttcgggaccccgcgcggccctcgccgcgccgtgcgccgccgttggcctcctcagaaggctactaccgacagggtggcggcgcgtacgaccgttcctaccctgatgacccgccgtctgtctacacgccgtcgcgctcggaccggtactggccggaagacgacgacgggggatacaagggtttcggtcggtatggcagcggtggccgcagggacggccgtgacatgaggggttcataccggaagtccccatacaggggcggctacggaagcgacttctccaggaaccactcagagcagccccctccgccaccacccaggaggtctcccttgaggtcagttgccgttccgatctgctatgaccctccgggcaatagaattaacagaggggacagggacaacctcccacgggtgacaccatggcggagaagggagagcagatctgaagtagccgatgctgatggaccgctttctgttggccaaagtactcggctctctgcttcagggaaggaggcttcagctcagcctctggccgcggcaggtcctcacgggacggaagacgaggcaccaaggaagaaggcacgccttggatggggtcagggtttggccaagtatgagaagcagaaggtgcagggtccttcggatcccgctgaagttgttgctgatgtaagttcaggtgatggcgaacagaagacctcccttgcgcctgcgccttctgttgcatctgtatttcctgctgcaccactgcctgagtctgcaccagcacctcctgctgctcttgcactttcgtctgctcctatgcgatgctcatctccagttactgcaccgccatattgttcctcagcacctgaagataaatcatgtgaaatgacaccaaatacggtcactaactctactaaagatgtcttggaagctgatgtacatgtaagctgctccaactgaaggaaagcatttccaaggagattgaaaagactgaactccagattgattcattggaaggcgaacttaaatctgtgaatactgaggctgtaactactcttgaaagttctcccacaggggtgacacatacagaaaatctgtcaccttctggtgggacatcaaaggttcctggaagtgccgagatctgtgatacatttgatatgataaaagaaccgggggagctcattgtttctcctaaggtacctgtggtgcaggatgctgatgtcaaaggggtcgatatgatggaggttgaaacagctccagttcgcaatgcaaaaacagttccttcagaagagagtgctgtaactcctggagttgctgagggtaaggcatgtgcagctgctgatcttagctcattgatagcttctgaagaagctgggtctcaaaatgatattgacaatgacaggccgaaaacttctttgtgccatgctgattccatgaaaattaaagttagtgatgaactaccagtgaagcaatggacatactgtgatcatatgtctgatttacacagttctttcacatctgcaaataatgatatagccaaagaaatgaatgaggtgctatttaaatcattgcctgctggtacatctgcccttgatttgttggcatcaagtgatcttcttagccaacggaagattgatttgattgtcaaagaaagacttggagtacgtaaaaccaggctgaggttgaaagagcagattcttacaatgaagttcaaggcatatcgtcacttgtggaaagaggatgtacggctactttctgcaaagaaacagcgattgaagtctaataagcgcattgatcagaataaccgaacatctcaaattggatctcagaggcaacgcttttctaaccgctcacgattagccatgcctgctgggaatttaagtacattctcaactccggaaatgtcagatgttgcaagaaagttgttttcagaatctcaaattaagcgctgcagaaactacttgaaaatgcctgcactgattattgatgagaaagagaaggaacacctgaggtttctgaccaagaatggactggttgtggatcctgttttagttgagaaggaacggatcatgataaatccgtggactcaagacgaaaaggaaatttttatggagatgcttgctaaatttggcaaggatttctccaaaatttccagtttcatcacacataaaactactgcagactgtgtggagttctactacaagcatcataaatcagacagcttccgagaagtgaagaaactgttggaccttcatcaacagctgcctgccagcaattaccttggagcgaaatcaggacagaaatggaatcctgagtcaaatgctgcttctcttgatatgcttggggtagcatcagctgaagcagcccatgaccttgaatatgcaaacaaagtggagaaaatttctgtgaaatccctcatccggactgcatatgggtccaatgtttcatttgtgaccaaaaaatcttctgataaggagtgcattgacaatgtgcctttgcatgagagagaatctgtagcagctgatgtactagcaggcatatgcggcactccttctcctgatggaatgggctcatgcattactagttctgctgatcctggcctgaagatcagcatgaaaagagtggagcatgtcttatcccaagaaaatgacaaaaatgttaatgaggaagaatctctctctgatcaagagtgtgaatttgatccagttgattggaatgatgatgagaagtcaattttcattgaggcaatgaataactacggaaaggatttttctcggatctcgtcttgtgtgaagagcaagtcatatgaacaatgcaaagtgttctttagtaaggctcggaaatcacttggtttggatttgatccatcaaggggcagccgatgttagtatgccagctagtgataccaatggagggaggagcgatactgacgaggcctgtgctgtggaaatggattcagctatctgtaggaagcagtcttgttcaaagattgtgcaagatgtttgtcctactgaaggagccattttagggcctgactctgttttaatctctaagcagacagaaggagatatatcaaataggtgcattgttgatgttaaaattgaggaagatgataaggaagctgataaaaattgcagcaatgttgatgataagaggtccagtgatagtactcatcaagctggccctatcaacatcaattgcccagaaagtacagataagctgcaaggaactgatgatgccgttgaccaagtaaacatgcatagtagtgtcctcaactcttcaaatgagcatgcaatggccatgcactcagaagtgagatccagtttacactctgtagatgtacttcaaacagacaaagctgaaggtactggtactgatcctagccaggtggaagaatgttcacatcatgctgtctacacaccgatgacagctgggaattctggttcctcagctttcttaacttcagatagtggtatcaaggacaatgttcacatctcaaacatgtctggtgcctccactgttagtcctgcattcacttcaaactatcaacattctctgccaggagatatgcccctgtcgaaaccaaagccactagtaacctcccttaccccaaaggatttaatgcctgtgcagttcagttcagttcttcctgatcccactgcatttcgttttgagggcataaagcccaactttgaggacagcagtggcaacaaagtcagcagtgccctaggagctaaagacatttgcaagtacccagcttttaaagacccatctgataatgagcatgacacattgtttcgtaatattgatggttatatgaataatcatctgacaactgaattgccagttttttctcaaagaactgcaagtggcactgtgagtacttcgcagacaaaattccagaatggcaggtccagcagcgtgtgccttccaaacagttctgaggggattcaatggcccaggaaacctgaagaagtaccggaagattctttgaggccttgcgctcgcaatgcaaaaactgagggtggtgagaaacaaaagcgacctggtgatgtcaagttatttgggcagattctcagccatcagccaaccttgccaagttctggctcgttgtgtaatggtagccagagcaagcctccctcaccaaagattgacaaaacatctgtgagattgaccaacaatccaagggatcttgtagttttttcttccaggcctggtgtcagtccacatgtgggtctggaggaaagatcagtgaggagctacggccatctggatggaagcacgatacagcctgagcctctgctggtgatggcgaagtgccagagatccttggccagtgtaccattttactcggctaagaacagcacggttggcgtgtttccagattatcaacaaccttcaatgcagccacatcaattagatcccaagccgctggaaatgttttctgattcgcagaagaggaatgggctggaactcgtctcgggtttcggcggtgctggtatccttgttagcaacgtctcagaccatgtggctgctctcaaggctcggtatggtcccggttctaagataatgggcagtgacgcggatccttggaaagacataggaagcagcaccataccctttggtagcttgacatgtcaacagcggcccagcgccaccgtgggctcgttagaggtgattaccaggtgttttgtcagcagggtttgatgttgtcagtctatggaaattccttattctcagtatcctagtatgatggatggagttttggttgagatttgtccttgcattggccgttgtttcaacttcttctgtcagcatttctacgggtttatcacttgtgcagctgtgtctagatgcatggatgcactgaacattggctggaaggacatcgactgtgtttcctggtcatcctgtcctcgaacgtgtagggtttggtggtcctggtccagcagcaacagctactacgccagccatgacattgatgctttgctcgcttcgatcaaatcgtgtcagatgaagcctgaagatgatccacggccgctgtagcttgtagcttttttttgccgtttttttaaagttcctgacttcaccttggctacctgcttgcctctcacaatgttctccatcactagctacacccaccatccatacaatctcctccatcgtcatgcccaccatcacattgctctggcgctctggcaatgtacacttttttatgccacctcactagacatcattttaggtctgttccatcagaacctcaaacaaccccagcctaacacatgaactcaatccctaattcgtggggacgtcgaaccacatatgtagcaatttctttagaagtttttatgtgtgattttcaatgattacacatgaactcacggagcaagcaagaaaaaaagggtgctcacgataatgaag

SEQ ID NO: 32801 - DNA, 2599 bp, Zea Mays
cacactcgtcccttgccttcccctccgtctccaatctcccctccaccgttcgacgctctccccttgcttctcgcgcacactaaccaattcgagcacccgacgccgcggccccgatcgaatccaccggagccgcccgcctggggcccgcccgcgccattgctcgaatcgggaggcattcgtccgcccgcgctgctgccccgcgccgtggcggtggcgttggcggtatgtacgaccgctagaaggagaggaggaggcggcattagtggtggggattaggcggcggcactgctggtgccgggaggaggaggaggcgtagcccatgaaggcgacggcgccgccggcgaagcggcggaggggcccgcggctggcggtgctggcgctcgtgttctgttcgctgctcgtgccgatcgccttcctcttcaaccgcttccccgccgtatatgtgacagatgagcgccctcagcaggagattgacttgccttcgttcgatcgtgtggtatttgaaaatggtggctctgtaaatgaagatgtgtccaagaagacttccaggagcactagtgtgtcgcaccgtggtattgatagtgacccttccatagttagcactaaaccaaaagctatagttctacggcctccaaaaattgaacaggtcctcccccctccaaaagttgaacccaatccagaagtgaagccagtacttgtaccagttccagttcatcaaaacaaaaaaattaaccttgacaagattaggcctcccagagttcaaagtgctgatgaggtggaaaaggctaaggcttgtcaacttgagtttgggagttactgtctctggtctatagagcacaaagaagttatgatagataccattgtgaaaaggctgaaagatcagctatttgtagcccgatcttactaccctagcattgcaaaacttaaaggaaaggagacattgactcgcgagctgaagcaaaatattcaagaacacgagagggtacttagtgaatccattgttgatgctgatctaccatcctttataaaaacgaagctagagaggatggaccaatcaatagcaagagccaaatcatgcactgtggattgtaacaatgttgacagaaagcttcgtcaaattcttcatatgacagaggatgaagctcattttcatatgaagcagagtgcatacctatacaaccttggtgttcacaccatgcctaaaagtcatcattgtcttaatatgaggttgacagtagagtactttaaatccatgccattggatccaaatgactcttctgcccataagtttaaccttccagacaataggcactatgttatattatctaaaaatgtccttgctgcttctgttgtcatcaactcaactgttagtagctctgaggatactgaaaatgtagtatttcatgtactgactgactctcaaaatttttatgccatgaagcactggtttgcaagaaactcctacagggaatcagctgtcaatgtcataaattatgaacaaattatttttgagaatttccctgagtttggaacccagcagttatatttgcctgaggaatttcgtgttctcatcagtagccttgagaggcctactgagaagagtagaatggaatatttgtcagtgttcagtcactcacatttctttcttgccgaaatattcaaagatttaaagaaggtaattgtgttggatgatgatgtggttgttcaacgtgatatttctttcttgtggaatcttgatatgggagagaaggtcaatggtgctatcagtttttgtggtttgaaacttggtcaactgaggaaccttttgggtaggacaatgtatgatcaacagtcatgtgcatggatgtctggggttaatgtgattgatttggacaaatggagagaacataatgttacagagaattacctgcaactcctgagaaagtttgggaacaatgatgacgaggcctcactacgagcttcagctttgcctataagtttgttgtcgttccagcatcttctatatccacttgatgagagattgattttatctggacttggatatgactatggaattaaagaagaacttgttcagaattctgcatcgttgcattataatggaaatatgaaaccttggcttgagttgggtataccagattataggaagtactggaagaggtttcttacacgagacgagagattcatggacgagtgcaatgtaagtccatagtgtgcttgagcttgggagccgaatcatttttgacagtagatttcagtctactgctgtactatatactaagaggaccaacacttgagaaaaacctgggaactgggaagcagtcactagccatcaattttgacagagtagatccagcaccatctgttcattgaacttgtgagctcgatggatgggtttttctgcagttagcggggtttagttaagttcgaaggataatgcagtagacaacgttggtcacgtgtggtggtgaggttccaagtaagagagagcatcacactcacgtaacaggaatgatcattgatggattgaggcgccttaattgaaattggtgccttccacctcatggatgcagcaagtttgtatcgtgactgggtgtatccg

SEQ ID NO: 32802 - DNA, 2913 bp, Zea Mays
cacggactctgagtctctgacgctgccttttgctctccccttccaccccgtctgcccgcgcgcgctgtctcgtggcgacaactgggcgaccgccgccgccgtcgctgccgccgctacgccaagaagctaggtcttcatcggtcccttcgtcgagattttctccggagacaagcacccagcaggggactacaagattgattttgatggattatgacaagtctagaagaagtaactccaaaaagaggagacattccaattctgatgacggaaagaggaaacggttgagctctaggcatgatgacacatctatgtcctctgagccaattgaaaccatctacaggatattgtgcccggcaaaaaagataggcagtgtcttgggaagaggtggtgacattgttaaggcccttagagaggaaactaaagccaagataagggttgccgattccattcctggtgcagatgagagagtaattatcatcttcaattaccaaaatcaacctgaacttactgatgaagcagctgaaaaacaaattagtgatggcttagggaacatgaaaccccattgctttgcccaagatgccttattgaagatacatgataagattgtggctgatgaaatttatgatgaagtcgctcatgatgaaagttctgatgatgtcactgctcgaattttggttcaaggcaatcaagttggctgccttctaggaaaaggtggctccattatacaacaactacgaagtgatactggtgctgggatccgtgtcttgtcatctgaaaaccttccccagtgtgcacttcaaagtgatgaactggtgcagatatctggagcaccatctcttgtaagaaaagctctatatgaaatatctactcgtctccatcagcatcctcgtaaggaaaatagacctcttgaacaaataatagatgcaagcacacaaaggaaacacgagtctccaacactgcaacatgaaaatccaatgttgccgcacctgcatagtcatcatccacctccaatacccctgcttgacccatacagaagtggacctcagtatcctgttagtgaaactgaagagttttctatcagaatcctatgtgcttctgagctcattggttcagttattgggaaaagtggggctaatgttaggcgggtagagcagcagactggtgctcgcattaaagttcaagagattgacaaagatgcttctggagaaaggctgatcattgtttcatctaacgagataccaactgaaccaatatccccaacaattgaggcactcattttgctccacgataaagtgggcaggtgattactgaaatgagaagacgaactggggctgaaattcgagtttactcgaaggcagataaaccaaaatacttgtcttttggtgatgaacttgtgcaggttgcagggcctccagctattgcaagaggagccctcacagagattgcttcgaggcttagaactaggactttgagagatacaagtactgccaataatcctccaccttttgccccttccgatgatcctactgtcgatatgcctagcagaaaattaacactatatggagggcctaccaatgatacaccgtatggaaggcctgccaatgatccactgtatggaaggcctgccattgatccaccatttggaagacctaccaacgatcgaccatacggaaggcctgccatcgttccaccatttggaagacctaccaatgatccaccatatggaaggcctgccaatgatccaccatatgaaaggcctaccaatgatccaccatatggacgaccttccagtactatagcatatggaagaccaaacagaagtgcacctcgtgatccttcagatgcatatcctgtagactacttctctaaaagagaacatcctagtggaggccctatgtttactagtaatgccccatcagctgcttatgagagatatgcagcacccacacactttcctactagagaacctccctcaactttcagtcatcgttcctatcgtgaccacatgcctactgatagctactctagtaggggtacacagaaattagacatcacgagagatggaaattcagatgcttatgattatacagaggctgctggacaaattcatggactggaggactatagaggactgccaagtgcttctgggttctcgagcactattgaactaaggattccaaatagttctttggagtctattgttggtgttggcggggtcaatttagcagagatacgtcagatttctggtgcaagactgaggctacatgaggctcatgctggttcttctgagtctgtggtggagatccagggcacactggaccaagcaaaagctgcgcagagcctcctggagggctttatcagcgcgaacagcaggcagcagcaatcccattcttctcgcatgccactttacccaagatggggatagcttctggttgtggcaggggaaaaccgagtcagcagggttggctggagttatctcagactgcagattagatgcatcgatgatgttaatggtagctgtttaaattgaccgtgcaagcatgataacttatattatgccataggacaagtaatgctgattctctcatgaaatactaagtgacaagctgtctctgtagttgtatttgtttctgaatgtttgaaccctactgttacaacggctgctattttaggtcagatttcagaggccggataattatgttatctgcagagttgggccaaaaaaaaaagctcaatctggttgagactggcttcacccatgccgtttcatttttagaagttacagcatctctgcaaaatatatgggtaaggcctcttggaacgcatgaatttcatagaaatcagtttattttctcagaaaaaacatgggaaacaggggaaaaaaatcccacgttccaagaggcctaaagtttg

SEQ ID NO: 32803 - DNA, 241 bp, Zea Mays
gcccagcccccatccgcttccctcccggcaatttcaagcaatctttgactctcttttcaaagtcctttatcatctttcccctcgcggtacttgtttcgctatcggtctctcgccctgtatttagcccttggacggagtttaccgcccgatttgggcttgcattcccaaacaaacccgactcgttgacggcgcctcgtggtgcgacagggtccgggccggacgggggctctcaccctcccag

SEQ ID NO: 32804 - DNA, 219 bp, Zea Mays
cgccaccctccccccattttcccttggttggccaccccctctcctcccatggcagtcgcccaccatttcttcctcctccctagatctccccctcccccacgcagcaaggatcgagaagaggaggagcaagatggattgaagaggaagagaggatcaaggagatgttctacccccccatctattgcagattttcctggggaaaccctaggtaaggatggg

SEQ ID NO: 32805 - DNA, 1409 bp, Zea Mays
gatggaagggtcacgaaaaaccaatttcctttgcttcctggagcccaaatgacagaatgctgctcacttgtggtactggtgaatcattaaaactgtggaatgttgatactggtgaatgtaaccttaaattcagaggctcagcagactgcatcatcagttcatgtgcatggtttcctaattcggagaaaatagtatgtgccagctcggagcctgcaagtgctccaaataggatcttcacttgtgatctagaaggccaaaatctggaagtatgggctggagatagaataccaaaagtcagtgatctcgctgtgacacctgatggccgacacctaatctttgtatcttgcaacgatatctggattagggaacttccaagggggcgggaatggagatttcgtgagaagcagacgatttcatctctttctctctcaggtgatgggcagtcactcattgtgaaccttaacagtcaggagattcatctgtggaaaattaatgaaagttgtactgtgcctgaaaagttcatggggcacaagcaagacaagtttgtgattaggtcttgctttggtggttcaaactcttcgttcattgctagtggcagtgaggattcacaggtctacatttggaagaggcacgtggagatgccgattaaggttctacatggccacacgatgattgtgaactgtgtaagctggaatcctgcaaggccccacatgctggcttctgctagcgacgaccgcacggttcgaatatgggtagggcgcaaaaatgcaacaaagtaaacgctgttgaagtgtgaagttttgtatgtctgtgtaaatagttgtacatctggactgcatccacaaacctgtttgggacaatgctctgttcttcacccctgatgaatatgtcgtcgtagctatttgttcagaaataaacctgcaacagccataggtagccggtgctgctgtgtccagatgtgtgcctggctaaccggtgagttttgacatgtgtacaggacaaagatgcatcagaactttgtacatcttgttagtatatgccttggacactcgaagtgctgaaatatgccttctgttgctgtggatctagtgttcgtgtccttttatctttttcgcttggttcatgtgctatcttgctttttgtttagaataccccataacttctttctgatgtccttttcaggtgactttgcaacctttggcatggtcaacaaatatgtataagatttgtaacagcattataattggctagaatcgtgcactagcaaactgtccagcacctcttagcacattttatgtacttgtagttttgctagacagttttggggtgatatcttttcacccttgagagaggggatgaatagatgatattgtaaattttgctcaaaacaacacaaacttggtttataa

SEQ ID NO: 32806 - DNA, 1766 bp, Zea Mays
ctcgtcgcctggcccgcccggcggcggcggttgcggggtctaaaaatgtttcaaaaaaaagagtattttggaaccagcgctgccaaatcaggaaacgggcacgacgcgggcggggcggggagccaaaatggcgctcccgggcccggcggcgacccgcgcggcggtgaggctctgccggatcgcggcgagcgcttcctcgtatttgccgtctgcggcggccgacggaaggagggagctggagctgccgttcgcgctggtggcggagcgggggatggtggtgggcggccaccgcgggatggggatgaacgcggtgggggcaccgcccggggcgcgcttcggggccgccagggagcgggagaacacgctgctctccttcggccgagccgccgcacatgctgccgtcgccttcgtcgagttcgacgtccaggtcacaaaagatggctgcccaataatcttccatgacgatttcatcctaacacaagggaccggggctgtacatgaaaggcgtgttactgatcttctcttggaagatttcctctcttatgggccacaaagagaatcttgcaaggtctccaagccattacttagacgggcaggagatggtagagtccttaattggactacagaagatgacgattccctttgcacattgcaagaggcctttcaacgtgtcagtcctcgcctgggatttaacattgagctgaagtttgatgacagcattatgtatcacaggaaagaccttcagtgtgctcttaaagctgtattgcaagtacagtcttttcccctacttcgtatagagctcagttgtttttgagcatgctaggaacagaccagtctttttttcatcgttccatcctgatgcagcacagatgatgcgggaactccagagcttgtatcctgtacttttcctaacagaaggagggacatcgaaacaccacgatccaaggaggaactcgtttgacgacgccgtccgggtatgcctagagtacgatctgcacgggatcgtgtcagaagcgagaggcgttctcaagaacccatccgcggtcgccagagcacaagaatctaacctcgcgcttctcacgtacgggcagctcaacaacgtgtgggaggcagtctacatccaatacctgatgggcgtgcacggcgtcatcgttgaccgggtggaggagatctcggacgccgtggccggttttggtctggggaaaccaggccttggccggggcggtgctggcgtggacggagcgaaaacgcatcaggctcaggccttctcgcagcagcagctggggttcctgctccggcttatccctgaactgattgagcagcggcactgaaggacggtacaccaccatatgtaacatcccagtttttgacccccctcgaagcggatggcaagcattcgcctttggggtcaacacttctcctgactgactgactggcaggtccgatttgacagcttaggaggtatacttgtgctgcgtgcacacactcttctgtatagtctgaaaactcgcggttccttgttggttcagtacagttacagccgaccatggaccgtggtcgatctcttgttgtttcaagtaggctcaccagaaaaaggtcagcaatatgtattgttggaaacttgtatgattgtgacgtgtgttgttaacaaccagggatgaaaaccgtaaccgaagtctattgtttccattaaagagaatattcttcgtatagattttggatcctgcccggatacctgtcttaggaagcgcaaaggaagaaagcaa

SEQ ID NO: 32807 - DNA, 2437 bp, Zea Mays
gcgcgggcctatatagccggcaccagcagcgcccccttgttcctccccgcgacgctcgcctctctcaccatccacccacctcgcctcgcatgtagttgtgtggccgccgtgcggtgatcgcggcggcggcgctaagctgttctgcaggccacacgccggcggccgcgctgactggctatcgatcagccggcgggcgggcggcgggcggtgacagaagagagtgagcacacggccgggcggaacggcaccggcggatgtgccgtcgcggccgcgtgctcactgctctatctgtcacccactccccctccccgttcctctcctccggctgccttgccggtcgatcgaagccggccgcgctgtgcctgtgcgcagccgtcgtgatcaccgcgcctgtgcccgcggcgctggcacgctagccgctagctacgtccacccgccgctcttcttgtccgtgtcattgtatgccgcggaacgggtcgccgctatacgctacgtggcctctcgttggtgcccggcggccgtccgcgggaatttctatttctgggcggttcgtacgtacggcctggatgccggatctgagcttttgggcgcgcgcgtgtacctcctcctcgcacggattcgggattccctcccattcgcttggtacggacaagccgctgctagccctgttcattgtttccgaggaaagggaagggatccaaccgttgcctgcgcctgcaagcttctcgggaagaagacgctggtgacagaagaattccaatggaagcacaccgccggtcgattctctgtcttagatctgcttagcatcgtcacattgttctcttttctccttgccagggtcagtggtacccccgatccatatattcagagatttaacaggagatggacgatagatggcgctgcagtctgcagatcctgttcatactgtccgtcctgtgtgacacagctagtctctgcagcgcagccactttggcgatgacggcacatttgtgctccagcctccagggaatggtggattggtggtgggggtcgctgtccagccactgttccattcgtgacgtctcgtacttatctcttcaatgacagtgagctgcttctttcttggtgaacattcttgaaaacctttgattttgaggggtagtttcatcacgatatttgtgttaccacatcaataggtataagataaaatgaagaatagaatatatccttttaataaatagttttacggcacaattttatagactaacatgcgaatctaaataaccaatagaaatagatgaaacaaattgctttaatggtggtttcacgcgccttctaataccttggaaatgtgttaacatagtctcatgttaatgaaactattttcatttatttcataataaatatagtgctatgtcatgaaaattctatgcagtctactaattaatatcatgcaacctcaattgagaatgatctaagagcatgtttaataatatagcatataacgcgctttatgatattgctatgtcatataaccaactaaaaggttgctcatataataaccacctcatgatacaagctgtatatttaatatttggtccacatctctttctcatagagagtcttggagtcagtgagtagctagcccactctcagctggtagtgagcagctcgctttttctctaccctcaattgtttttcttccacatcaccataaatctgatatggcatattttatcgttcctctacatcagcttattatacttcctctaacaactatgcccgctagagcatataaatttcatcaccatttattatctatactattattaagattgtagtgtagaccatggcacaaccatgcctccgcctctccctccccctctgcagcctgactgggctccaatccgctaatgacgtcgacagcaccgctcgcccgcccttcttccccgcgtcgctaccccctctgcgctcctgacccgttaaccgcacacggactcccctattacaccgatttggcaatgccgatcctgaacccgaaccctggggttcgaggctcatcaatttctaccaacaatgtcgacaacgccgctcccctgccccttccctgcaccccctccgcactcccgacctcattaaccgcacactcactccccgattcacgtcgcacacacgtcgatttggctatgtcgatccctaaccccgaacctcgggttcaaggctcatcaatttccgccaacgacgtcgacaacgccgctcccccgcccccttccccgtgccgcctccccctcctcgctcccaacctcgttaaccgtgctcgcattcctcgattttcgtcgcactcacgccgatttggtaatgctgaacccctgggttcgaggctcgtcaatttgtattccgtggcatcacacggacacacacacctagtagtggataaaatgcttaatttgttaggaat

SEQ ID NO: 32808 - DNA, 1819 bp, Zea Mays
ctccatggcccgacaccaatcctggtctcatcccttctggattgaaccctgctgtgatgcgagacagcgcaatgctggcggcgcgggaggcgaataagcggccgcgcgcagcgccgacgacgaccctccccattgccttctcactgttctacaatgagtatgtcattacgagatcatattagaaagaggagggaagaagaagatgatgacatgatgttgtttattttccctgccttatatctgatgggttcaactagaagtgggggacaaaagaagaaacgccatacatcagatgagacaactccgtatgtgtattgtcaagtattgggaagacaactccgtaggtaagctcacaactctgagggtaaaacagagttcaggaagctattgttctttttcgttggcatttcaaaatgatgatcaaaagtcagaaggcagcatggaattgctgaattcagtgaaagctatttcgatccatcctctttccaataacaagtttttggtactggattcatctggagtgttgcatgtcttcattttttcaacaacacaaatggtctcaagaggtgccatcaagcaatgttctgaaaatatccatacatatcgcttgcattatcccatgaaagtgcaattatctgctgtcttttcagttacctctataaagtgtttgtgcagagacacaatttttttgggtttcagatggtggacatactgtacatgttatgtccgcagttgagactgaatcccctaacggtgataatggagacgttactggagaaagagagttagcacctatcaagctttcagctattgaagcaatctttacaagcgaaagagttgaggacattgtatctatctccaaggattcagttcttatccttggtcaaggcaacatgtttctgtatggaacttcttgaatttggttctttatcatgcatggtaagtataatcaaatcaccgtttttgcgtgttactaacaacaattgcttcagcatacgcccttgagtttcatttgatatcaggtggatacctcactgttctttagggcatggttcaagactttgcagctttggatggtcttttggctaaagacaggatgagttttggtgattttgaagatgaacttatccaccagtccttgaagtcgtgagctttactatttattaatcacagtaagcagatgaaaaaagctcatgttttttcagaggacagcaagaatctgaaggtgacgccagattatggacggaccacgccgtaatgaccctattgctctgcatgcgtactttacatgcaaagactggcacaattcttgttgatatgacttggaaagagcaatgctgccaaatctattcccagtctcagttgtcgtggaaagtggatcaccatgagggccattcagctatggaataatacagctggtgctagactgctagtgtaattcagggactggacttgcggtgtggtggagtcgaggtttgggcatgttacttactgcatactacctctgttcttaaatatttgtcacccgctagtcatttttgaattaaacggtgacaaattaaaaagaacggagggagtatatcaaaaaaggaataatgtagtactcttgtaagagttaagatggaatgttgaaaggcgcgactttgagccattcttatcattggttttttattgctgtattttttttgtgacattccactattccggtatacccaaatcattcctggttggttgtgtaatcacgctttaggctgtcctcactggtaagtggtggaccccccattttagtgagtgctcacaacttgacatgtttattgga

SEQ ID NO: 32809 - DNA, 1937 bp, Zea Mays
caaaatcctatttccctctcccacaccacgcgccgcgcctgtctgattctgcccgccagccacgcccgcagatctcgcttcggcgccctgattccgtcgtatgcaaggtcacagccctgccttccatcgtcgcccccatgccatggtccccttctatcctcgctcacttccagccgccaacggaaccccccgcgtacgtttggcagaaactgtagagaccgtcgaagacgggggcagtcctcgccgacgctgaagtgcttgagcgcgcggatctgatcctgctgcgtttcgggggtgacggaccggaggaaggagacgtaatcgtcggcgtggaagcggcagaggtcgcggtcgcgggcagggtgagggcggaacacttgcatctggtcgaggaggccgtagcggccgagcagcgcgtgggtcatgcggatgcggtgcggcttcatcgggtggcaatgctcgtagtagcagttgcccacctccacgtcgtagaagtagcagacgcggcgcttcgacccgtccgcgccagtggtcggtagggagttgccgccaccgcacagcacgacagagggtgtgtcagtcggggcgcgagcaccaactttgcatccattaactgctctgctcagagcatcaggtgcgcttcagcgtctagccatttggcggcttgggctttctgcggttgggaggaacggagtcttaagattagcgctgtcggtgtcgtccttgaggtggacgtcaacggcgaggagctctttttcgttgataagattggcagcttgctgcccacagcctagcggtcgactctctatttttggactcactgttgtctagccgcttgtttcttgtggacaccttaccttagccttggcgatgagtgatgcttggcagcttgccatatcatatcctgttggaatcgaacctgcttctgattcttccttcttgtagtttacctctgcgcgtccctgctaaccgttccacatagtatcacaaaaaaatggcactaccttggcatcgtcttccccaattcgggtgtatggaattcttggagcaaaggaccagcacacggtcacctccaaagaaagacccaggctgcttctacaaggagctgtacaaagtgcttcacgactgcagattttggatgagatgatggataatggttttccactcacaactgagccaaacatcttgaaagagatgatcaccccacctaatattgtgaacaaaatgttgaatgttgttactggcaagagttctacccttggcagcaaacttccagatgcagctgcttcttttgtaccttggcgaagaacaacagtcaaggatgcaagcaatgaagtctatgttaacatagtcgaggaacttgatgcatatgtgaacagagagggggttcttgtgaaatgcgaagcatacggtgaagtccaagtaaactgcagcctcccaggatgaccacatgtaagcaataggtgctgctaccagcaaaaaggaagccagaggccttgctgctggaccaagattagtccaaaggttatctggttttggggaccatcgatctgcagacaatgtggcaagagtggtagaggaggagcttgcacatgcctctatggtttgtattgatttctcaaagaatgccaagtgatgggtcgtgaaccaagcaatactttccaagacttgataaaggagtacgaagttgtactgaagggtccattcaactacacggctcgtgatgaagctggtataccccgagaatggttcatgatagattagcttgtattgttgagatggaaaaagagaatgcaagtttggtttggtaaaaaaaatgtattggtgaaagcgaaatgtgcctttgggccatttctaagtattttggtgatttagtgtccaacacaagtgtttaggtgttaatctatgacaagtgatggactaagtgcaaatcaaga

SEQ ID NO: 32810 - DNA, 845 bp, Zea Mays
aaccctaataacatttcctactcctgccggatcagactagcgagccaagccaccgacggccgacgtcgagcctccgcggccgagcctccgcctagcaccaactccgtcgtcgatcgtcctatgcgaccacgcccccgtccgccttccgtctcctgcctccactgagtcgcgggcgcgacatcggggaacgccaaggctgagcttcgcccgggccaggagcttctcccggcagacccacccccgcccaacggagctccatgcctccgcccagggccattgtccgagctacgccccacgctcctgtccagtgccctggccacttagatggttctgctcagtcatgtttagtgtctggttcaacaacttcaacttcaaccaagggacgcatctatcacaagacgtatggttgccaaatgaatataagtgacatggagattgtgctttctatcatgaaaaatgaagcgatacgggtctgccatctctatatgacatttggctgtaaatggattatgatcatagttgaataagttggagcgtcaggtcaatggtccccccaataattaaactagatggtggagtggagctttgttttgggatgatgcaagcaacttttatgtttcagaacattgtactcaactgatgcttgtggccgttgaacctattctacttacttttggatttaagttaaggatagttaaaaatatttgatgtttaatacttgtgttggatgttttatgtgtcaattctatgtggatgctagaaaagttgtgtacactcatgttatttgatgaaattgtatgcacgatttggtttgaattcaattgaatattgatttttattaatta

SEQ ID NO: 32811 - DNA, 2247 bp, Zea Mays
gctgctccattctccatgactgttctggaagctccaagcgttggcgaaaaaagtaagatatttctgcgaggcaaggaatccctcccccgcttctactctttcggttcgccggttcgccgtctcgcacacccacttcctacaccgccaccgagcactcgctcagtttcatacccatcctcgaagtcgcctctgtctagttcctgctcttccaccaccgcctgtgatgtatccccgaggcccggatgggggacgagatgcctcgtctcgccctatgcttgccactcccgccggcaacgacacgcgcgaggaggatgagatcaccaccgcggaggctcatgtggagaaagacgccgcgcggatggacgctgccctcctcatgcggactacgcccaagatggacgagtttcacaccgggggcgatctggactcaagtggaagtggaagcggcatctcggggccaagcgcctccaaaagacagctacaaagaaggggatcgtggcggcaacgagtcagcaggtccagcatccatgcttatccttttcctttgtgtttctatttgatctgtttttttgcccgcgccagcaacagagaagaatgtggtcgtggctgtaatgggtcagcaggtacaccatccacgctcatcatttcctttgtgtttctgtttgatctatttttttaaaatttctttatcagtttgattagcatccacttgcatccgctcatagtttgattcgtgttcgttggatgggcctcaaaattaccagttgcttcgactacactctctgaatttcgcagatcaagataaaacccgacacaaaggaatgaatagcacacaaaaaatcacagtattatttagtcatattggacacgaataagttaaatttcttaaattttagatccacatttttgtattttggtctagactatcaaaaaaatcctagaaatgtccctctgcctctcgcgcgtgaattctcctctgccgaagggaagacactcaaaggcgagctactgatcttcaactgcttttctggattctctttgcaatatgctttgttggggctagatctgaaatcaatgtttttaataatctagcacaaataggaaatgttgcatgtgttgccgacagaaccatctcactctctctttagtttctgcaattttttggacgaccgagaggtgctgccgtttatgagtaactttccagtgggaaaacagtatgccacaacatcatggtcagagtttggacattgcatgaagcacttgctggacaattgagaagaactcatgcctacttgagggttgttgtacacgtgagtggaggtcgaacccttcttgtagggctcttaatgtatgaagtacgccatgctagctattgaatcaagttcaatgggattcgttaaaatataaggagggttgttgtacaagtgagacaaggtcagcccttcttgcagggctcttaatataagctcagcctgtactacacgttcatccacgtcgagctcgtcggctcccaacgcaaccccttcttctctcacgagatcagtggtgaggacgacactggggatagagacctagggttctccaagtgggcctagaaactccatggcaacgtctcaggaaaaatgggcgcattgaagtcttgaaggactttcaggaatactaattttgagaattcgtggaaataaaaatagggttggctttatcaaactgcacaaaaaaatcagcagcacttctctttatcatgcaaggaaaatcaaacttaggagcatcttccaatttcgtcagcagctgagccgattgtgatctctgatcactatacaaccatggaaataaataatgcagctttgctctgcaaattttatacaatagttcttgaatcgatattgactactactatattcacaacgtcatccacaaacatcattctaagaaaactaacaacatatgatggtatgtaaagcatgtttagtgtcaaaaaatgatatgatatatgttaagtacattctataagtttttttttcttggaccatctcgcagtcacacgctaagatactacatatgactatctgcacaaatccttcaccacagttcaaactggccagatgtactccgcatggacatatgtttaggacaacgcattactgtttttctgtcattcaatgctattggccctctctactaacagtgcttcctgaatctcttctgttcgcagtgctgttcagtgttcttcagtacctgcaatagtcc

SEQ ID NO: 32812 - DNA, 249 bp, Zea Mays
gttgcctttggtgcaatctatgctcaggtaaagaagaaagcgtcgaggcggatccccaggagtgccaggacttcggcgagttcatggtttaggctagcgacctcccccagtcagctgcctgtggtgggtttgtttacgttggctacgtttcgattctgtgtactttgattgatattatgtaaatggctctagtctgtaatattattacttactttttattgttattcgaagcattgtgctatgatgagt

SEQ ID NO: 32813 - DNA, 2756 bp, Zea Mays
gcctctacgcctgcctctcctgcgccaccgtcttctgcccctcccacgctgccacgcacgcctccgcctccgcggggttagcggcgtttgcgaagcggtcgcggcaggcacggttcgcggcggttgggtgttcgtgccttgcggagcggtcgcggcgggcgcggttcgcggcgggcggttggcgggggcgggggtcgcggcgggatcgggcgggcgattgtggcagggcagtctacaacatagtcttaatagttagtacagatattgagggccaaatgcaaaaacccaccaggagcatccggcagagggtctgcttcttcaaaccactcgcatttccacatcaacatcaacacgaggccctgccgccgccgccgcccgcccgccccctcctaaaccccggcgaccaaccatggccttctccgctaaaccccactgctcctgctccaccaccaccaaaccccccacccccgtcgcccacctctctccacccccgtccctctccgtccgcgccgccgcctgcgccccgcgctccgcctatggcctctctgccgccggcgtgggcggcggcaaggcgtcccccagtaccgttcgcctccgcgctcgggcccagcgcatccgcgcgtcgcagcagcagccgcggcggcgccctgaatacgtgccgaaccgcatcgacgaccccaactacgtgcgcatcttcgacaccacgctccgcgacggggagcagtccccgggcgccaccatgacgagcgccgagaagctcgtcgtcgcgcgccagctggcccgcctcggcgtcgacatcatcgaggcggggttcccggcctcctcccccgacgacctcgacgccgtgcgctccatcgccatcgaggtcggcaacccgcccaccgccggcgctgggaccgcccacgtgcccgtcatctgcggcctgtcgcggtgcaacaggaaggacatcgacgccgcatgggaggccgtcaggcacgctcggaggccccggatccacactttcatcgccaccagcgagatccatatgcagcataagctcaggaagacgcccgagcaggtcgtcgctattgccagggagatggtggcgtacgcgcgcagcctcgggtgccccgatgttgaattcagccctgaggatgccggcaggtcaaatcgagaattcctgtatcatatactggaggaagtcattaaagctggagcaaccactcttaatatcccagacactgtcggatacactcttccttatgaatttgggaaattaattgctgacataaaggcaaacacttctggaattgaaaatgctatcatttccactcattgccagaatgaccttggtcttgcgactgccaacacattagcggtagtgccttttccttgtttgtttatattttatataatttattatcatgtgtctactctttaaccgggttcctaatttggcttacatttagggtgctcgctcaggagcaagacagttagaggtgactattaatggtattggtgaaagagctggaaatgcttcattggaagaggttgtcatggcaattaaatgtcgtggggagctcttagatggtctatatacgggaattaattcccagcatattactttgacaagcaaaatggtacaagagcatagtggacttcatgtgcaaccacataaggctattgttggtgccaatgcctttgctcatgaaagtggaattcatcaggatggcatgcttaaatataaaggaacatatgaaataatatcgcctgatgatattggtttaacacgtgcaaatgaatttggtattgttcttgggaaactcagcttggatatgaaatcagtgacaaggaatttgaagatttctttaaacgctacaaagaggtcgcagagaagaaaaagcgtgtaactgatgaagacatagaagcgttattgtcagatgagatattccagcctaaggttatttggtcccttgctgatgtacaggcaacatgtggaacacttggcttatctacagcaacagtgaaactgatagcaccagatggagaggagagaatagcatgttcagttggaacaggtccagttgatgcagcttacaaggctattgaccaaataatccagatcccaactgttctccgagaatatggtatgacctcagtcaccgaaggcatcgacgcaatcgcaacaacccgggtggttgtcaccggagatgtgaccaacaactccaaacatgccttgactggccgcgctttcaaccgctccttcagcgggagcggggcagcaatggacatcgtcgtctccagtgtcagagcttacctgagtgccctgaacaagatgtgtagctttgctggtgccgcgaaagccagcggcgaggtacctgagagtgcaagcgtccaaagcgcagagtgagcttggcgacgatttggttctcatgtggactgggcggcgtaagagccagagcaactgttaaagagggtgacatttcgtttctgtattaggctgttcaatgttgggggttttgccttgtcagtgtggtgtgactgtactgttctttttttggaggatagcccagcttggaacgtgcaggcaattttggacctaggtagtgtacaatttgtatcttatatgaacaatacttccaataatcgaaagacttaagatgggttgctggagtctgttctcgtatcatgttgcgctttggcagtgggaggtctagtatggctattctgctctcttttattatgtcatctcgtgtttataattagtggaaccatct

SEQ ID NO: 32814 - DNA, 3836 bp, Zea Mays
atcacacggccgtgaggagcaactctgttcctcatctcccgttcaccccgcgggcgcagggcgcgctctctcctcgtggcgatcgccgaccgtagcggccgctgcccgggttttcgtcggccgcttcgccatgtcttcgctggacccttcgccagcgacgagcacccaacagcagaagcaattggagagtttggtaaatctactgacgcagggaagcaggtgtaactactgagcaggatccggattcatcgactaatattcctgagtatatgctttttgggtggcatctcttcttaatgctccatttgagatcaccagaattgttcaaggacctggtgtcctgcatccatggattagttgctgtgttggccatacttttgattcacgtgccagctaaatttaggagcttcacgattgaaggctcttctcacttaatcaaacaaactgagaaaggcgtggatcttattgcttcattatgtcataactatcatacctctgaagaacgtttgaaagaaatgttgcacaagtctcacaatgcaatagaagacattttccatatgaaagcactaagtgcttcagagtgcaaaccagaaaatttggataagatagacacagatgacctgatgtatttcaaaggtctgattgatatggaatgtttccagtcaaatttggaaaaaatggagaaactatgtaattctaatagctgtaaaggggagcttgattttaaatcaattttgatcaataatgattatattccctatgatgagaactcgacgggggattccaccaatttaggacattcaaagtgtgcctttgaaacattggcatctcccacaaagacaataaagaacatgctgactgttcctagttctcctttgtcaccagccaccggtggttcagtcaagattgtgcaaatgacaccagtaacttctgccatgacgacagctaagtggcttcgtgaggtgatatcttcattgccagataagccttcatctaagcttcagcagtttctgtcatcatgcgatagggatttgacaaatgctgtcacagaaagggtcagcatagttttggaagcaatttttccaaccaaatcttctgccaatcggggtgtatcgttaggtctcaattgtgcaaatgcctttgacattccgtgggcagaagccagaaaagtggaggcttccaagttgtactatagggtattagaggcaatctgcagagcggagttacaaaacagcaatgtaaataatctaactccattgctgtcaaatgagcgtttccaccgatgtttgattgcatgttcagcggacttagtattggcgacacataagacagtcatcatgatgtttcctgctgttcttgagagtaccggtctaactgcatttgatttgagcaaaataattgagaactttgtgagacatgaagagaccctcccaagagaattgaaaaggcacctaaattccttagaagaacagcttttggaaagcatggcatgggagaaaggttcatcattgtataactcactgattgttgccaggccatctgttgcttcagaaataaaccgccttggtcttttggctgaaccaatgccatctcttgatgacttagtgtcaaggcagaatgttcgtatcgagggcttgcctgctacaccatctaaaaaacgtgctgctggtccagatgacaacgctgatcctcgatcaccaaagagatcgtgcaatgaatctaggaacacagtagtagagcgcaatttgcagacacctccacccaagcaaagccacatggtgtcaactagtttgaaagcaaaatgccatccactccagtccacatttgcaagtccaactgtctgtaatcctgttggtgggaatgaaaaatgtgctgacgtgacaattcatatattcttttccaagattctgaagttggctgctattagaataagaaacttgtgcgaaagggttcaatgtgtggaacagacagagcgtgtctataatgtcttcaagcagattcttgagcaacagacaacattattttttaatagacacatcgatcaacttatcctttgctgtctttatggtgttgcaaaggtttgtcaattagaactcacattcagggagatactcaacaattacaaaagagaagcacaatgcaagccagaagttttttcaagtatctatattgggagtacgaaccgtaatggggtattagtatcgcgccatgttggtatcattactttttacaatgaggtatttgttccagcagcgaagcctttcctggtgtcactaatatcatctggtactcatccagaagacaagaagaatgctagtggccaaattcctggatcacccaagccatctcctttcccaaatttaccagatatgtccccgaagaaagtttcagcatctcataatgtatatgtgtctcctttgcggcaaaccaagttggatctactgctgtcaccaagttccaggagtttttatgcatgcattggtgaaggcacccatgcttatcagagcccatctaaggatttggctgctataaatagccgcctaaattataatggcaggaaagtaaacagtcgattaaatttcgacatggtgagtgactcagtggtagccggcagtctgggccagataaatggtggttctacctcggatcctgcagctgcatttagccccctttcaaagaagagagagacagatacttgatcaattataaatggtggcctctctcgtatatagctcacagatccgtgctccgtagcagtctattcttctgaataagtggattaactggagcgatttaactgtacatgtatgtgttagtgagaagcagcagtttttaggcagcaaactgtttcaagttagcttttgagctatcaccatttctctgctgattgaacatatccgctgtgtagagtgctaatgaatctttagttttcattgggctgacataacaaatctttatcctagttggctggttgttgggaggcattcatcagggttatatttggttgtcaaaaagtactgtacttaattcacatctttcacatttttcactagcaatagcagccccaaattgctttcctgactaggaacatattctttacagcttctccatcagactgatgatcccatattcagtgtgctgcaagtgatttgacatatgtggcttatccttcagtgagatgaagaaaacctgaaatgctatcaccatttaaaacattggcttctggaagttcaggtgattagcaggagacgttctgacattgccattgacatgtacggtagtgatggcaggagacgttcttaaacagcagctgctccttcagcttatgcttaaccatctttaggagctcatgtcatgattccagctgcaccgtgtgcaaatgtgaaggccctgcaagggctttccaggccgcaccaatcctgcttgcttcttgaagatacatatggtgccacctaaataaaagctgtttctggttatgtctgtccttgacatgtcaacagattagtgttgggttgcagtcatgtggtgtttaagtcttggagaaggcgagaagtcattgctgccagcattgtgatcgtcaggcacagaagtactcaaaagtgagagctacttgttgcgagcaaacggagggcgatataggttgatagccaatttcagttctctatatacaagcagcggattttgtttagagttagcttttgagatgcatcatttctttcacatctgattctgtgtgttgtaactcggagtcgcgtagaagttagaatgctaactgaccttaattttcaccgaataatttgctagcgtttttcagtatgaaatccttgtcttaaatt

SEQ ID NO: 32815 - DNA, 2024 bp, Zea Mays
tgataccccgcgggtcacgtttccgcaaagggaaagcctcaaaaggcgacgcgcaagggccgaggagagaaaggaacctgaggaaggcacaccagtttcaagcaatccctaggccgtggcgacgtgctgggaaggattcaaatcaggggcgaagcctaggtgacggcgctgttagtcgcctctagtagctgcgcgacgcgggctggcttgtccgatcggtttgcctcggccatgtcgactaagaaagttctttgcaagttcttcatgcatggagcttgcttgaaaggagagtactgtgaattctcccacgactggagtgatcaagcaaataatgtttgcacattctaccaaaaaggtgcatgctcgtatggtagccgttgcagatatgaccatgtcaaagtttctcgtaaccccacagtgccaccaccacgcccaacgtcaagtacttcaagacgtgcatctacttctcttcaactttcaagttacaatcatccacctcatatggtgcaccaaacagattcaagcaaccaaagacatcagatatctgtggatgtgttggcacattctgccagtaagcctgcatggagaaatgattttcagcatgatattgtttcagatgatggaattgactggtcttctaatcaaaatttgataaaccagacatcattgaaacctgtggatctccctatttgttcttttgctgctgctggtaattgtccttatggggaagggtgccctcaaatgcatggagatctgtgtgcaacctgtggaaaactgtgcttgcatccttatcgtcctgatgagagggaggagcatatcaagttatgtgagaaaaatcacaaacgccttgtagctctgaaacgcagccaagaaatagaatgcagtgtatgtttggatcgtgtgctttcaaagcctactgctgctgaaaggaagtttggactcttatccgaatgtgatcatcctttctgtattgaatgcattagaaattggcgtagcaattctcctgcatctggtatggatgtgaactcagcattgagggcttgtccaatatgtcggaaactttcatactatgtcattccaagtgttctttggtacttctcaaaggaagagaaagaggagatcactgaaagctacaaatccaagctcaagtctattgattgcaagtacttcgactttgggactggctcatgccccttcggaacaagttgtttctataagcatgcctacagagatggccgcttggaagaggtaatactgcggcatcttgatgctgatgatggaagtacagtaattgcaaaaagtatcaggttatcagacttccttggtaggatggatctttagggaccagcagctgtattgatatcaaatgcattctgggatatcgttatccaccaattatttacaatattctgaagatcagtttagcttgaggcatcttcggaaagtacagctttgtctccatttagtgaaagtttgaagatctccatggtcctgtagatgctgggattaccttttcagagcactgttgacctgagggcgacggaaacaagtctgacaacaattgtgcttgaatatcaaaacagaagtaatactcgtatttatagacttcactaagtgtggctctatgtatcaattgctggtcttctaggccaccagataatagctgaacatttcctggccgacaagtgaaaggggcagccgtataaatttgcttccattccacctgaatgttctcttcatattgtggaagggtactgcaccaataggtccaataaggccatttgtttgctttacttaatatacaaaaaaagtatagcagatgaaatgcaatgacaactgtaatgcagcattgttgaatgtgagcgtgagcggtggttttttatcgatgacctgctgaggaaggtcctcttagtaggcaggtaaactgagaacatttttttgttatatatatacagcataattgtacgagaaaaatagcaaatgaaccgagaatgatcattaaatgcagtcgtcggttgtatggt

SEQ ID NO: 32816 - DNA, 676 bp, Zea Mays
cagagatccctatatctggccttcctttatataacgacaagtgttcgagagcgcgcagccctgtccactggtcgtccagcctccaggttcctgaggctgcaaagatcctgatggacagcgttgagccgggccgtggttcaaggcagctcggcgcgcccaggagatggtaccgcaccaagaagatttggctggccaccggcgtcgccgtcaccgtcgtggtgatcctcctcatggtcctcatagcttgccatggcttcaaatgtcgctgaaccctgagccatgggccagggctgctcgctgccaaaggatgggagcacaatagctcatgcaagctctagataagctcagctcaatcgtccactatatgcagcagtgtgcagcttcaaacggcgaagcattctgcatctgtgcttgtggtggcggcctctgttttctcctctagctcgttttgatgtaccctcccagtagttgaattggatctttgagcgacttacaagccttctaaattttgtgggactttgccatatgtagtatgtatgcttattaatcattttatagctgcatgagatggaggggcttgattccttgatagaaaaaacagatgcaggcataaatgtgtaacacatactccttccatctcaaattataatttgttctgattttttgagagtcaaag

SEQ ID NO: 32817 - DNA, 273 bp, Zea Mays
ttatttttatgtgaaggggccactttaattttaaatttagtttttgtatgggggatctatcgcactgacttgtcaatggatcctcaggtatcgagttgaatacttctccaagtgtatcaaagccaaacccctggccacaaaaacatcggctacaattcagaagttctattggcaaaacattatttgtggcttcggagtgccagtcattaaccatcgacaacggaactcaatttgatttcgagacattcagatcttttttgtgaccaagttggc

SEQ ID NO: 32818 - DNA, 196 bp, Zea Mays
cacgatgggtttggtgctgttaatgagacaacgttttctgtttgttctctatctctatataaagaaattacacgcagttgtatatggtaagtaaatcacaatacctggaaggtgattgtgtgctaatctacttgctaagaaagaaacactaatcctgggcttactataacatccgtgccgtgaatggtcccagccg

SEQ ID NO: 32819 - DNA, 2362 bp, Zea Mays
ggaggcatcgtgtggaccgcgccctgcacaccttgagcgtgggcctgcctcctccatctccctctgcggcgtataaagaagcgacccacggccaccgccacggcctcgccggaatatcatacgaaaaccctcgcggcggggagagcgctttccctcccacacactcgcgccgcagcatccgcagtccgcacctgcctgcctccacgacttgtcgtgctcgtgcgctactctcctcgagtgcggcgcgggagcacggggacatctaatggcggccgcggcggagatcggtggtttcacggcggccgcgctcaggccgcttgcgcacccagccccggcggcggcgcctaggagggcggtggcggcgcagtcgctgcggacgaccgccaccgagacgctgacggcggatctcgccgccagcacggccaacggcgcggtgcatgctcagatgtatagtgaggctagtagtgaaatcccttcacaggcagctattgcaaattctaggaggaagacaaagatagtatgcaccataggtccctcaaccaacactcgtgagatgatttggaagcttgcagagactggaatgaatgtagcacgccttaatatgtcccatggtgaccaccagtcacaccagaaggttatcaatttggtcaaggagtacaatgcacagaacactgatggaaatgttattgccatcatgctggacactaagggtcctgaagttagaagtggggatgttccagagccaattatgctcagtgaagggcaagagttcaatttcacaattaaaagaggggtgagcactgaagacactgtcagcgtgaactatgatgacttcataaatgatgttgaagctggtgacatactgttagtggatggaggaatgatgtcgcttgctgtgaagtctaaaacagctgatacagtcaagtgtgaagtagttgacggcggggaattgaaatcaaggcgccacctaaatgttcgtggaaaaagtgctactttgccatctatcactgagaaggattgggaagacataaaatttggtgtcgaaaacggtgttgatttctatgcagtttcctttgtgaaggatgccaaagttatccatgaattaaaggactacctaaaaggtgttaatgcggatatacatgtcattccaaaaattgaaagtgcagactcaataccaaatctgcagtccattattgctgcttcagatggggcaatggtggcacgtggagaccttggtgctgaacttccgattgaggatgttcctttgctacaggcagagattgttcaaacatgtcgaaacatggagaaaccagttattgtcgccacaaatatgttggaaagcatgattgaccatcctactccaactagggcagaagtttctgacatagctattgcagtcagggaaggtgctgatgccatcatgttatctggtgaaactgctcatggaaagtacccactaaaggcagtcaaggtgatgcacactgtggccctcagaacagaatccagcatttataacccaactacttcccctagtgttatagcatctgcacagaacgaggagttttccccaagccagctaagtaaaatgtttggatcccatgcaactatgatggccaacacccttcggacaccaatcattgtatttacgcagacaggctccatggctgtcctcctgagccactatcgtccctcgtctacaatatttgcgtttacaaacgaggaacgagtgaagctacggctagcactctaccagggggtcatccctattcacatggagttctctgacgacgcagaagaaactttctccagagcaattagcagcttgctgaaagcacaatatgtgaagaagggagactacgtcactcttgttcagagcggagtgacttcaatctggagagaggaatccactcacaacatccaagtgaggagagctcaggtctgatgtgctggtaggaatcagtcgccggagaagttttgatagcgccgctagaagtgttatcatcatcatcaccatcatatgcgagtaattttaatgttttaccaggagattgctacgtcgagttgtatgttgtgtcgaattcacgtgtagactctggatctttaactctgtattcgttcattttcacttgtttcacactggagtgctataagttcacgcttactgcctttgcttttgcttttgctttcttgtgaaacttgattttagtttcttgttacaaaaggagctagcactaacagcgtgttaaattttgtaaaacggggccttcttgctccgagaactgctcagttaaaactgttgcaataataatgatatcgtccatgcaaggcgacaacatgcctggccagaaggccgaagtcagaa

SEQ ID NO: 32820 - DNA, 1029 bp, Zea Mays
tttcttggacccgagtcgagtagtccggtacatcccaccgcctcgcaccgcggccatgttgacaccgcgcgtcctcaaggcttcgctgctccgctgcttgcgcgctaccgccgagctgcctccgttgcggcgaccccgccatctgctctgcttgcttttgctgggatagccacatttgttcattacaatgatgagaggcgtgcagttcccttcgctaaagtaccaggacagaccaatgttcccaaaagatgtactaccaatagacctgcaataggagggccatttaagctgtatgatacagaaaacagtgaggtgactgaatcaaagcttcggggaaagtggaatctgatgtactttggctatacatcatgcccagatgtgggtccagctgaagttcagaagatagctgatgttgttaaactgttagagtcaaagtacgatatcaatattacaccactctttgtcacaattgatccacaacgtgattcacctgctcagcttaaggcataccttactgagtttgacccaagaatagtaggactaacaggtcccatcagtgcagtaagacagatagctcaggagtaccgtgttttctttaaaagagtagaggaagttggtcaggactatcttatagaaagctctcacaatatgtacttgctagatccatgcttggagacagtaaggtgctttggaagtgagtacgaggcatcagaccttgctgaggctataacaacagaggttcagaaagcatctgcctcatcaacaaattagtctagcgggtattggcacttggtgtactatctaattttttgttgattgcactttgtgatacaaaagcaaagctatgcatgtttataaatttgcaagcctttttcctacctgaaagtaaaacaatagctgcattgttaatatttggccttatgttccaaccttttatcttattagaaactttttgaagtggaaatggtatttcctctgatagcgagttattaatatgaaacccacatgattgtaccgttctagtaacaa

SEQ ID NO: 32821 - DNA, 3150 bp, Zea Mays
cgggacccaacggacagccagccgaacatatcccccctacgctggcgccgtcgcacgcgccgccactaggtgtcacccgtccttgcgccgccgccgcatccttcgactttcgatctgcgagctagcgattctccgctgaggagtggggcccatccctccggagcccaaccccagggcatccgcccgcccccgccgccgtggctcaggccccacgcgtcatccccgcgacggacaacgtagtcacgcaggtggagcgcggtccactcccccccccccccccccccccgcgcttcgcctccgctgagaccgcgccctgctggtgcgagtacccgggagcttccaaaccctagggccgggcatcgagcgagcgagggggtgagcgcggagcccaggcatgccttgccgcccgcggggatccaggcagtgatgcgcggatcggcgcggcgggggcggcccggaagctcggccgcatgaggtgcctcgtcggcggcggcgtccaggacagcccgcgcgcagcggccaaaagagtatcgccggcgtcgtggcggctggacgccgccacagcggaggcggacgcggggagagctgaggccaagggggtcaggttctgcgtcaggccgccggacgtcatggagacggtgcacgaggtggccatttacatccaccgcttccacaacctcgatctgtttcagcaaggatggtatcagatgaagattagtgcaatgtgggaggaaggtggcaacaaaacaccggcttcacctgccagggtcgtgcaatatgaagcttctgatgttggtgcggatgatgcattaggcatttggaaaatagatgacgtcgacaatagcttccacacacagccgtttcggatcaagtatgccagacaagatatctatctgtcagttatggtgtcgttcaacatattcaacattgaagaggagggtccagcagcctcggcggtgatgttgaagtttgagctgatgtatgccccaacactagagaacgggtctgagcttcaagcttctagtgtcacatcttcagcagctgtgcatgaatttaggatcccccacagagcactcctgggtctacactcctactgtccagttcattttgatgcgttccactctgtgcttgttgatctgacattacacatagtgtacctgaaagctggtgcaactaaaccatcattgaaggtaccggaccaaggtttaggtcctacatcatatcatattgtcaaggcattattaacttctagaaagttgttgctggaagaactgaagaaaatcagtggtgctattggtaagacagtagaggaattagatgttgctgacttgaatcttggtagatatgagtcatttaatccatcaaaatctggattaccaaattctagtaaagtgttccctgcaactggcaagggtgtgggacagttgactggagttttacatgatttcttggagaaaaacaacgatatggttaatggtacagatgattctatgctggtaaataaaacaaagatattggagtacttgcacgatgcttgggctattgacaggaaggcagaatggtcaatatggactgttcactcaaaaattgagatccctcatcgctatttgcggagtatgaatgatgaatcatctcaccgtcattcacttcttagagtttctggatcaaggaagttccatgacgatcctgcacagaactctgcttcacgggctgaactacaccggaaaagcatagcacaaatgaagaacaacatgtcatggttgttccacagcatagttccagcaaggatttggcttcgaatgcttctgaacaaaaggatactattgtgctacctaaactacaaggagagcctctggtacccaaaagtagtgttgggccaccatttggatttacgtcttgttagaaaccaatggcttctattggaccctggagctgattgcctaatgtctgaggctaatgaagataaaacatctggagacttcaaagaaatgggtagcaggttggccggggaggtaattgccttcctgaagaagaaaatggataagctttctagatatggaggctgcaaagagctgaagttaagttttgtcggccattccatcgggaacatcatcattagaagtgccctggcagaacctgcattgcagccatacttgaagaacctctacacttacatgtcaatatcagggcctcacttgggttactgtgatgatcaagacccccacaatacatacttctataagctttgcaagttgaaaacattggagaacttcaaaaatatcatattgttatcatcaccacaggatggctatgtaccatatcactcagcgagaatggagctctgcccagccgcatcatcggacacctcaaagaagggtcaagtcttcacagaaatgctcaacaattgcttggatcagatccgtgcgccctcatctgacacccggacgttcatgcgctgcgatgtgaattttgaccagtccaaccacggacggagcctgaacaccatgattggcagggcagcccacatcgagttccttgagaccgacatctacgccaagttcatcatgtggtccttccctgacctgttccgatgacagacaacgccgctcgtctctgtaatgtctctgtaatactgctgcataccaaacctacaaaccgatagcgcacactactgagtactgaccaggcaaggaaaagtaagcttgcataaaggctcccccagaatccaacaccgccacaggcagagtagcgctgtaaagatcctagaagcaacggtttttccagcttgctagatctgattctgtataaatagttgattctttcgtcattccattcatagtgctgtagatgtgcacctttgctgtgaatttataatcctttgtcggcttgtgtatctaacgcttcggtttaggatgtgctgacaatcagtgagcttatgtccaaataagccccctttcttaatgtttggttttagtcaccttggtctttgtgctgctgtaaatccagggtgttgtttctgtttggtgaaatgactgctacatgaatatctggttctggcatcttgccatagccggatcttgcttctgctaaggttattcctatcagggatatataggattggaaaaaaatatgaaagattttgatttattt

SEQ ID NO: 32822 - DNA, 222 bp, Zea Mays
ctatttttacctctaacttgcaatagagtcgtaaatctttgtatttataagaaagaaaagaatgtccgaagtacaagccttcctgtaaagggaggatgagacccaccaaataacagaattacatctatgctactaaacaaaaaaacgcaaaccccagacacacagtacgcctaaaaataatccatatgactccaaatcaaacaaacacatactattgattcc

SEQ ID NO: 32823 - DNA, 183 bp, Zea Mays
ataatctgttgagtcgttgtaatagtaggaatctgtcactttctagatcctgagccctatgaacaactttatcttccttcacatgtaatcgtaataatactcagattctctccacagccagattctccccacagccagattttcagaaaagctggtcagaaaaaagttgaaccaaacaggccc

SEQ ID NO: 32824 - DNA, 2455 bp, Zea Mays
ctagcggctataacccctaatcctaccagtaatccccaacatgcctcctaccagaagaaggagaccgcgggaccagcgcgccgggagatgggttacaaggcgacgccgcgccggaacgtactttgggctctcaacaatgccgaggccaacggcgggacgacgtctgtgccgcggatggaggcggcgcccatgattaagttcagtgggaggcaggatgtggagcgcctgctaaaatgaagggcaaaagcaagagcgatttcaaggggagaatcaatcagatgagcgtctacatcaagaagctcagggcgtgcatccggtggtacatggagctggttattctgttgatattctgtagcttacttaggtcatggttgctcgtattatctgcatagtagtctgtctatatttgattgacacagtaacgagctctattgctcaatgacgagcattctaatattcaaggatgtggtagagtagtcacagagattccctgcttcacacagtttggtcatagattagacatttgtgctttccgactgtactttttttccagctgttgttgctcattacctcacacacttagataagttgaaacttattgaccttacatgtgtatctgaattttcttgcttgctccctgcctcacgcttagattagttgaaagttgacatttgttgcccctacacgtgtatgattttcttggtccctctaaatatcatagctcatgacatctcctgtttacactgcagcagttgaagatagctaatcgacaatgcaaggtcaaggcctctaccggttgtaacagattgtttattgaatagaatgatagaatgattactttacaccgatgtcgctcctccacgagcccgcgcacgccgaggccgatcttcttttatggccaccgtgccccgcatcggaggtgccttaccctccgtcgcgcccgtggactggacgatgacttcgagtagaggcggcggtggctgcaacaatatctgcgatctacggtccacgcgacagcgacagaggccgaggggtcgcttgtacatcggcggaacctgttgctggaggagcttgcgtgtgaggtggggctctcgcccgaccggtggctctaggtgccgctgcccaaggtctggagtgtccgtgtcttcgcatgtatcggtgctgcctgatcgccgctcaattgagcgctagctaagcggtcttcatcgtggtcctcggtccacgcgacggcagcggaggctgaagggtcgctgctgcaccggcagaacctatcactagatgagatggcgggcgggtggggctctcccccgaccggcggctccgggtacagctgcccaaggccaggagtgtttgcgcttttgcctgcatcggcgccgcttgatcaccgcctcaatcgagcgccagctgtgctgccttgatcgctgccatgtaccctccgtgcctagaccccgcgtagtgcgggaagcctaggacacggggtacaccctttaacagatatccatctaagatgctcctgtctgcaattgatgagcttcacagaggaacttatgacttacctgccaattgatttcaagaacaaatgcaatgttggatacgcgttcgttaacatgatatcgtcggtgcacattatatcattctaccaggcttttaatggtaagaaatgggagaagttcaacatctagaaggtagcctcgttggcttatgctagaattcatggacggtctgcactgataagaggtgtcgcccgattctttttaatcccaatggttagtactctgaatcaggaagcatttccaatcaatggcatatgcatccacatgctttcgaaagatgattaccctgacaacgaagaagacgacaagggtctaaacgagaaggtaggagagagctcgaccgatatggctgagggtttgtgacgtctgatagcagacaggatcagaatggccatacatataaatctaactgtctagagagtatccacccccatattgtataaaaagcgtggaaagttgatggttagtgatgaattttgtggtctggtttggcatggcacatcttttggtttcagatgttgccccggaaatgaaagttgaagtgggagctaaagctgaagcgattagcttcgaactggagcttgtttgtcgaatcctccccctccccttctgttggtagtcgtgcttgtttttgcttgcttgctgaggggggtggaaccgctgctcctcatagtcttgtttgttattgcttgttataaaaaggtgaactgaactgaagaaaaaaaaaggttagccaaactgtacagtttagaacttttgtgcatattttgcattctggcgtcttaatgtgcagtgcagtaactgggccttgattatgcaaataattgatgtacacgttctttgcataattgtattcaaggtatctgaccaaaactcagaaagctgcacgcgtgctctctttt

SEQ ID NO: 32825 - DNA, 2054 bp, Zea Mays
ggtagtctgttttacatcctgcatgtatggtgaccgtggcctgatgattcccagccagtcctgcatgcccggtgttcgtggccacattcctagccactccagcattgcagttcgttcgtgaggaaagcattgctcataacctgttcttggctattttaagggccgctaatgatgaacacaaacagcggtttagagtgaatccgcaactccatactccaaccagcgctccttcctcggcgcgccttcagccatcgcacagctgagcagtactagtaacatccagtttgctggtcaatcaataaaccacttggtgtgctcgtgggaggaagaagatggaatccatagatttgaaggtgcaggtggtagagtcatcatttatagcgccgagcgagccgacgccaagcaagggcctctggctctcttccttggacatcctgctggtcaacataggccacaccccaacgatctacttgtacagctccaacgatgtagccgcggctgattttttcgacgtgggcagactcaaaaaggctatggccaaggctttggtgcccttctaccccctcgccggccgcctcggcaacaacagcgacaatggtaggacggagatcagctgcaacggcgaaggtgcactctttgttgtcgctcacgcggatggtgatctcactatcgatgacatcaagaaattgaagccatcgccagagttgaggaggctgtttattccactcatcgagccatcgtctatcataatggccatacaggtgacttccttgaagtgtggaggggtggtgttaggaacagctatccaccacgccgccgcagacgcttcaagtgcgttccacttttttcagacatggtcggcattctgcaagcatggtgaccgtgctgccgtggcggtggagctcccgtgccacgaccgcaccctactccgcgcacggtccccacccacagtccaccccgacgcgctcttgacattgctgcctcggctcaccctctctgaccccgagggatcccttgccaccgaagtcttcaccatttccagcgatcagctcgcctccctgaagcacctctgcggtggcgcgagcaccttttgcgcggtgagcgctctcctctggcagtgcgcgtgcgttgcgcgccgccttccaccggattctcaagtgcgcatgctgttccctgccgacctccggcgccggatgaggccgcccctcccgagccactacttcggcaacgcagtgttcaggctatgcgcaactggccgggcgggggatattggcacggtggcgttgggatccgtcgctgcccggatcaagggcgccatcgaccggatggatgacgagctggtgcgttccgccattgactactacgagtacgagacggccgaggtgaacaagagacggactccgacaggcaccctgccacagacggacctcaatattaccagctggttgggtaggtcacagtacgacgcggattttgggtggggaacgccgcaattcatgtcccgggcggactccgaccgcggcggattcgtgcacttgatcaacgatgagggtggtggcaccgccaccggcgacgtccgcgtgctcgtgaccgtgggggctgaaaatataaaggagctagggcggcttctttatgcgaaactctagctaggtgctgctagtggcattatccaaacttgaaatatcccaactcgtaactgatgtaccgaaacctgaattctcaaacactatttcagatcctaggtttgaaaaccaaaatttatacacaaattaactgaaattatatgttatttgtaatgtataatatatgctcttggggactggtgactttatgttaactcttcaacgccctaagttgtgatatctaatatattatgtttgcttgtgtggacttctattaggtctacttctagttcaataatttctgtttctactgtactagactgctagttttgttatatagctatgtaccatgcgatgtggcactgctagctagcagtatgaacttaatttgtaatgtgtgaaatgcatgtgaaatgaggtatttgttcaatt

SEQ ID NO: 32826 - DNA, 2250 bp, Zea Mays
ctcaaataattcttgcttccttctagcttcacatcatttggaacgagttctaattttaattcagatgagataggcaaagccttggggccaatcatacctagtcccatgagttcctgaaccatactcctcatctcatttctcatctcactttttgtgattagtggatcctcttctttcttgtcaccatgaatcattgtccttttttcagcctcttcctctaacctttttgcttcagtctcctctgaactcatcatcatcactgcctgcaaacactaagacgaaccaggcttccttcccctctctcaattaatctgcagtacctccaacctcactagtcgtagcaacagcccgctctctttgtaatcaccgcccccagacccatctgctggactgccgctcggtggggcaacacatcttggacggcggatctcaagagggcaagggagcaagccttcctgtgagacgtcgacctgctgctgtccctcttctcccgcgccgcacaagactggtggcagcagcacgcgccacgatcctcctcgaccctccggcctctcccctccctgcacctgcagagagcgccgcaagctagctgcagaggagcaaaacagcaggaggaggacgaaaggaagaagagaaggcgagcggctgaatcctccctcgatcaccacacgcgctctgcccttccccgccaccgatctgccacctccgagcttgtccgccaacgccggatctgccggccacgtgatgcggctcaggcgacggacagagcctacgggcagcggcggcgccaaaacctagctctggataccatgtcgttttctggtaggggcgcttcccctcctggtgcatgtataaaaaagttcgaaggaagagcagtttgctgaaaattttactcccaattatactgtgtgtgctgctactcatgcttggagcccttgtctggacatgtaaaagcagaggcaaacggcaaaagaagagagttcaaaagagaaggatgctagaatacttgagttctactgatgacgctggggacaagaacataaacttcccatttattagctttgaaaacattgtcacagcaacagataatttctctgaatctaatttgcttgggaaaggaggttttggcaaagtgtacaagggaatgttggaaggcacaaaggaagtagctgtcaagagacttagcacgggttccggccaaggcaaggaggagttcaaaaatgaagtagtcctaattgcaaagttgcagcacaagaacctagttaagcttctcggttgttgtattcatgaagatgagaagctgttagtttatgagtacttacccaacaaaagcttggattacttcctctttgcttctgcaagaaaatcaatgcttcagtggccaacaaggttcaagataatccagggggttgctagaggaattatgtatctccatcatgactcaagattaactgtaattcatcgagatctaaaagcaagcaacatcttgctagataaggagatgaacccaaagatatcagatttcggcatggctaggatattctctggtgatcagctccaagcaaatactaaccgagttgtagggacatatggctacatgtctcctgaatatgcaatgaaaggtgcattttcagttaagtctgacacctacagctttggtgttcttatattggagattgtaagtggattaaagataagctcaccatatcttatcatggatttttctaaccttataacatttgcatggaacatgtggaaagatgggaaaccagaagattttcttgactcatctgtaacggagagttgctccctcgatgaagtttcacgatgcatccatataggactcctgtgcgctcaagacaatccgagttgcaggccactcatgtcaacagttgtgtccatgctggagaacaaagcaacaccactgccaacaccgaagcaacctaaagattttgcacttcgggactacaatcctggaaacgaaggtgtccacagggaattgtccgtaaatgatacaagtctcactatggtggagggccgttagattattgtttttgatactacgatgggggagcacatagcccaccagaaatattcattgaagacagacgtttagtccctattttgtttatgggtatttctgtttagacaaatttagtatcaatttaatctataaaatttattatgcaagaacaatctattggaaaggtaaagtttattatgcaatttatcaatttaggtttagattca

SEQ ID NO: 32827 - DNA, 978 bp, Zea Mays
cttgctctaaattctaaaataacgcaaacggtaccagcaagcagcaagcctctctccattttcttcgccggcggcaggtgcacacatcggggaatggcgacctacgaccatgccgccaccccgacaccgcagtctccgggcgtcggcggcgtacccttctcgtcctgcatcggcgacctcctccgcttcgtcctctcctcccacgccgccgcctaccccggtgacgacacggtcgctttccccctctcgccctcctactgcgcccgcctcctcaacgacggcgaactgttcgagaagctggaggcctgtattcagcagtgcctcgaggaggggcggctcccggggccgcccgcggtggttgggattccggctgaggaggaggggccggaggagagagggtggaagctgctgctgccggagaaaggcgctgagttgaagcggatgtacgatgctgttgagtttgagctgcatgttcaggaaccctacttcactcaactcagagccggagtcaagaaggttgaagggagattagcgactggtaactacaaccggattacacaaggttctttgctgctattcaataaatgcctcttgcttaacgttgaggcagttaggaagtacaattcattctctgagatgctgaaaggagagaaaatctcaaatgttcttcctggtatttcatcaattgtagaaggtgtgaaagtatataggaaattctatgcagaggaaaaggagaactcttatggagttttagcgatatcagtttcaaagccaacatctcaaccttacataaccatgaataatatccttgctggattggggtatgatggactgggtagactccttggtatggcgaaaacaactggaactgttccagatggactacctcctccaagatctgcactgctgtcatcttgtatgggactggttcaaccaaatgctgttctttaactgatggtgcgagggcattggccaaac

SEQ ID NO: 32828 - DNA, 227 bp, Zea Mays
ttaccttgggttctcccactttccttcctcccttcttccctccaccaaaacggttggagaaacgcaccatgagacgacgatccgagcggcaaggattggcaccttgggaggaggggattgagggggggggctagggtttggtggctgcaaaaattgagagaggaggtgatggacaggggggcggcggccaaggggaggaggagaagtgggggggcggctgcacatgg

SEQ ID NO: 32829 - DNA, 2683 bp, Zea Mays
cgatcacctcccccaccattcctctttcctgccctcgtccgtttccgcatcggtgtatcttcgcccccggcgaaggcgctatcctcccgaccacccggcggtgccggtacgccggtaaggcaggttgccagaccccgcgaccccgatcccgatcggtcgctggcgaggcggcgtgacctaccccggctcatcctctcaagccagacggtctggctgctgtgcatccccgttttggcggctaccttacctctggcaaggcaatcccccctcacccctggcaagcacgggagaacatggagagtgcttcagatgtacaaatgcaacatcgtgctgaagattccgagactacaattgagatcaaaatcaagacattggattcccagacatacaatttgcgtgtgaataaatgtgtgccagttcctctgttgaaagagaaaattgctactgtaactggaatattgtctgaacagcaacgcttgatttgtcgtgggagagtcttgaaggatgatgaactcttgtctgcttatcatgtcgaagatggtcatacattacatcttgttgttagacatccaggccagtcagctacatttggaaatgcagcaaccgaagctaacacatcaaattctggccgtcgtcatgggcccacagtggcaagaagtgtagtacttgaggctgttaatgtggatcctgggagcagtgaactcccagcttttgttgcgcagattctccaaagtgtgcttggaacaatcaatgcacaatctacgggtacaccaacatcttctgacaccggatctttagatccttcacaatcttccatcccaaatactataagagttgaactcgaccagcaacaagctcctctgctttttcagtctgaacccgcacatgagtcatctcaaccaaatgtcatccctgatgctttgacaactatgtctcagtacattaactttatgagggactcatttaggagggagggctttagtcttaatggacaaacagagggtaatgtggaaaacagaactgcagagcctgaatcagcttctgtgcttgggcttcataatgcatcattgctagctgaaaatatgcactctactaggcaaattattgttgaacaggctggtgcattgctgtcttcagaagcggttgtaaactctggaccagctctttatatatctccatcagggccaaatcctcttatggttcaacctgttccatttccaggaaggtctgtccaaatgggtactttgttttctagtctgggttcacaaggatctgttctacatccgagagatgttgatatccatgtccgcacaagtgggtccgtgcctggagccagtactaacccaagtgattcagctggtgcgcaagcgcatcaaaatgtgaataggccaggagatgcttcgcatgcaaatattggtgaagcgttttcaggggttgcaggtggcactcctttttcagttgagtccggagttagactattgccacttagaacagtggttgccatgcctgctggcatcagtcgtgctccatcagggtcgtctagtggtgggcttggtattatctatccatttctcactagggttcgacaaagggcaaacactaatggtaatgatgaaaggaatggtcaatctccaaatgaatcggctcgtagtagcacccatcttaatcagcaatcaattccgcagtcatctcaaactcatgaagcaggtaatctgagatctccagttgatgtcaatgttggagatggctctgagacctcacctgggcagcagaatggtctggtcactctctctcagataatggacttttttggatcaatgctcccaggcgaaaatgttcgaggaaatacttcaagccagcaaccaccaatggcttccaccgagcagggagagggtagaaatcttgcaacaccagaagtgtcaggagccagtgaggaggccctacgctttgctggcatggtcagacaaattatgccatttatctcccaagttgaaacacagaatcaaagtgccccaccagacagcagcagcacacctgcacaggctgcatctgggagtgcagacagagctagggatgtcccaaatgattctacgagttcccgtcaacataaccgcgaccaaattgatgagcctaattctaaaaggcaaagaactagtgactgattggaatctacttgtgagctgagaatcttgccagttcttgatttaccccagcggatgatcaaaataaggacttgagacaaatggtggcagtattgagacaaaaatggattagctgtggtatatacttggcactgagggcactagacgaggcacctatgccttttttttttgagggggcgcatcttataagctgttatttttttagtgcaacgagcatacatgctgctggcatccaatccccaatatgtacaagttttaattcaggttgtgatcatttacgcaacgaatcaaagcctccgctctggtcattgccgtagcatacggaggactgacgcaatcaatcatattgttacgagaatgtatagcttaagattgtatgtttttttttaccatcgcttaagacaatcagagcatatagttcatgcttattatagtatgatccaaataggactagtagtattgttcatgcttatcattagcattgcttaagagcttgtttgggagtaagagaattaaaaaga

SEQ ID NO: 32830 - DNA, 767 bp, Zea Mays
cggccgaatcattgtgctagcctcacgcatatcattggacatgttggccttttaacaacgctgggggttaccagcacagcacctagcagtagcagcaagatccgcgatctgtcacagagctttttatatggcttatccccccatcccatggcaattggcatcacagccccgcgctccatgacctccttgctcgccggccaaccatcatcgctgctcactacgggggtacggggtgggtgcatccatgcatgcatgctttgttaatataaacgctttccgtttttctgcactgcacgtctgcagtctgcacacacacgcacacacacaaacaccgtggcattggcgtcgaaagcggcgaccgcgtcctccttcctagattcagtgcactggcatggcgccaccgtgcatgccggctgcccttgcccgtcgccgttgtttaatcggcgcgatcttttgcgtggatcccgtcgcggatcctgccgagccgtgcttggaacttggaagacagcgcgagatgatcgggccaaggcgcacgggtttggtccggtggggggagccgggagcgggcaggcgcatcgtcgtcgtgtccatgatacgttggacctaccatttcggagccggcgtacgtggtggtgccccggccgccggcggtcccgtcaccgccgagggccacggtacggtcggatctggccgcccagtttctttctagtcccagctgagctgcgtttaatttgctgcccatgggcggggcctccatgggacgcggc

SEQ ID NO: 32831 - DNA, 2236 bp, Zea Mays
gccctttgtccgcgccggagcctagcaccgaaccgccgcggattcgccactacatcaccggccatggcttcgggcatgccacccgcgccctcgaggtggtgaggcacctggtcaccgcagggcacgacgtgcacgtggtcatcgccgcgcccgagttcgtcttcaccaccgagatcgcctcccccagcctctccgacaagctcgcgtccccgtccacatccgagatgctcgcgcccgcgccttggatggaagcccagaatcgccttccatcgaggattctacaccacgcgtcgcgccccctccccgcacgcaagcccccgcctgcacattctccgccaccccatcccctgtccggcgcgtgtgccacggcctccctcgaccagcggcacgcgtacgccatcaccccctccctactgctcccatccgcggtgctcaccttcgccatcgcgcaatccatcaaggtcctcaccacctggtataaggagaaccggtgggacgcgaagcagctggtgggctccggtgggatgccgtcctcgcactcagccaccgtcacagcgctcgctgtcgccgtcggcctgtaagaggggctcgccagctcgttgttcgccaccgccgtcgtctttgtcttcgtggcacaataagccacttcaggcttcagtctgttctgtgatcagcagaacattatgggctctaaagcaggaggacttttgagatgcttgtcaattgtcaaacttattttggttggcttattttcaagattaaatgatctctggtaactgaggagaatgctgtagatgttgattttccttttaggaaggtgaagctctccgatgtggtagggggttagtacccctttcctctcctctagcatgcttaaggaggtattgttgggcttttttatactcatactcagttgtatatatgtttctcaggaatggaaaatgtgcatatatgcttctgattgcagtgagattagcctcgtccaagttatgggatctgccatgaactagacaagattataagtttacagaggccttacatcaagagagtacaagattgccataaggaagtaaagtctttgaggaaagtgaccttatgagaagcttgagaaaatcaacttgtgtgtgagaagttttgtctacttgtgctaattagtcatatgatatttttagtcatgaactagacaagatcagaagtttaaagaggttttaaatcgagtacaagatcgccataaggaagtacaagtctttgaggaaagtgaccttatgaaaagtttgagcaaatcaacttgtgtgcgagaagttttgtctacttgtgctgatcagtcataccttggaatattgctgaactgttgcctttgttgctcattggcttcaatacttcatacaccatcaaatgagtcatgtgcaaaattcttcgaagcatcagttcttgctctagaagaacttcatcagaggcggggtcgaatcagcaactacggctgacatgacgctacccatccagttgctcactgctcaggttatagcgaagaacattgttttagctggatacaaggagatgcagaagctctgagttttgaggatggatctatggatggttacactatcacatttgggatcagaaatgtgacgcacattgagaaagctctatcagaagcttacagttgatggttctaaagcaagggtggaggttcctatgcttggagttgagtcatgtggatgtccctatttttaaatagatagctggttgatggtgatcggcagatagaagacgggcaacatgctaaccaggcatgtgaaccttgaaccttggcaggaaaagtttgctcagatgattcaggaagccggattccagagggtggaatatgaaaacctcctgagcggtgtagttgccattcattctggactgaaactgtagagctgaatacggatggatgttttttcatgggtgcaccgcttctacaattagtagtatttgttgttttttaatgaattctataataggttcggtggcttgtaaaagcagctggtgctggctgtcagcattagcacaatatgtagaataagtagtatttgcgagaagtatgtgctggagcagtagcgtcagtggctattttggcttttaagccagctgacctcttccatttgtaaagcttttttcttggaaacgtgaaaccatccagaacatcaaattagtcttatcacatacctcctgcaatacattttttgttctaaaa

SEQ ID NO: 32832 - DNA, 2526 bp, Zea Mays
caggtcattgccatcagtgtcagattcgcagctacataacaaaagctaaaacgtagcaaaaggatacaggaacgaggagcacaagagtcgcgtcagccttgagcaaggcgcagctccaggatggctatgtcgcgtacccatgggacaagaagatgcgcgacacgctgcacacgcccaactccagctgctacctctcgatgcttgtcctgcccaaggctctggacagcaatgcctgtcactacgagtccttcgacgacaccgtggcgcgtgccaatgcatggttctactcttcgcaggccgccgggatacccatcgacttcatgaatgtgcagagcgaagctcttctcaccaagatatctggagagacagcgtccgcgtctgtgaattcgagctcattatctgatctgtcgaacgtcactaatgcgacgctctacggttttgaagattaccatggagtggatattggtgtggtaaaggcagcacggctttggtacagctgcgtaggaggagaattgctgctggaaatcccacttgaagaaggtgacacaaggcttggctttgctatcagccgaactgaagagggctttatctacatatcatctgtagtggaagatgacaaggaaagcgaggcaccatctacgcggtctgggctctgtgatctgttcaaccgggccaaggaggcgtcgaaactgctgatcatctcgagggtgtccaatgagaaggtcctaccttggatgatctccagttcaggggcagtccgctgcttcgacaccatctccctcagccagaaactctccttgcaccgcctcgcagtgcgccccatccagctgcatctacttgcctgggagaagccttctgctcccaacccagcagagagggccgtgcgttccccaaagctcaccatgccttcaacgctgctccctcacctacagcaaaaccttgtggagaccatagaaggcggagtagatgctgaagaggagtacgtggggaatttgtcgtttcggatcgatgatatctcatttgagagcagctgggtgtgattccaggtttcaattttgtcatacaggcggctgatgtgcatacatatgttttcatcttgtctagttctctagggcggtaatgctcagttctgtgcttcagaaaatgcagatgctggcttcaaaatgttcagaatatttcttgttttctagccgaatcagggatggataacatctgaaaagtatcttgtaatggaacatttttgttgatcataacataacaaaggagtgatccaaacatgttggtcaaagaaagctcaggcttcacttcgttagttgtttactccaaatctacagcaaacatgcggttcagcacctcaagtttcttgacctttggctcaaaacaaaaaaagaaaaatgttacacgagtgagttgacaccacactagctgttggtcaaagagacacaattatgctgccgatcttgttttgaggaccctgcacttgagcactctatcttgcacgtaaaaccccggcgtcaccattatcttcacttgacaaggactctgcaccggctgcctgtcatgcaggatgtcttccatgtacagctcatcaaatgcgcggccgtcttggacgcgcaggatcgtcagcggcgggccgaaggagaaggccagcaggtggagcagccagacgcacttggcggcgacgaagaagcactgaagcaactgctcgggccacggccgggaccaggcaagcgtcgccacgacgacgctcatcttccggtcgcagaaacggctgaagtcctcgctgtagtacttggtgcccttccgcagaacctcgttccagctaaggttgcgcagcgccacgaaggctgcgaagctctgccggctgtcttccgccgggtcgaggcacctcggcgagccgttccgctggaacgcggggttctcgaagtcctggaacatgacctggttcatgatcgcctcaagatggtacagcacggccttcgagcagtgtttgctgacgctgccgctgctgagcgcgagctggtacgggcgaaggagcaggttcagcttgtcggacaggccgtcactggactcttcgttcacctgctggatcagcgccttgcagagctgcttcacagagagccgcgcctccgacgcgatctgcaagaagccttccaccatcacctcgtggctcaccggcatcgagagctctcggctgggttcgatcgatttcgtcggtctccgggagacggacggcgagttggtggcctgccgcagtgccttcttgagctccgagcagtacgcttccacgctcaccagcttggtggccagctcccccagcgacgacctcacctcggcagcttcgtgcagggcggcgtcccggtgcgcgttggcctccgcgagctctttcttgagggactccatagatagcgccccccactcggtcagcagctgcggcatgttgccgcgctcgatggccgtcggcgacgtcatctccggtggcttggctttctttctcgacttggggaagagccacgagaggatctg

SEQ ID NO: 32833 - DNA, 2575 bp, Zea Mays
gcaacttagagcgacccattttgccaaatccctcgggaagagaaatttgtcaaaatgggtcgccctcctcgcgacgcagtgcgaccacgccgccaccttcgcctgggaaccgcgaccgctccatgaagaggggatcagatttgctcatcgcgacctaccttgggggttcattttgtgttgttgggttggatggggagaagtgtcgagcacatggtgcttgcagtttggtttgttcgtgttgacaatttctctgtggggcgttgcagggaagatgggggtcgaggagaggcaggcgcagaagagctcctaggaggagcatcccaagaacctcatcgtcgatgccatgatgctggactcccgcgctgtcaatctcgacaaggggccacctgtcgctctggacaagggggctgccctaagatcctgtttttgcttccttcagatgaaggaacatctatcctagagcttggtgctggaataggttgtttcactggagaactcgctaaaacagttaggaacgtttttgcgctagattttattgaaagtgcgattaaaaagaatgaaagcattaaggtatgcagttggatattgcattcagagaggctcaagcgatagctgcaagtagttctaccttgtgcccagttttcttgttcttttaggtccatgaaagttcccatttttgtggtgttgcttagatggttggccctgttgactaccaaaatgacttggacttttggtgcatggataaatggactgcaagctttcttataacgtggcacatcataagaaacatacataactccaatttccgaaatatcttagtgcagaacaatgaatataagcctgtaacctctagcagagatacacaagagaagctctctttggcatttcactgaatttcctttagttggaagaatgtcgtatcactgtttatggttggcttctttaattaaaggagaacatctttctagtttctactcagttctttggttctatatagaccttaaatattgattccacatataatgggccatgtaaatctgaggtactaccttactagcaagttgtgtttctttgaatgaagtttgcatagcaacagctgataggttttagttatgctctgactcttgagtctgaactattgattggattggtgaagaatttttaccttaccttatgtaatttggaatttgggatgaagtgtgtggcaattgccaaccaaatcattccatttactgttatcttcaggaaagtagtacttagaaattattccttagtgatgatccatttttctatgtttacactgcatgtctgttttttcctactgggctcttaatgctcaagtagcacctttttacgacgtgaattccatttttgaagttattagatacatctaacgccatgttggcctcaatgcacaagtgcccaaccctatgtagaaaatatgtggttcagttccttgttttgagaatagcagaaaatatttgcttcagttatctgttttcataatagcaaaaaatacggatttggttctctgttttgagactagcagaaaacgtgtgcttctgttttggtttttgtacccattacaaggacttggagctttgctgttgttctgctcgtgccctacatgaccatccactccaccaatggcagtgttgtcattgataactgtaatgtttattggacgataggaataatacttgttcatattgtttactcttagtttgcttgcggtgtgaaagatgtaatattggaattatattttttccttctcatgggtgaattggtgagccacaaatatggatgacattttctcgtgcctcagtctttagtgccattaatttgttagcatctaccttatttctggatatttgtatgcgtcagcagcatttcgttcaaagaatatcttatcattttaccttattattcaagttacatagagtctatgttgatttgtatttctattgttttgatagaaaattcttctgctacctatacctgaatgttactgatagcttacactaatggaagtcaaaatatcgtgggacatccagctgagcgagaagatagtgttgcatcaagttcagttttttttgtcatcaagttgtaggctgtgtggtacatccagctgagtgagaagacaatactgcaccaagcgagaagatagtcctgcaacaactcgtgccatcggcttcctcgacggcgaacgctcgtgaccgtaggaaccatattgtagaaacatttgcgtggttgaacaatagatttcaaagtgttttatgaaaattatagagagctattggagcattgtcttttttggatttattatttttaaagagatcccaatacccttgttttggaagctataactttgtgagttgatggagatgcttttactaattctgaattccgatgctgtaacaacatatctgaagagaattgttttggttagaactaggatctctattattcattgttgtgttgttgtaataagacttgccttgcctagctatatgcttgaatggaaggttttgttgggacaacatgtaagtttgttctctatccattacataaggaa

SEQ ID NO: 32834 - DNA, 7577 bp, Zea Mays
ctgctcttggcaactgatatattcagggagaaaggtattaaaatcattaacctggaattgaaatgtgggtatgctattgccaacattgatgaaaggatgtttcacaagaagcgcacgattccagaatataacactgtctctttgaacaccggagattctatcacagatacttcagcgctcaaacaaacatcgaaaagcaaatctattctaccgctgttaaagaaacacatgctcacatttccagataaggttagcttcagtgtgccgaagcttgatgtgaagttcagacacctgcatgaaggacttagtgttgacaacaacattacagggatccagtttacttgtgcaaaatccctaccacaagatgattttgaagaagcgacaccacacttcgatgttcaaattgatcttagcgaaattcatttaattagagaaggttctagttctctgttggaagttctgaaagtttttacaatagcttctttggatgtccctgttgacccatttcttccaatcagagctgagattgatgccaagcttggtggtacccaatgcaatattatgttaagcagactgatgccatggatgcggcttcattctttgagaaccaaaggaatgaaactttctaaaagaaactccaatcaagaaatttctcaaaaaaaggagatgaagccaattttgtggacttgcacggtcgctgccccagaaatgactgtcttgctttacagtctaaatggattggtcttgtaccatgcttgttcccagtcatcacatttgtttgcaaataatattgcaagcaaggggattcagatacacacagaacttggtgaattgctggtgcacatggaggaggaatatagagagttattaaaggaaaacatatttggtgtggatacttactctggttccctaatgcatattgctcggatgagccttgattggggatatagggaaagtgatgtccaagatatggttgaaactagcaggaatgcacttgttttttcgattgatataagtgatatggaagtgaaatttggcttcaagcatttggaatcaattgtgcttaatttgatgtcgtttaggactctatttaagagtctccagctatctggcggaagtgctaaagaaaagaatttggagcgtaaaggggagaagaaaatgaaaggtgtgaagaaactgaaattaagcctacaaaaattctctattacatactgtggtgatgcaaacataataagtatgccaattgctgatccaaagcgtgtgaactacggctctcaaggtggtcaagtaattgttagtgtttctgctgatggcacaccacgtagggcaagtataacatcagttttaccagactgccacttgcggttctccgcatctttggtaatatctcatctctctatgtgtatagacaaggagagaaagacaacagaagcggaattggaacgggtgaaggcaatctatgaggaattacctgaggatcgctctggtgtcagagtaactttactagatatgcagaatgctaaaattgttcgccgatccagtggtcatgcggaagttgctgtttgttccctctttagtgctactgatatttatttgagatgggaacctgatgctcatttagcactatatgagacattcatccgctttaagcatttcctacatcataatgtgtcccaaaattctgaaaagatgattaatactgaagttgcaagtaccaaatcaaatgaacatggcaacataactgccggtttcattaattctcagaaatccaacagaaaagggtcaatttttgccattgatgtggacatgttaagggtatctgctgaacttgctgatggtgttgaagcaaacatgcatgtacagtcaatctttactgaaaatgccaagataggtgtactgtctgaaggtctttctcttacttttaatggcgctagagttctaaagagcacccgtatacaaatatcctgtatacctttcagcactgggagtttacttgatgcaaagattgaaccatcatccaaaagagactgggttgttcaaggtctagatgtccatatttgcatgccttacaggttgccattgcgtgccatagaagatgctgttgaagatatgtttcgtgcccttaagcttgtctcatctgccaaaagaagtataatctgtcctgatgaaaaggaaaaatctagaaaggttaattctgggggatccaaatttggatctgtgaaatttgtattgcgtaaattgacagcagatatagaggaagagcccatccaaggttggctcgatgaacattaccatttgatgaggaacaaaatctgtgagctaggtgttaggttgaattatcttgaggaagctatatcaggaagtgtagatccgagcaatcacagctctgagagaaaagttctctacaatggtgttgaagttgacattcatgacaccacagctcttcaaaagttgcaggaagaaatccataagcaagcatttcgatcatattatgtgtcttgtcagaacatggtacttgcagaagggtcaggagcgtgctcagaaggttttcaagctggattcagacaaagctcgcgaagagcttctcttctttcactttctgcttccgatctggatgttactttgaccaggatagatggtggagagatagaaatggttgaatttataaaggggcttgaccctgtctgtcaggagcaaaacataccattttctcggttgtatggtagtgatgtttctgtcgttgctgggtccttggttgtacagctaagagactatacttctcctctgttctcttcactcagtgggaaatgtcaaggccgtattgtgcttgctcagcaggcaacatgttttcaaccccaaatacaccaagagttgtatattggaagatggcaaaaggtcacgatgctacgttctgccagtggtactacgccagcaatgaaaatgtactctaatttacctatttatttccagaagggagagatatcttttggagttggttatgagccatctttcgctgatataagctatgcatttcaagtagccctgcggaaagttaaccttagcactagagcaagctgttctggtctagcagtccaactgcctaaaaaggagcgcagcttaccatggtgggatgacatgagatactacttgcatggaaagataattttatatttcaatgagaccaaatggaagttcctggcaacaactaatccttatgagcatgtggataaactccaaattgtctctgaatacatggagatccagcaaactgatggtcgtgtggatgtttctgcgaaagaattcaagatatacataagcagcgtagagagtattacaaagaaccgccgcataaaagttccatctcgtgtgcccagaccttttatatatgctcctctattctccctaaatgtggttattgattggcagtgcgaatctaggaatccattgaatcattatttgcatgcactccctgttgagggggaacctcggaagaaagtttatgatccatttcgatctacttatctctctcttaggtggaacttctccctcagaccattgcaatcccagtatggtaatggcccaccacctcccttttatggaaataattcaatgctccgtgggatcatgtctggtagtccttgcaaaatgactgatgatgacttccctaccatgaacctgggagctcatgaccttgcttgggttttcaaatggtggagcttgaattacagcccccctcacaaacttcgttccttctctagatggcgtcgttttggaattcctcgggctactagatctggtaacctctcgctggacaaagttttggttgaattctttttccgtgttgatgctactccctgttgcataaggcatgcacctttaagtgaggatgatgaccctgcttttggtttgacgtttaagatgtcaaatttgaagtacgagttatgttacagtcgaggtaaacaacagtacacatttgattgtaaacgtgaatcactggaccttgtttatcgtggtctggatcttcacaggccggaggtttatttgatgcgagataacaatttgtcttcagttgaaaatgtatccaaagtaaggactatggtccaacagtcacatggaaaatttgttcatgacagatgcaacatgggtaatttccaagaaaagcatgaggatggcttcctcttgtcttcagattatatcacgataagaaggcaaacacgtaaagcagatcctgaaagacttatgggatggcaggatactgggaggagtcatgagataacatatgttaggtctgagtttgaggatgacagtgaaagtgaccacactctatctgagcctagcgacgacgacgatgattttaatgtggtgcttgctgacaattgccaaagagtatttgtttatggccttaggattttatggactattgagaatcgagacgcggtttggtcgtgggttggaggaatttccaaagcatttgagcctccaaaaccctctccttcacgacaatatgcacaaagaaagatgattgaagaaaggaatgctgagggctccaaggtgccgcaagattccagctcttccatacatgtgggttctccatcagtgcaacatctggatgcttcgggttcatcttcctcgttgcatagtaaagccaatcgctcctctgatgtggctgtaaatcatgacatttttgatgattcggataaaggagggacagcccaatatatggttaatgttattacaccccaattcaacctacactctgaagaagcaaatggaaggtttctacttgctgcagccagtggtcgtgtactggctcgttcatttcattcagttgttcatcttgggaaagaaatactagaacaagcacttggaacaagcagtgcacagattcttgagttacaacctgaaatgacctggaacaagtcggaactctcggtgatgcttaaagatgttcaagctcatgtagcccccactgatgtggatcctggtgctggtctacagtggctccctaaggttctgggtagctctgagaaattgaagcgcacaggttaaaccactgaaggagctacgctttaactctccagacattactgcaacgatgacctctcgccagtttcaagttatgtttgacgtgcttagaaatcttctattcgcaagacttcccaagcctaggaaaaacagtcttcagtatccatcagatgatgaagatattgaagaagaggctgacgaggtagtacctgatggagttgaagaagtggagcttgcgaaaattacactcgaacagagggaaagggaaattaagttactgcttgatgatataaggtctctcactggaaatggtgataatgggaccgatcactgtcattctgcagaaaaaggtggaaggactgaaaagggatttcgcaaacctacaaaagtctagaatatttgcatcatcagcattgaggaaagcactttcaaatgcttcacaatcacatttggagaaagaaaagaacaaaaccacttcttgtgccatgcggatttctatgaaaattagcaaggttgtatggagcatgctcgcagatggaaacacttttgcagaagctgagatcaatgatatggtgtatgattttgatcgggattacaaagatataggcattgccctgtttacaactaaatactttgttgtgcggaattgcatggttaatgcgaaatgtgacaccttattgtctgcctggaacacacctcctggaaaaattaacatgcttcgtgtggatgccaagcaaggtgctcctaaggatggaagttctccacttgagctcttccaggtggagatctacccactgagaatatatctatctgaagcaatgtatagaatgatgtgggattacttcttccctgaagaagacgattcacaacgaagacaggaagtttggagagtttcaacatcaaccgggcctagaagaacaagaaggctctcttctggtgtcgatgctgttacttctagcagctattctgtcagagatcatgaacttcctgggaaatcaagtacaactgtatctacatcaacaaatgtttcaagttggcaaggtatactcagcgataactcacaggtgtcaaagtttcagagtataaaagcaaatatggtatgtggttcgcatcaagagttgcaccggtcgtcttcatttgaaaggaattgggaagaaagcgctgcagaaagtgttgcaagtaatgatgtggtatcactcctgaattcttcaattgtttcttcaaaagtagatgctagcaattctgtcttagagaaccctgttgtgggaagtgagatgtggagaagtaaaacgaaagattctaagcctgccaagtctggacgtctatctcacgaagaaaagaagcttgggaagtctaatgatgaaaagaagacaaaacctcggaagtcaatggaatttcataacatcaagattggcaaggttgaacttcttgttacatacgagggatcaaggcttgctattaatgacctaaggttgcttatggatactttccacaaggcagaatttactggtacatggaggcgactattctctagagtcaaaaaacatatcatctggggagttttgaagtcggtaaccggaatgcaggggaagaagtttagcaaccatagggaaacacttgagggttctattcctgaaaatgatcttaacttgagtgacagtgatgttggtcaacctggaagacatgatcaattaacagcttcatggttgaagaggccaggcgatggtgcaggtgatggatttgtcacgtcaattagggggcttttcaatacacagcgccgtaaagcgaaggcctttgtgattcggacaatgcgcggtgaagggcataatgacgaatatcaagacgaatggagcgagagcgatggtgaatacccttttgcgaggcagcttacaattacaaaggccaagaagctcatacgaaggaagttccgtccaagggtgcaaaagaacccaggtctgtcgatgcaagattcactcccatctagtccgcgggaaacaactccatatcaaagtgactcctccaggtcatcttacgaggacttccatgagcagtaaaacaatctggtgatgctgctttcagcttctacatttggtcgataagatgcagccatttatattggttatagtagggtgtatgtatatagtaggatgtaccatcaaaatccaatgtatcatgtatagtggttaggcaatactccgtaattatgtgcttgtaagttaataagaggccagctcgtactcctagaaaacaaaacccgtgatctatggcatggggcattctcattcccttgtacttcaggactagtatggattgtaaattcaacggtgaaggtgttgcaacatttattcagtaaagtatccttgttgaagaatttgtaaaaactatggcagaaacaatagggaaggagcaagtgactaggtgcctaggtgtattatgattcttttgctgactagttggaagttagaaatgcattgctccacgtcaaaaagaaatgcgtggcagacaaggttgttgcttaacagatcggtgagctatgaaatgctatctgttca

SEQ ID NO: 32835 - DNA, 820 bp, Zea Mays
ctaagggcttgtttggaaggccactttctcgtggagaaatcatactttttcctaggtccaaagctcacgtggaaatatacccgagatatactttttggtccatttggaagacaaacaccccggtccagtcctcccccgatgctgagggatacccgtggaagccctcatggccacctgaggccgggcaaccttccccagtttggaagggacacaagcggatccgagcaaccacgccctccgccgccactatcgtccacaccgctgccatccgctctgctgccgctccatcgtcgtccttccccgacgcagtcgcgagcgggacgtgaggcgacagtgccctccaccaccgccaccgtctcggatttgtcgccctccgccgccatctctgccctcggttcactgtcctccaccgtcgtcttccgcgacacgatgtacaatacaatgttgtctccaagacacagtacatggtcttctccaagatccagtacaaggtcgtctcctccaagatccaaaccccaacgctagtgagagtggaaacaacacatgaaaccaacatggagaagaaaaatgaaatggcattccacatgaagcttgtgaaaaagtgttaaactcgtaatttattctagtgccgaagttcttaaccaacagacttgtaccatttttatattatatttctaatagagatgacattatatgatgtgatgatggatgaattagctttgatggatattatatggtattcaaattaaactttacatgaatcatatgtggtgcattatttttggatttttagtgattttcattgtgtttctgattttcc

SEQ ID NO: 32836 - DNA, 850 bp, Zea Mays
gccgtgcgtccgtggctttgcatctgcaaccccgcccgatcaatcttcctcgttccgccgctccctcgcctccggcagcgaggtgaggccaccgatcggaccttccctagcggcggcgcctaccaacctcaaggagcgatggctctgtctgcgacgctacggatttctcttagcgtcgcgttctttggggttctggcgttcgtgcttggtgtcatcgccgaaaacaaaaagtataaatttatgcaagaggaggatgggttttggcatagtggtgggaagccttcccattcagccaaaggtcctgcattcgacgcagcctctttgcaaaatgctctctgcaaaatgcttgtctcagccctggctcttgcaatgtcgctgtgggcaactgtcaccgagggtcttcaccgcagcaagaacatccaccacgacatggactaccagtgccctactgccaagaccggcctgttcggcggcgccgctttcctcgcccttgacgctgctctcttctggcttgtttgccagatgctggccctcaatgcaagggctgactaccttgacgaggatgacggcaagggagaatatggccagatttatgctgctcaagtcgatgatggctcgaaggtctgagcctatgtggtcatgctcggcagggttctatgattagtgtcatttggctacattatgccatcaacaaagtcgctttagctctcagtaaatttgtatataagttgcaaagtcttacataaggctggtggttattgcactttcgtgtttcagtgtgatcgataaacagtatctcagtacaatcggtttgctatgccccttggcgaacttgtccttgagttttctg

SEQ ID NO: 32837 - DNA, 1317 bp, Zea Mays
tgttagtacactatcccgtcttcggatccataatatcctgttcagcggaggaaattttgtacataatacacttacctgcaatgtacagaaacaaaagggctatttactaacgtctgctgcctgacagaattgaactagatcgcttggtacttgtacatggcccgatggccgccctttgcgattatctttctcactattctcagtctactatagagatgagtgccatggcatggtagcctcaataacaacagatatagtttacttgtgataaactgaagagatagtcatgaacagcgtcctggaaaatcaccagatactgcccaatctgaatctatagagctaagggaattctgtctgtgttatgctcctctaagtgctgagcctcctgatctgatgttgccccgtgaactttgagttccaaaactacacaatcatcacaagcaagtgcaaagggccaaagtttccagccggcccatgctgtgccgcactcaaggagttcgcgtgcccttactatacgtacctcaatgacgagagcaacgactgtgcatcgacaatgttcagctacatcaacctgtatggtaagtatccaccgggcctgttctccagcgagtgcaaagaaggcaagcaggggctctcttgcgcagatgtcctcgagagagacagtgccactgcaagcagtggtcatcacgctcaaatcagcttgcttgcgttgattactgtcttgagtgtggtagtagcgttgttccactgaactatatatgcattctccccaaatatggtgtgttacaactaatgaggtttgaattgcaccttttggtgctcatggtgggtgggattctaggttcttcctttttgtgtgtaaagtctcacataatgttattcatggcctattgcatacttttttaattcaatttaatatcgcagcgggtctgattaaggctatgactagtagatcgtccgtatgactgtacaaaatattgtttacattatagactattgttttacattgtgtactttgaaatgagagataattgtttacattatagactattgttttacattgtgtactttgaaatgagagataaagacgaggatgagtaaactgttggagtggagatagcttaagaggtgggtaaagcatttactcatatgtcccatgacaattcatccttctctatcaactagtacaatatttgtgtgtgcgatgtcatatcaatcatattggacggtatagtggtacaatggttgtatgacgtgatggtctagtggtaagacaatgtgatgtacccttttcacaaaaaataaatttaaaattaa

SEQ ID NO: 32838 - DNA, 2752 bp, Zea Mays
gtcacagtgccgagaaacggcaaaacaacacggccaacatgacatgtggatgatgagctggtagtcatgtccagctcagctcagaaatgggaccccggcgagacctgccgcctatcacgagtttcacgacggcgactcggcttgcccattcaatggaggtggtgggtctcccccgtttcgtctcctgccattcgtcctcctcctcccctgtctctctctccatccatccaatcccacctggagaaaaacgagacaaatcaaatctcgccgcgagttgggcgctgagcgcgggcgccatggcgagcaacagcgcgcccggcgccggctacgagtgcggcagcgacaacgacggcgggctgcacaagccgctgctgcccaacagcgggagctgccaacggacggggtcgcgccagcccagcctcaacgccgccggcacctcctccagggccgtcctgcgcgagtcccacgtctccgccttcctctgcacgctcatcgtcgcgctcggccccatccagtgcggcttcacaagcggctactcctcgccgacgcaggacggcatcatccgggacctcaacctctccatctccgagttctcggcgttcggttcgctgtccaacgtgggcgccatggtcggggcgatcgccagcggccagatggccaagtacattggccggagagggtcattgattattgcagcggttccgaacatcatgggctggcttgcaatctccttcgcgaaagtatggtgctaagtgtgtcagtttattcccactcattgcttcacaaatgacaacatcggccttgatggctgtcgatgtatggtctgctctgcagcacacttcgtttctgtacatgggacgattgcttgaaggatttggtgtcggtgtcatttcctatgtggtatgtataataaaacttcatgcctggttatgtcttgagagtatgagtacttgtgctttttaacctatgatatgtcatcatttttagacaaaatgatctaaggcccaggaggctcgcctgcagctaagattttgcttgcataacagtcgttcccgtagttatatcagctaattttggtctgtgaattctgggccaccaggtaccggtatacatagcagagatatctcctcagaacatgagaggagctcttggcgctgtgaacccgttgtctgcaacatttggtgtcatgtttgtctatgtgcttggcttgttttttccttggaggcttcttgcattaataggaacgttgccctgcttatttttgatacctggcctattcttcattccggaatctccaagatggctggcaaggatgaataggatggatgattgcgagacttctctacaagttctcaggggattcaatgctgacatcactgcagaagctaatgatataaagatagctgtgacatcagcaaacaaaagtggtacaataagttttcaagagttgaaccaaaagaaaaaccgcacgcccctaattctaggaattggcctacttgtgttgcaacagctaagtggaataaactgtatagtattttattcaggtagcatcttcaaagctgcagggctcaagaacagcaacttggacgcatgtgtacttggagctctcgagcattcatcaggttcttgccactggtgttacaatcacgttcttggacagagctggccggagaatcctccttattatatcttcttgtgggatgaccctaagccttcttgcggttgctgttgtattttacatcaaggataatatttcacatgattctgacatgcataacatcttaagtatggtgtcgttggttggtgtcgtggcttatgtcattgccttctgcttcggcatgggtgccattccatggatcattatgtctgaggtatagtacctcaacacatgagatgcttgagacacatgctgaaagctctctgaacgaagggattattctcgaaactttgcatatcgacagatccttccggttagcatcaagagtgtggcaggaagctttgcgaccctagccaactggttgacatcctttgggataacaatgacagcaaatttgctcttgagctggagtgctgcaggcacatttgcctcctacatggtcgtgagtgcgttcactctaatgttcgtcatcctctgggtgccagagacgaagggaagaacccttgaggagatacagtggtccttccagtagtgagctgcagcagcattcatcagtaaatgcagtcatcagcaaggtctggtctgagctgctgtatgtggtgtggcggcatttcttcttctttttgtactgcaatctcttctgtggcatcatttggtgtgtaagtttcctgcatgacattgatagtagggattaacttgcatttgtgacaaattagttgatagtgataggatccctttttgacgtccccatatcctccgtgtggcggcatgggatgtcaaaaggaaagggatggagttttctcgcttttggtgtagcaggcctccctttggtcaagtagtcacagacccattttttttttgtcattggattggatacgttacagggttcgctcaccacccacactcgagactgttcattaagtttactcttatggagatgatcgagtggaagttggataaggattggagtcggatgtatcaggtgccaaggaatccttgtattcggtaaaaaatctatgctaagaatcagcatatcccttgcgcaagcaagagcgttccccttctttctaattcaaaaaagaaagggacggtaag

SEQ ID NO: 32839 - DNA, 2081 bp, Zea Mays
acatgtgttcagttcccacttgagcttcttggttgcaatggcactgccattcatgcatataccgagacatctacaagctcacctcctgcgcaagaatcctcttacttaccaccgtagtttcaaaaaagacatttcaagccccaactccgtcctggagccacatagtgaagagctccacaagatacatcttggtctttcctctggtgtggaggatgcaacaaaatgggagcatataaacataaagagcatagaaccagatggtgcctatgtgattgctagccaactaaatctcgttgaggaacagcaagggggtagctatgttgctagccttgagttggagcttcagcaggcacgggatagagtgagcaagctagaagctgagcggttttcagccaagaagcaactgaatcacttgttcaagaaacttgcagaggagaaagcagcttggcggaacagagagcacaagaaagttcaagccattcttgaagatatgaaggctgatctggagcatgagaaaaagaaccggaggcagttggagactattaacttcaagcttgttgatgagttgaaagaggtcaaaatggccgcgaagcagctattgcaagagtatgacaacgagcagaagacgcgggaactcacggatgaggtgtgcaacaagctagtgagggagatagaggaacacaagtcagagatcgaagccttgaagcaggattctgtcaaactacgcggcgacctggatgaggataggaaattgctacagatggctgaggtgtggcgtgaggagcgagtgcagatgaaacttgtcgatgccaagctcactcttgaggccaaatatgaacagttgagcaaactgcaggaggaggtggaggctttcattttgactttcagctcttccaaaggagacagcacaattgttgaagccgcacacaacattgtacaggccattgggtcggccagagaccaagaggttgaattcacatatgagccaccaagagcatcagaagatatactggccatctttgaagagctacgcccaagtgaagagatggagaaaaaggaaaccgaaccatgcctaaagcaagaaatccaagaagctagcccaacagctgatatatttctggaaaatcgagccagattgttcccagatggaagccattctgatgagagcgataaggaagatggaagcagctgggagaccatgagccatgaagagatgcaaggctcaagccattcgccgtatgaaagtgaacattcagtcaacaagatctttgacagaatttcgtggaccagtggaaatgattctgagggtgagcaggccaacaaactgtgtgatgacttgagcagtgtgtacctgacggacatggaacagtccaagaagaaagagtccgccatatcaaagctgtggaagtcatctccactgaaaaactgtgaattccgtacaaaagatgttgcggatatgataaatgggagattatcaagtgcaagtcttccaaatggtgtgtactctactgccaaaggcttgaatctagatatgggggacagcacccctagcaccacgcaatggagctcaccggattcgatgaacagccagctcaaccggggtttcagaggttgcatggagatggttcagaggcagagcctgaaggcgaagctccttgaagctcggatggagagccagaagattcagctccgccatgtgctcaaccagaaaacttaagttagaaccgcactgtgtcgaaataaaattccaagcattggatttattacatttcccttgtccattgtagtatgtagcttaatctcatgtgtttctgcttcatagaactatatagctagctatagccttgtaggctgacctggccatggttgatgcagctgtctaattgtggcagtacatttgacaggttatgtgcccgtctttatgtgtaatgtggcagtaaactgtaaaccagaagcattattcagactaactgtaccagtactgtagcaggctggcaacaaacaaaatgcatcgttcagacaaactgtaccattggcagtgaagaattttaaaacatctgagaacgtgtttccatcagaag

SEQ ID NO: 32840 - DNA, 1558 bp, Zea Mays
tggtatggatccaaatttccctttatgatttccctgcgagcacaaagctagcgaagataccaaacaatggggagcacgagcgccacaggcaccacgtcgtcttcctcatcggctgcccacgggggcggtgccgcacacgtactgctcctgccgtacccgggcgcgcagggccatacaaacccgctgctccagttcggccgctgcctcgcctaccacggcctccgccccacgctcgtcacctcgcggtacgtgctctccaccaccccgcctcccggggagcccttcagggtggccgccatctccgatggcttcgacgacggcggggcggccgcgtgccccgacctcgacgtgtactggcgccagctcgaggccgtcggctcggagacgctggcggagctgatccgctccgaggccgccgatgggcggcctgtgcgcgtgctggtttacgacccgcacctgccgtgggcgcgacgggtggcacaggcggccgggctggcggcagcggcgttcctatcgcagccatgcgccgtcgacgtcgtctacggggaggtgtgggcaggacggctgccactgccggtggtggacgggaaagagctgtttgcacgcgggctgctgggtgtcgagcttggtcccgacgacgttccgccgttcgcagcaaagccagactggtgccctgtgttccttcgggcatcactgcggcaatttgaggggctggaggacgccgacgacgtgctcgtcaactcattccacgagatcgaacccaagttagaggagcttggcaatggattgtacaattctggcaaaccattcatttgggttgtgaggtcaaacgaagaacacaagttgtccgatgaacttcgtgacaagtgcaaggaacgtggccttattgtttcttggtgcccccaactggaagttctagcacataaagctacaggttgtttcttcacacattgcggatggaactcgacactggaagcaattgttaatggtgtgccaatggtggcaataccacactgggcagaccagccgaccatatcaaaatatatggagagcatgtggggcttgggtgtccgggtgcgcaaggatgagaaaggcttggtaacgagggacgaggtggaaaggtgcatcaaggatgtcatggatggtgatagtaaggataagtataggaagagtgccactatgtggatgcaaaaggccaagtccgccatgcagaatggagggagctcggacaagaatattacagaattcgtcgcgaagtattctttaagttaattttcaaagatttcgtaaaaaagttatttttcaaaggtataatgatagtgttataattacttcctaccttcgtggattgtatgccttcctgcatgtgatatattttgtctcgggattgtgtgtattacgttttgacttgatgctgtacatgctacagcagcaacctccacgtctaaaaatatatacattgttacgcagctatcctttgtaactttatagtcacattattttgtaaaatgaacattatcatgtgcctagtatatgttatgttatattaaaatgggtt

SEQ ID NO: 32841 - DNA, 2666 bp, Zea Mays
ttttttttttcatacgagggcctcaatcgtatattggattagacagaaaaggctaatcttactacattagtctgcaaattacaatcattttctactgctgccgtggcagcgtcgggagtcgaaactaccattaggaaaccctatgaggctatgacacctaattagcgacaattgtttcagcctgcaatcatctgcacaattaacataaccaaatcatatttgtttgtttagagaactaagttcagaacttcagatcaagatgtaattgctttgctgttatcgtctatttgctacattcaggcagactgctgctgctcctcttcggggggctctgccgcttgcccttgcggcgtctgccacatataagtcactgggtgaccctgctggccaccatacatcatacctgctccttgcacctgctgagctggcacatagtaatatggatgagaaccatgatcagctggagcccccatagcaggcggcaggccaactatgggattatgtccgagcccctcctctttcatttcatccctcgggattatgtccaccaggaagtcatatatatcagtcctggtgatggcagctgcaatgtcgttcttctgcaaggtccggcgcttgttctcctctgtgtgcatccatgacctcaatgtcagctctaatatgaatacctcgcatgccttcgcaaacacaacaggagcttctgcagagatcatccgcacatcctcatcagccttcattatcttctttatccttgcaagtggcaaggtgtggatcttgaagtcatttgcttgcttgatctcatccatctgggtagtccagaactccctgagctgttgttcctgctgttgctgaagttgttgatgaaattgctgagcctgctggtacaccatctggtgctgagcactgagttgagttggattggggaatgctgctgctggctgtgagccaggaggaacagcaagagatccaggtactggcacatagggagcagcagcaggataaggttgtgacccaacacccatcattggttgaggctgtgaggatggttccatgctagatctttgttcaaaatcaataagtgtcctgacccttggaaaacaattggaaatttgatcattttttccatccagataaacaagaaagactacaaaattacaggttataacacataaaaatgcaaaagatgtatttcaggttacaacactaaaaattctcagatctatgttgatggatgggattgggaatgccttttgtgtatgaaaaaaatcactggcctttatcttatttattcttgtagcttgaacgctactcttgagagcagcaaataatctaactgaagttacaaaagatgcttgcttgtaaaattccatcttaagcaaaaatccatcttaaagcaactgcagtggtgcaatagcgcattggtataacattttatcctggtggttgatttgggtatcacaaacacagaaacttccattaaacatggaacaaacatatggttacattgaacaagtgaaatcaaaagggagcgtatcctcaaagaataaacagcaactggtaaacagcaaggtagacaagatttacttttcttaaaaaaatcacaacatctattaacgttgtccctagttccctataatgcatgacaggaccgcaaaattacctttcatgctcccactttcaataatttaaaagtaggtatttgcacaaccagtcagtccctgccagtattggtcaaacaggttacggatattgcaaattgctttgatgatggaaaaaacaatttagtttgatggttgactttccattactctgttacagatagcaaaggcatatttaaagttttcataataatctcttttcaaaatcagataacggaaatgaggtttaaagttttcaaagtaatctcttttcaaaatcacttacaaaaaatgaggtttagtatgttctgcacataagcttaagctgggctacaactacctaaataaaacctcttaaataacatggtgatttggtggtttcctgggtagttggcttaagtggagtaaagctgacatgaacatcgcactgtgaataactcaacatcttccaaaaatcaatttcaatagacgcattggagcaaaatttcgcttgtaaattaagatttacgagatgaggggtccagaatcaaattaatcatcacatctaagatcattaaagggcaatcccgacccagtgttggaggctcccacatgagaggggtctgaaaaaaggataaaccaaagcaagccttctctcgcaaatgtgcaaatgtggagagactgattcgaacccgtgacctggtgactcaatgagacagctctcaccagtgcaccaaacgttgcagaaacgtaatccatctgcaatctggaactagcactcagaaaaagtacttaattcccatgtcacacttacagaaattacttgccaaacttaagataacatgcatgccattagttacaatattatgaaagatagcttaaagctcaaattctattaaggtgggtccttgctgagattggatgtgctagcgatttcatatgggacatatgacgatgtatagcaaggcattacccaggtctcctttccctacataggcacaaacatgattcgatggctgaaaggaatattctcgattcttgggagtacat

SEQ ID NO: 32842 - DNA, 1703 bp, Zea Mays
ctagacctgctcccccgccgccatgacgatcttgcgtcggccgtcgcacacccgccgaccctaccatcgcagaccccctccccattgtcagatcgatccttcatcgccccccgatgacaacggcttctcggatgctagggcacctgccacccacccatctccctcccatcccagatccctcgcgccatggccaacgcctccccccagtggcttacgctagcgcacctgcccacctccctccctctcccccgcccagccatggccatcgcctttgactctccgacctcctcccccgctgaaattcctgctctgaaatacgctcgcttctgctgcctagatctggtacccctgttgtcaccacgtttttgccaccaccgtcaccagctcagagctttccctccattgcttcctcctcgtcgtggtctcctctgtgtcactccgctcgagctcgccatcctcttgccagcgcgactccgtggagcgtgcgagacagtgccggtggccgcggagacccgccacggggacatggaggggtaggtgttgccacagttcgtagatttcaacgcctggtacacacacgcgatctccactaccgagctcgtggactacaggtttgtgcgggggatcatggtcatcctcatccaccctacagatacaccatgtgggaggccatccaagttagtgcccattcgctcctcttcccccatgcccatgttgtgcatcatcctgcattgaacgttgctggtgtaaagatgaagagagtgattacaagtgtttctgcctgcatagttgtagattttgaagcatcgtgatgttccatttgtgcatagaatggtcccgaaatggtgtttaggtaataggcacgaatagcgtgtttttgttgttctggttccttgctttatttgcatactcattccttgcagactccaaaactaaatcaacaagttggagatcctccttcctgcagcgcagaagcacagctggttctttcaggcgcagcaaactctgttcagataaaaatttgtgttaactgatgctcaaattactgaagaatggaatagaggagctgcaccaagttcacgcttcatattcgcagagaagaatgcaaactatgttctgcttacctgaacaataagtgtcttgagaagcttcttctggattccaccgtggtcaagccttgtgatgaaatcagatgatgatgacgcaattggcttctgtgacctacaattatgggcatgctgatgctacctagaacctcactacactggatgacagtgtagcatacaagctccaatcggttggctttggtgacaatggagggaggagggaagggtagtggagtttggtatatagatccacccagatggagtggagtacagtacaatgatagacagtgaagagacgagaagattcaattttatttgagttgagcctcaaagttatctacaacagtccactctacagtactatagtgggcaacaaatgtatggacatatgcacgctttgttagtcaaaaggtttagaaatttaggtgtgggagaaagaaaaaaaataaccttgtgaactgcgaagttttttttctcttaaatctcatgataacatttagccatatacagtgactgagaggtgagagcacgctacctgcttggttcctggaacctccttgacgtggagcgaatgcaacaggttcctcaggatgcggg

SEQ ID NO: 32843 - DNA, 1773 bp, Zea Mays
tcgccgcgccacacgcgcacggcctcacccagtcctcgactagccgacgccgagaagcccctcgatggcgaggcgaaggcgcgcagcaatcctgcctcgcttccctccaaattcccaaagctctcgcgcgcggtgccatggcggagcgcctcgccgcctccctcctccctgccgcctcgccgtccccgtccgcccgccgcgcaacggtcgcagccgcagccgccgcctctttcccctccccatgctccgcccgcgcggggctgcgcctacgctcccgcccgcccctcttctcgcagaaggcggccgggcgcgggtgtggcctgcgggtggtgcggtgcatggcagcgtcggacgcggtgcagctcaaggccgcgcgggaggacatcaaggagctccttaagagcacatactgccaccccatcatggtccgtctggggtggcatgattctggtacctatgacaagaatattaaggactggccacagcgaggtggagctaatggaagtttaaggttcgatgctgagctgagtcatggagccaatgcgggcctgattaatgcattgaagcttatccagcctatcaaggacaaatacccaggtatcacttatgcagatttgttccagttagcaagtgctacggcgattgaggaagctggtggtccaaaaattccaatgaaatatggacgtgttgatgtcacagcagctgaacagtgtccgcccgaggggaggcttcctgatgctggcccacgtgatcctgctgaacaccttagggaggtattttatagaatgggccttgatgacaaggaaattgttgcactatctggagcacacacacttggaagagcaaggcctgaccggagtggctggggaaagctagaaacaaaatatactaaggatgggcctggtgagcctggagggcaatcatggacagttgagtggttgaagtttgataatagttacttcaaggacatgaagtttttgagccagcttccctggaaagagcagaaggaacaggatcttctagttttgcctacagatgctgcattatttgaggacccatcgttcaaggtatacgcagaaaagtatgcagaggaccaggaagcgttctttaaagactatggtgaagctcatgctaagctgagcgatcttggtgcaaagtttgatcctcctgagacggaagaacctacactggtagcggtaggagcggcagtagcaacagcgacagcggacgacaacaacggcgcagctccgcagccggagcccttcatcgctgccaattactcgtatggaaagagggagttgtcggatgcgatgaagcaaaagatcagggcggagtacgaggggtttggaggcagcccggacaagcccatgcagtccaactacttcctcaacatcatgatcctgattgcggggttggcgttcttgacgtctctgctcgggaactgagtgttatatcatcatatgatccgattcctgaagtctacgagtgtccatatctacgactagcattagagctacgtacgtgcaaacagtttttttcgcgaattttggagagaaacgagcaaaagaaatgtataacgagtgttggagaaatagcgacctgactatcaacactctacctgtatgatttatctactatgaagcagtggatgcatggatattcacaaatattctcggtgcacgatctgaccgtcacccacagctgaccgagtttttttttttgaactccataactgggcttcttaaaattattattcagaaacatacaattggg

SEQ ID NO: 32844 - DNA, 2153 bp, Zea Mays
gccgaccccgcggccccaccgcaccagcgagccgcccgcacggggaagcacacgcatctccgcgcgccacggacgcccgaggcctcccgtcgcggtggtcgctttcggccctggaccccgctgccggaatcgaatctcctcccctcctttctcctccgacctcccccttccccccatccgcggctccgccccgacccgtgacgcctcgcttcgcacccctctcgcatctccgccgcatctccgccgcgatcctcccgactagccgcgactgcctcccctccagcggccagaggatggagggggcaggcaaggatggcaacccgttgaggaattatcggattggcaagactctcggaattggctcattcgggaaggtgaaaattgcggagcatatcagcactggacacaaggtggcaatcaagattctcaaccgccgtaaaatcagaggcatggagatggaagagaaagttaaaagagagattaagatattgaggttatttatgcatccacatattatccgcctctatgaggttatagacacaccggctgatatttatgttgttatggagtatgttaagtgtggggaattatttgattacattgttgagaaaggtaggctgcaggaggaagaggctcgccgtttcttccaacagattatatccggtgttgaatattgccatagaaacatggtggtgcatcgtgatctaaagccagaaaacctcctattggattcaaaatgcaatgttaagattgcagattttggcttaagtaatgttatgcgggatggtcattttctgaagacaagttgtggtagcccaaattatgctgctcctgaggtgatatctggtaaactatatgctggacctgaagttgatgtgtggagctgtggggttattctttatgctcttttatgtggtactctgccatttgatgacgagaacataccaaacctttttaagaaaataaagggtggaatatatacccttcccagccatttgtctggtgcagcaagggatttgattccaagaatgctagttgtcgatcctatgaagcggatcaccattcgtgaaattcgcgaacatgattggttcaaaattcttctcccgcgctatttgactgtgcctcctccagatagtgcgcaacaagtcaaaaaggttgatgaggaaactctccgtgaggttttaggtatgggatatgacaagaacctgttggtggaatcaatccaaaaaaggctgcaaaatgaggcaactgttgcatattacttactcttggacaataggctccgtacaaccagtggctatcttggagctgaatgtcaagaagctatggactcctcattctcaaacatcgcatcatatgaaacaccaagttcagcacgtgggaatagacagcaaatatttatggagtctccagttggcttgagaccacatcttccagctgagaggaaatgggctcttggtcttcagtctcgagcacatccaaaagaaataatgtctgaagtgctgaaagctctgcaagaattaaatgtttactggaaaaagataggtcactataacatgaagtgcagatggagtcctggctttcctgctcaaattcataacaatcataacttcagtgcagggtccattgaaactgatagcctgagtgagaggttaagtttaattaagtttgaaattcagctgtacaaaacaagagacgagaaatacctcctcgatttgcaaagagtcagtgggccacagctcctctttctggacttgtgcgcggcctttctaactcaactgagagttctttgatttctggtgtcagctttccatcagttgcattccttgcgtttcactagaggaatgtctaaatcgctcacaaagctgtaaatagtaatctccagtagattggattttctggagtatgtagatggtaggcatgagaagatgttatgcctggcggcgatcttctgaaccagactgtgtggagtaacttatctcctaattctttacggctggccagctgccggtgaattagatcagtgcttttgctggcataatgtctatctacattaataatttcagctattacaacggttaattaaatgctgtgctgcttacaggccaaatgagattatgttttgaaggcaactctttttttttgcattaatt

SEQ ID NO: 32845 - DNA, 1067 bp, Zea Mays
aaactaatctttactattccttaagagcataacgagggcgtccaccgtgcccccgcctgctcccgcaagtccgcaatacgtgcccccgcccccgtcagtgtccgcgagcgaccctctgcgctcgcgcaaatcccgcctgagatcgccgctgatccgaagcagcggcaccgtaaccctccccctcgcgagatccgcgaccgccccatcccggcgccacgggatccacgctccgccctcgcccttccccacccccatccgctaatctcgcggccgatccgcgcccggtcctgaccctgcctccgtcctccgcaccgccactccgtcccccgtcctcggcgccgccgtctcccgctcccctggcacgccttcggggtccttgcgggcggcaagcacctccgtcccggagacatctgccgctgcagcatagaccaccatgtcctcgctcggcagcaccgatgttgatgatggcaacgaggaggaggacggctccgcgagcacccccgagatctaccgctgccactcccacgcagttgcgtgtagcctctccatgtgatttccccaatgtttcccttcctctgtagcctctccgacggcgccgccgccgttcttcctcggccgtcggcgacattttaagaacgcctgaggctgttcaaccacttcatcgtctttttgactgcctcacattgaaggaactttgcagcggactgttatatgatctatgaaagaatgcatgtaggaaatatctgtgaatgctacttatattttgttatgcctccttggtcattattctgaaccatagaacatgatctatctccagttgtattttccccttctatggaatcaccattgttggttagtggttagttgttctatttttcctttctttgtatcactacttttaatatatataagcttataggttgaaagatacgaagcagaacagttgagccatagtgcacaactacgatatggactgttagtgggaattgtaattgcatatgccctcaagtaattgatgaaaataaatgtagtattggttttagtttggttaggggtgggtggcaaat

SEQ ID NO: 32846 - DNA, 1368 bp, Zea Mays
tcgtcccgatgccatatggatttctctatcgacacagttcgcaataatcaactcgtttctctccgattgctcctccgagtccgagactccgttctctcccgcatccaccgccgtctcatccccaatccgagcaacgcctcccctcgcctccaaaaccctacccctcctgtcaccggcgggggcatgaaccggtgatcgcttacctggtctcgtctgtctgcgcacgcgcgaggtcagtgagtgagcattgcggtggtccgatcgcccgcggggggccatggcgtctgtggcgggatcgggcggcggggcaagcgcgggggccggtgggttgaagacttacttcaagacccccgaggggcggcacaagctgcagtacgagaagacgcactcccccgccgtcgtgcactacaaccacaacggcaagaccgtcgcccagatgacggtggcatatttgaaggagaagccagcaggccagggttccacgccttcaacaccaagtgctggtagtgggatgcggtctgcagctgcgagactgcttggcactgggaatggtagccggacacttagcttcgggagcaatggtaccagcagggctgtctcaggaagcagccgcatgggtggaggtattggtgtgtcaactagtgcaagtggatcgcaaggcatggcgaactacgatggaaagggctcatacatcatattcaatactgcggatacgctcttcatcagtgatctcaactcacatgacaaagatccaataaagtccatccacttcagcagctcaaacccgctttgccatgcatttgacccagaggccaaggatggacatgatctgctcattggggtgttctcaggagatgtctattcaatgtcactgaggcatcagttgcaagatcctggaaagaagcctgtttcataccagcattttgttaataaagacaaagacaaagataaagatccaagtcaagtcagtgcacctgtgttgcatgggttccggagcgtgaaggaatttttgttgttagtcatgctgatgggaatctgtatgtgtatgacaaattcaaggatggaaatactgattggacatttccaactgttaaggatcaaagccaggtgctaatttcacatgcaaagtcgagtaagggcaatccaattgcaaggtggcacatctgtcaaggtgcaatcaatggcatttccttttcaccggatggtgcttacttggcaactgttgggcgagatggttatttaagagtatttgacttcacgaaagaacaactaatatttggtgggaaaagttactatggtgcactgttgtgttgctcttggaggttgtatacatttttaacttgtgtagtcctgatgactgatgagtaa

SEQ ID NO: 32847 - DNA, 1739 bp, Zea Mays
tcaaacccctgatccgatcgagcccgcacactcccaccgtttcccactcccatggggctcctcagctccctgccgccccatcgccggggcgccttctcgggtggcggatggcagtggtcgttcctcgacgtcgtatggggggtcttcctcatcgccgtggtcgtcttcctcgcgctcgtcttcactccgcggcgcggggaccccatcctaaccaccccctctgtcgcccgcgccggcggcacggtgccgccgtgcgctgcctctgaggtggacctcctcccctgcgaggacccgcgccgcagctcccgcctcagccgcgagatgaactactaccgggagcgccactgcccaactcgtggcgaggcgctcgcgtgccttgtgccgccgccccgaggttaccgcattcctgtgccctggcccgagagcctccacaagatctggcatgacaacatgccttatggtaagattgctgaaagaaaaggtcatcaagggtggatgaagcatgaaggttcgtacttcatttttcctggcggtgggactatgttccctgatggagctgaacaatatattgaaaagcttagccagtatgttccaatgaaaactggtgtcatcaggactggtcttgatatgggatgcggggttgctagctttggtggatttttgcttaaggagaatatcatgacactttcatttgcaccaagagattcacataagtctcaaatacaatttgctttggagagaggagttccagcatttcttttgatgttgggcactcgccgtcttccttttccagcacagtcctttgattttgtccattgttcccggtgtttgataccttttactgcctataatggatcttactttattgaagctgaccgtctgctaaggcatgggggctatctaatcatatcaggcccccctgtgagatggaagaatcaggagaaggaatgggatgaacttcaagcaatggcaggagctttgtgttacaaattgatcactgtagatggtaatactgccatttggaagaaacctgctgaggcttcatgtcttcctaaccaaaatggatttggccttgatctttgtagcaccgactatgatccagatgaagcatggtacttcaagttgaataaatgtgtcagtaaaatttcagtggcggaagagacagctataggttccattctcaagtggccagataggctgtctaaaccttctgctagggcatcagttatcaacaatggagcaaacttgtttgaagtagatagtcagaagtgggttaggagagtgtcatattataagaaatcgcttggtgtgaagcttgggagcacaaacatacgcaatgtcatggacatgaatgcattctttggaggattcgcagccgctataatatctgatcctgtatgggttatgaatgttgttcctggtcagaagccattgacacttggagttatttatgataggggccttataggggtttatcatgactggtgtgaaccattctcaacgtatcctcgtacctatgatcttattcatgctgatgcaattgactccttgataagtggcccgatttcaggcactagcaggttactactatgttgagcgtcccaattcctgctatgcctaggttattatcttgaagttgaagacatgtccataataaactgttggtgcaggtgttaatgtgtactgcttaatgagtaaaaaagacctttgacatgtgaatctcaccaaatgtaaattag

SEQ ID NO: 32848 - DNA, 2510 bp, Zea Mays
gagcctttgaccaatgaagatggtaatctcagtcaaagcgcgggatgcatttcgcatctccttcggtccttccccagcccatccggtacggagccaaatctctggccgaacgaaaaagcgcggagatttccagggagaagcagtgttgcagacgcccggattcggggcgcgtcgttcctacatagaccgcgagtcgcctcctgcacctgcgggattcgccgcctgtcccagatccaagaaacgcataacgggcgtggagccagttgggccagggaagatttaaccagtcgggcccggaaggagcctaagggttggatctgatgctaccaggtcgctgagcatcgctactgaagggggcagcttctgattccggcagatggctcctgaaatgatggaggaggggcaatcagcttcctataccgtggatgacgctctcttgtcatcaggttttgggaggttccagatattgattctttcatatgctgggattggcttaattgccgaagcgatggaaatgatgctgctatcatttgttggtccatcagtacagctagaatggaagcttacttctcatcaggaaagcatgattacaagtgttgtttttgttgggatgctgattggagcttactcgtggggtgtggtttcagacaactatggaaggaggcaggagaggctttctctttacagccattatgacaagtggagctggattttttagcgcttttgctccgaactatctatcattaatttccctgagattcttagttggtattggtttgggaggaggacctgttctgggatcttggttcttggaatttgttcctgctccaactagaggaacttggatggtggtattttctgcattttggactgttggaacaatcttggaggcatctcttgcatgggtataatatttgcccctgaatattttgaaactgatagcgctattcatattttataatagtgcccagcatgaaaatcagcagtaaacattgcacatgaacataacctgatgcaactgattctcaatttctcattgtatactccagtttattcagaaatttatggaccactcacgaacagttaaatctgctaatagggttgctgattaccatacaaaagattaacctgtagtattaatttggtctgttacttgatcattttttttccatgcctaattttttttcaccatactaatggcagacaattatgcccaagtttggttggaggtggttgttagcattatcagctgttccatcttttctcctgctgctattttatgccattacaccagagtcaccaaggtttctttgcatgaaaggccggactactgaggctgtggatatattggagaaaatggcaagactaaacaatgtacaactaccttctggtaggcttgtttctgacaaaaatattgagctagatgaagtttcaggatcttcagagtccacgacacttctggctggtgccgaagaaagtgacaacctaaatgaggatcagggttctgatttcggaggtattaagtccgtcggcaagctactcgcaccaaaactgatcagagcaaccctgcttctgtggatggccttctttggaaatgcgtttgcctattatggcattgttcttctgacatcagagctcagtaatggaaacaggatatgtgccaaagaggatgttgaatcagttcattcaaccaatgcaagcctatataagaatgttttcatatctagttttgcagagatcccagggtcatttctgtcggccatgatcgtggatagatttggtcggaagcgttccatggcgtcgatgctcttcactagctgcgttttcttactcccactagtgttctcccggacagatatactaaccagaatctccctgtttggtgcccggctctgtatatctgccagcttcaccatcgtatacatatatgctccagagatttacccgaccgcggtgaggacgacgggcatcggcatcgcgagctcagtgggcaggatcgggggcatcctctgcccactcgtcgctgtcgccctggtgcacagctgccagcagacgacggcgatcctcctcttcgagcttgtaatcttcctctccggcctggccgtctcgttcttccccttcgagacgaaggggtgtaggctcaacgacaccgacgtggacatgaactgatccggtggctgggtgtagtgtgactctcagagcaattttcctgtggcggttaccggaattgcatatggattggatatttttagcaacacgtatacgtgttagactacccgtctagggtttatgttattccccttgtaatgaccgttataccccctgtgtaatgggcctggcccagttactcactctattaatatcactcccaacccctgtttagggtatgggttcctattccaacatggtatcagctaggtttagtctcttctcctcttcccacgcagccacagccgctagggggctttcccctcccctgtagccgccgccgccttcctccaggggttctt

SEQ ID NO: 32849 - DNA, 7233 bp, Zea Mays
cgcactgtcctttctcctttcccttccgtttcatccgggcgcatggacctgcgctgcgcggttcggctgcgctcccgtccgaatcgcgccccttccttaacctcagcgttgctttgctcgtgctgctctctgttccgccgctcgccacaaaacccctctcccctcacgctccccacccacctcctccccctcgaggcaatgccgagcgcccttaacctagcctgagttcgagctcaatccccattccgtcatggatcggccgccgcatctcgtcatcgacctcaacgaggccccgccgccgccgtcgagcgacaccccgccggcgcaggccccgtcgccgccgcaggagttggctccgcccgtccaagctcctcctcctcctcctcctccgccgccgccgccgcagtttcctcctctcctgccgccgcagctgcccctgggtgcgcccaaccaacaggtgcggctccagcaggaggccctcgacgtggtgcttcgggtccaccgccccctcgaactgaggaatacaccttttgggcccatagggaacgtgcccgccggcttgctccctggtctggggctgccgctgctccctctgcagccgccggcgcctcaccctggggaggcgggttggggcaacccgccggccccctgctcgtcctgcggtcgccaggagattctggggggaaccttggtctgcgacgcgtgtgacagggggttccatcccaactgcgtccgcgtctggccgcctctcttccccccgcccccgccacccggcccccctggcgcccggcggccccgtgccgccgccaacgaggactggatctgccctgcgtgtgagaggcgtggcgctcgctccacccgctggaagctaggtgcagttgagcttgacatcaacgctgctccgccagaggaccccgtcacagtcatcgccaatgacatccgcagacaaaatatcaccgatggaccccagttgacagttgccaacttgccacattttgaggggggtcacttgcagaatactactctttatgatggaatgcagtttatgccagcatttgatcttgcccagtgttttggcatgagacaaaattttacttccatggatcaagatttaattgctgatggaaacgtaccacaaagatcagctcatttacgcagaagaagagatcttccacaaacatcaacattacccaaggttgcagtgaaccatgagttaggaagtgctggcacgtctatggatccatcattttttaacaatacaatcaaacaaagtcctagtgaaaacagaagttccttaaagcctccaatatttcttatggagaacagtaatcatcagccacatcatcatacagttgcactacctgttcaatatagtgattttttcattaccagcttgggagaaattgacaatcggacaagttaccacaattcataccagatatggccagttgggtttacgtcttactggcatgatagagttactggttcactgtttgagtgtgaagtgcacgatggagggaattttggacctttgtttaagatgagaaggttaccgtgttcagcattccaacttccggatgcatcaaccacagtgtgcctaaatgttgttaggaacgctgatacaatagaaacgaaggaaggtagtgatttgattgaagatactgccaatgatgctaatgataatatttctatgctcttatcagatttctctgagacgaatcaagatttcttatcatgtctaggtaatgatttggagggtaaagaaagtttagggtgcagtaatgtagaaactaaggatatgacagtgccagatgtgctgtcagatcctggctctttcagttgggcaccgaccaatgatgcaaatatgtatgacaaaattggtgacttcagttatgaaggaacatcaccttcctcagtctggaggatgatttcttgtgctatgatggaagcctgtgaaaaaatgtacaaggagcatggccatttggtattattctgcactcacagtagtgaaaaatctccatttgactatgaaagtggacctcagcgcactgatggtcctttcaatctattggctaagttttgctcatcaaatgggcctaaggtaccacagtttatagaaaaggagaatgatgtgcagtcaacttgtgcattacttaaagaatggctgtatccagacagaatcgggtttgatttggaatttgttcaagaatttgtggaatctcttcctaaatccggggcttgttcacactatcagttcttgtgtaacaggactggaattaactcttcactgacgattgcaagtggcacactggtagctgttaataaaaatagtccaatgcatgcgagacatggatctgtagtgagtgggccgcaggatcatgctcagcctagctcttctagcatccgtgagcttcctccaggaaatcctattagccgcaagcttgcaccagaattggctggggatgttttccagatattggagtttcttggacgatttgctgaaatcatcggcctgaaagaacttccttcaattgagcaagtagaagatgaactcattgacccatggccaatgcatccaaataaaaatgacatccacaactacatggatcacaatccaccgatgaattcacctgctaatgtttcttcatcgtactcgaatggcgaatcaggtataacttctattgaagaaatggtatatgtgtctattccagttgagacttcttcagcacgagaagctgctcaaaataagttggctgcccagacacttgggagatgtagtggtttagtgctgcctgagatccacattgcactcttgaaggttcttttcaccgaacttgtatctagagtcgcaatttttgtggatccaagcattgatttaaaagaatcaaaatccagacgaggaagaaaaagggacactgatactctaacaagagagttaaagattgatatgctgactgctaacaatttgacttggccggagttggctagaagatatattttagctgtttcttccatgagtggctgcatggatttatctgatatttctagtcgagaaggagtgaaattgttccgctgcctacaaggtgatggaggtatcctgtgtggagctctacccggggttgttggcatggagaaggatgcatcgctacttgcagaggctgaaacattgatatgcaattcttcagcaaatgaagggaataccgtctttatgatggattacaaggatactgatattgtagattctcctgaggagcctgctagtgacactacgttgccagattgggtgaaatcattggagcctgtgagaaaattgccaactaatgtgggaacaagaataaggaagtgtgtttatgaagctttggagagaaaacctccagaatgggcaaggaaaattttggagcactcaatcagtaaagaggtctacaaggaaagctgttttatccgtcttgacagaggcatgccgtacaaaagtaccccagaatacagaaaaaccaagaaaagagagaaatattatctccatctcagaggctgtcctgaaaaagtgccgtattgccctgcggcgtgctatttcctctgatgaatcaaagcagtttgctaatttgcttggaacaactctaacaaattccaatgagaatgaagatgagggcatccttggatttcctggtatggtatcccgccctttggatttccgcacaattgatataaggttggctaagggagcttatcgcggatcttgggaggcttttcttgatgatgtacaagaagtaatttgtaatctgcaaactgcatttgctgatcgacctgaagtgctgataatggttgttgcactgtctgagagttttgagtcattgtataagacagaggtacaagaccttgttgagaaatttgacagatatctaagcaatgaaaatgatagctcagaaatccaccaggagctacaagatgctctcacggcagcaaacaataaactgccgaaagcaccatgggaggatggtgtctgcaaagtctgtggaatcgaccgtgatgacgagagcgttcttctatgtgataattgtgactctgaataccacacttattgcctgaacccaccactggcacgcataccgcttggaaactggtattgtccatcatgtactgcccaaactcatgttgcagtgcaagaacaaaagaagtgccttggggaggaagctcatgtttttattgagaaactcaacaagttagctgttgcgatggatgagaaagagtactgggagctaaccgtagcagagagaatctatttgctaaaatttctatgtgacgaattgcacaacacagctctcatcagagaacatctagatcagtgttcagacaagtcaaatgatctccagcagaaattacgtcacctgaattatgaactgaaagagttaaggtatcgggtagaaataaaaaatccttatgccacacaaagtagatggatgaaaaatgaccaagtaagcaatagttcaggactcgtggagaatcagcagcgtgctatgcccacagcctcagagcatcttgaagaggctgaacaggttaatgttggagttaacctgaacaaccctgctgaaggggttcctgctgcactattggatgtgggtaaaccttgcagtactgacaatggcatatccagcacatctgttattgaaggaaataaatctttggggctttcagaacaaccatcaaagataattactgaccagactgatcgggactctattgccgaaggatccaatagttgcgagaaatcattagttggcaaaagtggtacttgtgatccgaatgtgggagagactcatgctgctacagttatcaatgcaccaaatggagatttacctgatgaaaatgctatgacattgtcccaagataatattgaaacatcgacatctaaactggttgaccatgatgctgatatgaacgaatcaaataatttattggagaggatttcacagttgcatggttcaattagcacagtagagtcacagcttagtatggcatccttgagaggagagtgcctgggtagggattctgttggtcgattgtactgggttacaggaagaccttgtaagcgtcctcgtcttgttgcagatggaagcatgatgatacccaaggacagagacattagcatggttacaagccattctcagtcaacattcgatagaggttggaattcggcatcacttgttatttatgaatctgatgaagaaatgaagtgtcttgttgactggctaagggacattgatccaagggagaaggatctgaaagactctatcttgcactggcaaaagtctatttatcgccaggctagtttccccatcactgatcctccagtgtccaagttttcaaagagtgagccacttatggagcttccaaacaccaatgcttttatagttttggagcaaaagtatggtctgcaaacggatcaggacactagtgagctatccaaaaggagaggaacgaagtcaaggtcgggttctgaagaaagagtatatcgctgcgactgtttagagcctatatggccttctcgacaccattgcttaaattgtcatgaaacttatctcacattgatggaatatgaagggcataatggtggaaaatgcaccagcagtaacgactgtcctaatgaaagtaaagaaattgatgagccgaaactgaagggcagcaagtctgatataaaggaaaaagatcctgtagttcataattgttccgttgaaccatctaacagtggaaaattggagtcatgcccttatgactttgaagaaatttgtagaaaatttaccacaaatgattcaatcaaggagacggtgaaggagattgggctgcttggctcaaatggaattccatcttgtgtaccttcacctgcatatttccttgacccgccagttctgctaaatgaaagtaaaagaaatgacgataaaccaaatgattggacttcctcattgcaggaatgccaagctgtgtctgccaaaatgtcagggcaagagggatctcaagttggccaagatttttctggcaatgcaggtgatgaggagttgccaaaatctaagaagcctgtcagggatagtacttcagccaaggaagcaccttcaacagacatatccacaagattgctaactgttaatgggggattggttccagagtcatcactgatgcctgtaataggcaggaattttcatatcctgaagcagctaaagattaacttgcttgacatagaagcagctttgcctgaggaagcattcagagcctcaaagtctcagcaaataagaagacgttcatggcgtgcttttgtgaaggatgcagaattaatatcatatgtggtattggcaatcaatttcttgcagagcatgataaaagccgagtttctgaagaaagattggtggtactggtcctccttcactgcagctatcaagacaacaactgtatcatcgcttgcgctcaggatttacaccctcgacgactgcatcatgtacacaaaggatccagctccaaacctgcagccagctgacaatgcaaggtctggaaacaaggggaagaggaagaaagacatagattcatgagcatcgtaaccacaatgctcctggcttcccctgtagattctatctatctgcatttagaggcttctcagttctctggcagcataacaacgcggtcaggtagattggagatatagatggtagtggtcaggtagattggagatatagatggtagtgatacaggtcgcaacctatgtgtgacctctttcttactgtacattccagtgtcacagcaagggtgcagccatgatttgcccgtttcagtcttgtcctacttactggcctgccattgcgcgatatctgctgttgctaaggctcaatctctgtaaattctactcgagggatggcaccgggcaagtgctggtgtttaatctgttgcccgatgtgttgatctgttctaggggattagaggaggaatgctaggtcggtaggatttaccccatttctaccctgcttcattttattttagtggtggcagtgggtagtcgtagttttttcttttcttttcttttcagagctgggattgtttgatggatgtcccctgcggcatctgactgctttagggaatttgatacatgacgagtgtaatattttttttgacatagaagttgtaactaaaccgaaactaataatgatgaatgaaaatgaatccctgttcctttccccgtttcttcatgttggctgg

SEQ ID NO: 32850 - DNA, 1219 bp, Zea Mays
ctcagatctcgtaaatatctataggattaaaaaactttatttctttctcagccttatcttcagtcttctagccgattctaccatcttcaattcatccaattagatcaaccaccgctcagtcctcctctcttatccatttgacgcttgctccgtggaactctcacgcacgtctctccgtcaagtccctgggccagcgctgctaggccccgttgatccctcatctccctcatgtccggagccctgcttctttttttcccagccctggtgctcgcttgctgctccccatggccgctaaaatcccctgccctctcatggccgctgacccatggcaagctctgccgtcgatctgcgcagctgtcccggcatcgtcgcgcagcgagctccgccctggatttgcgcagccccaatacacgccgtcgatctgcgcagccgcggccacgacagctccctcgcatcgtgtattccgcctcatcgcactcgtcgtgctcgacaaaatgtcgcagcatgctgcaccttgaactgtgcagtcccgattgcgttgtcgtcaccccggaataaaatccctggaaatttggtggagaagaaggttcagttcaacactccctacgtgttcgatgatatgctcaaaccgctggtcgtcgtcgttcttgcaaaaaaaaatcaagtcggatcaggatgtggtacgctagttgatcacgtgatgcggaaatcgagctgagtcgaccacgagatgctgttaagcgtgggcttcttcgcaaggagatactgatgataaacctgaagatggataatctgaacgagtgccaacacaaaaggctggtcaccaagtgatcgtcatctaacaacactcacttagtgtttatcccaggcaagccccggtgcatttgccacctcccttgtgtttacaaaattttatcacttatatgctgcattaggtgataggagttgagtgattaaacacttgatacattaccatccttgaaaggttgattaccacactttgtcacccgttttataaaagctagagatgcttagtcttgctgatagattaagaaacatatttttgatctatgactcatgtttttacaaaaaaagaaaatgggcttgggataatgaaggcatcaagacgttgataaattcattatccaggtatggcccctctgtcaggcgccaaaattttgaaatagtttaaaatgggaccagacgttgagcaggaaag

SEQ ID NO: 32851 - DNA, 2938 bp, Zea Mays
cactgccaagcgcagttgtctctgatgtctggtcacgcctgacgacgccgctatcacgcgccaccctcctgccgacgaacgcggcctcctcctcattgctgagcgcagcccctcacttctctcctggctgcgccaccatgatgccgccacggaatgcgcagagccgccgaagagagcagagtcccagcgagaaacgcaggagctcttccttccacctctggcgaacctccaaggaaactcgacgcccagacctgctcgcgcacagggagcatctttgctccggcggctgctcgccggcctccctgtctcctccccagttcttcctctcacagccgtgcagcgccctcttctctacagtggccgctgctcctctctgaagctatgcgcaggagctctccaggacgccgcgcctcctccctgctacacgccccggtcgacgacgaacttcccgtggtctgggaggccgcgcccgcccagatccgccggaaggagcgaaaggagccccgccgccgctgtcatcacaggccgcacgggcttccggtggcctgctcaggcggcggctagggttttgaggggcgctcgggtcgcccagcgcggggacgaccgagcgccgtctgcttcaaacatttggagctcatcccctcgaaatacagaaggtgcatccacaaaggattaatctcttcgtctaattttcttgggcatacacagattcagagcatatggcgatcaagtagctatgcgttcagctgaggacattgcatatgctgtgttacggttttttgcaaagggtgggtcattggttaactactacatgtatcacggaggaacaaattttggaaggactggggcttcttatgtgctgactgggtactatgatgaagctcccatggatgaatatggtatgtacaaggagcccaaatttgggcatctcagggacttgcacaatgtaataaggtcatatcagaaagcattcctcttggggaagcattcgtctgagatattgggtcatgggtatgaggcacacatctttgagttgcctgaagaaaatctttgcctctctttcctttccaacaataacacgggcgaagatggaacagtaatcttccgaggggagaagcactacgtgcctagccgttcagtctccattcttgcagggtgcaagaacgtggtttacaataccaagagggtgtttgtacaacacaatgaaaggtcataccatacctcagaggtaacaagcaagaataaccaatgggagatgtactcagaaaaaatcccgaagtaccgtgatactaaagtcaggatgaaggaacccctggagcaatttaaccaaaccaaggacgctagtgattacttatggtacaccacaagctttcgcttggagtcagacgatttgccttttagaaatgacatccggcctgtgcttcaggtcaaaagtagtgcacactcaatgatgggatttgccaatgatgctttcgtaggatgcgcacgcggaagcaagcaggtgaagggtttcatgtttgaaaaacccgttgatctgaaagtaggtgtgaaccatgttgtattgttgtcgtcaactatgggaatgaaggacagtggtggtgaacttgctgaagtaaagagtggcattcaggagtgcctaatccagggtctgaacactgggacgttggatttacaagtcaatggctggggccataaggctgcactggaaggtgaggacaaggagatctactcagaaaaaggtgtgggcaaagttcagtggaaacctgccgagaacggccgggcagccacttggtataaggtaagttgaaccaggaatacgagcactataggttttggaaacatcaaacatccatttcaattttggttgcaaccctggcccttggtgtcactatgttcactgccatgctagagatacttcgatgagccagatggagatgatcccgttgtacttgacatgagctcaatggacaaaggaatgatttttgtgaatggtgaaggcgtgggtagatactgggtctcataccgaactcttgctggaactccttctcaagcactataccatattccgcgtcctttcttgaaatccaaggacaaccttttggttgtcttcgaggaggagatgggcaagccggatggcatcctcgtgcagacggtgacgagagacgacatatgtctgttcatctcggagcacaacccgggacagataaagacgtgggatacggatggtgacaaaatcaaactcattgcagaggatcacagcaggcggggcaccttgatgtgcccccctgagaagacaatccaagaagtcgtctttgccagcttcggcaacccagagggcatgtgcggcaacttcactgaatgcctcggcaagccatcctgcatgctgccggtggatcacacggtgtacggcgcggacatcaactgccaatcaacgactgctacactgggggtgcaggtgagatgcggaggcggcaagaagggtgcctgagaataacaagatggatgctgctaattaatggacgtttcagcttgtttgtttgttcatcccttcggtttggcactgatgcttacattgttctgacattgcaattgaaatgtgattggaacattcttgatcgggaactaacatgaaatgagtggagggtagatgctgatcagaccaaagatgtgtatttcccccctctttccttctgtctcgtgttgtttcatgtaaccatcacaatatatatagatgttgaataatcatgaccagtagtatagatcttagagcatccctaacttttgaataaaagactcttggagattggagctggactaactgattgcttcttgcaacatgtatatgaacatttcattaaaaaacgagcgatgagcaaaacaatataccctactaattaagatgttgcaaatgagtttaatcctacagctttgatactgc

SEQ ID NO: 32852 - DNA, 1959 bp, Zea Mays
cgccgcccgtcaccacccgcagcgagccttgctcgtcaccaactcaccatcacgcgcgagcgcgacgcttcagctctctctcgttgaagagctgcatctccagccagtgcctagcccgtcgagggaccggtcgccttggcggactcccgctggaatcgcgctggaatttcacaggaatcagttcaatttcacggaacaaacgcaggagcaaggaaattttgtcacgttcccctcatttgtttccttcggcgacgactaggcgagtgctgcccgctcttcacgaggttttcacctgcgagtctgcgacgaacatcctccagttgatcttctggctggaaaatcacgttgacggtggcaagtaggggttctatcatccgcagcctcatctcaagaagcaaaattctttcatgatccctttgaaccggagggcaagcctgcccagggctgggatggagtactttgatgcaaggcggaagcctcgtaatgttggaaaaatcattgcagccctggtcctcacaacactctgtatatttgctctgaagcaatctcctggttttggtggcaatagtgtgttttctcgccatgaacctggtgttacccacgtcttagtaacaggaggagctggttatattggttcacatgccgctttaaggctcttacaggatagctatcgagttaccattgtggataatctatctagaggaaatatgggagcagtaaaggttctgcagggcttatttccgcagcctggtagactacaattcatctttgctgatctgggggaccagaaatctgtcaacaagatatttgctgaaaatgcatttgatgctgtgatgcactttgcagctgttgcttatgtgggagagagcacattggaaccccttaggtactatcacaatattacatcgaacactttactgattttggaggctatggcatctcatggagtcaaaacccttatctactccagtacatgtgctacctacggagaaccagagaagatgcctattacagaagccacacctcagttccctatcaatccatatggaaaagctaagaaaatggcagaggatatcatattagatttctcaaagtcgaagggagctgacatggctgtcatgattttaagatatttcaatgttattggctctgaccctgagggaagattaggtgaggctcctaggccagaactccgagagcatggtcggatatctggggcatgcttcgatgcagcattaggagtcattacaggattaaaggttaaaggaacagattatcccacaactgatggaacctgcataagagattatattgatgtcacagatttagttgatgctcatgtgaaagcactcaacaaggcagagcctagaaaagtcagcatttacaatgttggaacaggaagaggtcgctcggttaatgagttcgtcgatgcctgcaagaaggcaactggggttaacatcaaaattgagtacctcagcagaaggccaggagattatgcagaagtatatagcgacccaacaaaaatcaacaaggagctcaactggacagctcgatatactgatcttaaagagagtctgtcagtcgcatggaggtggcaaaagtcgcatcccagtggctacgggccaaatcgaatatagcctgctgatttataattcactgaatcaatacatattaattctttagttagcgataaaaaaatcttgctatgacactcctctcaaaatcactccgtattcttctcgttctttttatttcaaaggtttgctgtttttttactagtagaaacatgaacggtgatttggatacaaaaaacttgtgatgacaatttcattgtttttgacacaaattgttgatagaaaaaatgtacatttttcagccagtgagctgcaaggtttggttgcatcgagttaagaaaaaccttatgttgtgaccaatggaaatgctgtggattttgtgctg

SEQ ID NO: 32853 - DNA, 2656 bp, Zea Mays
gattaggctgctccgtgcagcgctgaccgttgagcagaaaaaggtgctgcccagtagattcgttcatggccaccgcccctccctgcgcctgcggcgctccgtccccatcgctgcgatgccctctagccctgccgctccccttcgctacctctcatcccgccgtccggctcgccgccccgccgcttctcgcgcgccgcctcgccgtgtctcctcgaagggcagcgtcagcgctggaagccctcgtgctggaatctgacgacgaggaagaggagtccgggataggcctgttccagggtgaggagtgggcagcgaccgccgacgagagggacgcggtaaggtcccccgagctggaggttttcgagctcgaagagctgccggagcagtggcgtcggtcgaggatcgcctggctctgcaaggagctccccgcttacaagcactccaccttcacccgcatccttaatgcccagcgaaagtggattaaccaggacgacgccacctacatcaccgtccactgcctccgcatccgccacaacgccgctgcattccgggtgtacagctggatggtacagcagcactggtaccgcttcaactttgcactagccacaagggtagccgattgtcttgccagagaaggcaaggttgaaaagtgccgagaggtgtttgatgcgatgatcaagcaaggacgagtaccggctgaatccaccttccacatactggtggttgcatatctcagtgttgctagggggggttgtcttgaggaggcatgcaccatctacaaccagatgatacagatgggtggctataagcctcgcctcagcctgcataattcactgttcagggcacttgtgagtaaaacaggaggcactgcaaagcacaatctcaggcaggctgagtttgtctaccacaatatagtcacaagtaaccttgaggtgcacaaggatatttatgcagggctcatctggctccacagctatcaagatgtcattgatagagacaggatcaaagctcttagggatgagatgaagcgagccgggtttgaggagagcactgatgtgctggtgtcactgatgagggccttctccaaggaaggagatattaaagaaactgaggcaacatggcattggcttcttcggagtggttgtgagcttcctgcccaagcttatatctgccgaatggagctttatgcacgcactggtgagccaatgaaatccctagaaatgttcaaggaaatgaagaaccggaacatccctcctaatgttgcatcatatcataagattattgagataatgacaaaagctagagagatagagattgcagaaaaactcatggatgagtttgttgaaagtgatatgaaacatctgatgccagcctttcttgacttgatgtatttgtatctggatctggatatgcatgagaaactggaacatactttcaccaaatgccttggccgatgccgtccaaatagaatattatacaccatttatatggaatcacttgtgaggattgggaatgtctcgaaggccgaggagatctttgatgagatgcataaaaatgggatgataggtactaatgctaagtctgccaacatcctgctcagaggctatcttttggcagagaactatcagaaagctgagagcatttatgagttaatgtgtaaaaaaaagtacgatataccagtggaatctttggagaaacttcagagtggcctcctcagtagtaagaaagttgtcaagccaccaaaacctgtgagcactcagatagaatctcatgcacagaaaggggtctacatcgtcaattttaagttccaggaagattctcatgctcactcagctctaagggtgcatattcacgaacgtttcttcgaatggctgccttcagcatgcagatcactgaatagggagagcgagatcccttatcgattttcaaccatacctcatgcacatttcggtttctttgcagatcagttctttcagaaaggccagcctgttctcccaaaacttgtccacaggtggctttccccacgggttctggcatattggttcatgtctgggggcgtcagactgcaatcgggtgatattgttcttaaggtcagtggcggggacactggtggtgttgagagaattgtgaagtccttgcaagcacaacaatctttagcatgtaaagtgaagaggaaagggagattcttttggataggtttccagggatgtaatgccgactctttctggaaaatagtcgaaacttatgtactggacagttttgctagttccaccgaggaaagccacaatgtaggttctgatggcttgcaagactatacatattatgagagtgatacgcagaggcatggtagagaaagtgaggagtgaggatagactttgttcacaagttgtctacattactttcctactaacacctgtcgcccagattgatctatcacctttccagctgatcgtctgtggttgcagtattgtactatagacagtcgtgagcagagagagatatgagtagcttggtggattcccttgttattgtacctggatttgcacagatgttcagtttttgctgcccattagtttgttgggttccatgatttccagctgaagatgcgtcatctccagaagagtcagttacgattacgacagcgtattctagtatgcca

SEQ ID NO: 32854 - DNA, 894 bp, Zea Mays
agtagtagtacaacggggcagcactgcactgcactgcaactgcgaatttccgtcagcttggagcggtccaagcgccctgcgaagcaaactacgccgatggcttcggcggcggcgtgggagggtccgacggccgcggagctgaagacagcgggggcggaggtgattcccggcggcgtgcgagtgaaggggtgggtcatccagtcccacaaaggccctatcctcaacgccgcctctctgcaacgctttgaagatgaacttcaaacaacacatttacctgagatggtttttggagagagtttcttgtcacttcaacatacacaaactggcatcaaatttcattttaatgcgcttgatgcactcaaggcatggaagaaagaggcactgccacctgttgaggttcctgctgcagcaaaatggaagttcagaaggtcatctataactgtaattcattttagtactcaattcagtactaccgagcatttgtagtgaaagatgttaggttagtttggcatcacccaccctgtttgaaagcagtccactttgtcttaaagttttcaaggttatgttcacaatacagatttgtggatggaaataattaaataaatttatttactttgtatcttgcattgtttcaagaaaagtacaatagcacacagtttgaggtgtttatattggtcttagctgaaaaaagaagttcagataattaaaacatcatgcgttaatttgtgagttcattaaaaagcctaagcacgggttgttttaacttgttttcttgcagtaagccttctgaccaggttatacttgactacgactatacatttacgacaccatattgtgggagtgatgctgtggttgtgaactctggcactttcttgttcatatactttcctttcc

SEQ ID NO: 32855 - DNA, 877 bp, Zea Mays
cccgttttctataattgcgaaaatatcccgaatccgtggcttcccttccctggcgcgcgagtgacgagcgtgcgcagaagctagccaagcgatgccgctcctcttccccgccacgccgccgctaccgctgtgccgcgccgcgcgcgtctcacgccgcgccacggcctccgtggcgtccgcggccaggagctcgtcgtcgtcctcggcctcgttcgacgcggccgccttcgaggccgagcggctgcgcctggacgccgcggcgcgggccgggatggagtccaccgccgcggcagcggaggccggcccgcgggcctggaagtgggcgatacggaagcgggtgtgggacgcgctcgaggctgagggcatcgcgcgggacccgcgccccgtccaccaccgcatccccaacttcgacggcgcccccgccgccgcagacgcgttggggaggcttgacatatttcagaagtcccattgtgtaaaggtcaatcctgacacacctcagaagcaagttcggttcttaacattgtcaggtgataaaaagctgttgactccgcaacctcggctaaggacaggatttttctcagttatggactctcagatgatacctgttgggtgcattcctgaagcatgcacttctgttggtgcagctaaatatgggaggccaattggtttagatgaaagccttaaggtggatttgattgtgattgggtcagtggcagttgatccaagttcaggagcacggttagggaagggagagggatttgcagagctggaatatggaatgcttcgctatatgggagctatagatgattcaaccatgatagtaactactgaaaaccaaggcttgatggatgtcagggcctttggctgttgttcaccg

SEQ ID NO: 32856 - DNA, 2993 bp, Zea Mays
attaatctctcacctaaccaatcctgaaaaaaacttgaatcagcacgcggactatccgcgccactgaccgtgcgcgaggaccttgtgtgttcaacagttaacaccctgcactctgcaaatttccatttccacgcgacgacgacgaagaggaggtgggattcggaggagtaaatcctaacagccgtctcgcgccggtggtccggtgcccgcgcgagatcggggggggggggggggggggggggggggcgacatctagggcgcggtgccggccatggcgagctctggactcgcctaccccgaccgcttctacgccgccgcagcctacgcggggttcggcgctggtggggccacctcctcctctacggcctgcacagcaggccacagttggtccgtgcaatgtgcccaagccaagggcgtggaaccccgtggagcagagcaaatgggccagttggcacggacttggaagcatgccatcggctgaggcgatgcgtctttttgtcaaaatcttggaggaggaagatcctggatggtactcaagggttcctgagttcaactctgagcccattgtagatattcaaatgcataaaccaaaagaagagccacagattgtaccggcttcaacgaatggaacatcaatttcagaaccaaaaatcatttctgaaaatggaagttctgtggaaacacaggacatagatgttattttggaaggccttagtactgttagttctcttgacgaatggacaccattagctatcagtggccatcgtccgaagcctcgttatgagcatggagcaactgtgttgcaggataagatgtatatatttggcggaaaccataacgggtgttaccttagtgacctccaggctttggatctgaagaatttgacttggtcaaagattgatgccaaattggaagcagaatcttctgattcagcaaaaacctcacaaattgctccttgtgctggccattcattgtttttctccattgctgggcataccaaagatccatctgaaggtgttacaggtttgctaaaattcagcttttaaggaatttgatccgcatacttgtacctggtctattgtcaggacttatggaaaatcaccggtttctcgcggaggtcagacagtgactcttgttggaacaacactagttttgttcggtggtgaagatgcaaaacggtgcctcttgaatgacttgcacattcttgatcttgaaaccatgacatgggatgatgtggatgcaatgtaagtacaagaatcttgattcttaatgcacacctaatgagaagataaggccattatttgtttcgtgaatctttgctatgtgagcttaaaatgtatttttttaaaagctcctagatttggttggcgcactggtaacccagcatgattggtttacatggtaactttagcgctatcaagcattagcttttactaacataaaaatgcaaaataaatatagattgtatcaagaccttaaacatatttttcgtagttaggtaaggttatcttgtatttacactttcattatgaaggtgtaatatacgccccctcccccaatgtattttttttatgaaaggctgtattttaataacatgtatatgtggtttgtggaataatctctctaggtcatcatgcacatgttctgaatcacaaagcaatggtcttttttaaagccaaccttgtgttattgtattttgaattcagttcatcgtggtgttggcttttgtgttttagaggcacccctcctccgagatcggatcatgctgctgcttgccatgctgaccgctatcttttgatttttggtgggggatctcatgcgacatgtttcaacgacctacatgtccttgatttgcagacgatggagtggtcaagacccaaacaacaaggcctgacgccaagcccaagagctggccatgctggtgcaactgtcggggagaactggtacatagttgggggtggcaataataaaagtggtgtctctgatactcttgttcttaacatgtcaactctgacatggtcagtggttagcactgcggaaggacgagttccccttgccagtgagggcatgactctagtgcatagcaattacaatggatacgattatctcatctcatttggaggatacaatggacgatacagcaatgaggtttatacacttagcctcaaatcagattttaagtccaccacaaaagaagaaactgtctcagatctagggtcgtcgaaccagaggttgaaatggtgattggcgtggacagtgctgattcagacctgaagaacagtagtacagtactgatgaagcaagtgaacagttcttagcagctctcaaagctgagaaagaggaactagaagcgacacttaacagggaacagctgcaaactgtacaacttaaagaatacattgctcaagcagaatccagaaatgtggaactcacaaaggaacttcaagccgtccgtggccaacttgctgctgagcagtcaagatgtttcaaacttgaggtcgatgttgcggaactacgacagaagcttcaaagtatggatgcattggaaaaggaggtcgagctgcttcgacgacacagagccgcgtcagagcaagcagcgctggacgcaaagcagcggcaaagttctgggggcatgtggagctggctcgttggtacccctcctgatgataaatctgaatcgtgatcgcgtcgtgagggcagcactttagttcatacaggccgtgattcatatattatacttgtaacatttatatacccgttgatattttttttacagttactgaattcgtgttcattttgaccacagaagataaggaaatcattagttttatgccttgttttggcgtattgcaatcactcaaatgtatcaggaagtttcaacattatttcttgaaaagctagatttcaacattgtcatcatgtattggtcctccttttgacgacatggttcaatatatgttattcgtttgagactcttgttttttaaaaaacca

SEQ ID NO: 32857 - DNA, 728 bp, Zea Mays
ttggaagcccatcatccgactgatattcgtccaggggaagcctttttccggttggaaacagccctggcctcttccgaccagctacccgcgaccgcaactctagcctctagagctctcccctagcgacgccaatcctagcctcaggagctcttccctgagacccggctccatcgtcttctgtgacatcgtccccttctcctcgataaggggactctagggactgggcagtcatggcggtgagtagggtggtggcctactagcctatggtgggagtttggtttggggatccgctgacctgcatcactgtctgcttctgagtgcaaagtggaagcaatgcatgaagtcgacatgaagaagaaaaatgcaacgaactgtatctagtgcagtttaattggtgttacttgatgttggtgtttcgttgcattacagttttatgttatattgactatctgtttgcgtgaatggagatgacattgatggatggattagcttcgttacatattagatggtattcaaattaaactttgtgtgaatcatatttgtttgtgtgaatggagaccaatctgtttctgtgatgtttcatttgtttctgtttttttctaattttttgtgttcattgcgcctcattgtgtgaatggagaccaagctgttcaaagtgtttcgttgtacgaatggagaccaatcagtttgtgaatggataccaatatatttatgtgatatttttgctc

SEQ ID NO: 32858 - DNA, 2374 bp, Zea Mays
cccggctccctcgcgctcctaccccggcccccaattccaatctcgccgccgccgggttgccgtcctgtgctccgcttcgcaccgccgcaccgctaggaacagcccgtgctggagctgggggaacgaacatctcaacctccgtcacccccataccgtacaagtattcctatggagacgatctcatcttgtcccatctgcaacatacaagttcttacggctgagctggaatggcatgccaatagccactttgatgatgatcaactccaaatggacatggaattagcacatcagatgtcagttgctgaatcaagtacagatgccatgaacgacccaaaacattatagtggatcattcactagtgactctaacgctctaggggctctatcgagtcatagtggatactcgcaccattacagtgagctactggatgaacaaatctcttgcttggtccgagcacaaattcgaagcaaagttcaagaggtggaaggcggtattttgagcttgttgaggagctgcttggagtcagaagcgggttcctcgacaagtatgatatcgtgctatattgaccatcatcagagcctttcatcagaagataagggatggggatgtggatggaggaacattcagatgctgagctctcatctattgaagcaaagaccagaagctagagaagtattatttggtggttctggatttgttcctgacatcccttcactccagaggtggcttgagattgcttgggacaaaaaatttgatacaattggctccagccactttcataacaaaatttatggtgccaagaagtggatagggaccacagagtgcgctgccctcttccgctcctttggtctccgtgcaaggattgtagattttgatagcacagaatcatctgacctccatagtaacaacggaagccgtgcagcgagccaagtacgaggacctatggacaagttcttgataaagaataagcctccaaaatcatcatctgaactttgtcgagaggatgctgaaagtacgagaggccaacaggcccttgttgactgggtttggaactactttgcaagtgagcgctctgacagattagccacacagcgtgtcactgttagcaataaaacaccattgtatttccaacatcaaggtcattcaaggacaatagttgggattcaaaagaaaccggatcgtcgtggatctcaagaacaatacagccttttgattttagatccgggccatagaactgcagatctagaaaggtgtctaagaagcaaaaaaggatggcagcgtctggtgaagagaggcgtccacacgctcaggaagccacagtatcagctgtgttatgtggatcctggaattgctagttcagaagaggtggagcgactgaagactattgatggcacactagtcaggttttaggttcctggttgtagtctgcgggatcttgatggtggttgtggcagtcggcaattttgccaacactatgtatacactggtggtactgaagctgaggtttaaagcaaagatgaagagagcaaagggcagacaggatcccccacatcaaaactgacaggcatgatcgttcctggaacacaaggatgcagcagctgctggcaccatctcttctcttgctgagctggatatggtggccgcaacccgccttggcgatggacctcgccgccttctccgcgatggcggcgcgcacctgcgccatcgacggccgcagcccgggctgcgccgccacgcactccacggcgagcctggccacgccggcggcctcctcctcgtcgtgcccgccgtccccgagcctgccgtcgacgagccccgccaccccgcgcgccctgacgcgtggcaggatccgcgccgtcaggttctcggcctcggacgccgccggcaggcccgtgacggcctccagcagcagcacgccgaagccgtacacgtcggacctgctggacacgatgcccgtgcgcaggaagaaagggtcggcgtagcccggcgacgccacggcggcgcgcgccggcgccacggccgccgagaagccctcgcaggcggagcccaggtcgcagagccgcacgccgccgtcggagaggagcacgttggacgccgacacgtcgccgtgcaccacggaggccccgccgccgccgccgccgtgcaggtgctccagcgcgcacgccacgtcgtggaggacgcgcatgcgctgcgcccacggcagcggggccgccgccgtgccgtggagcgcgtccgccagcgtgccgccgccgagtaagttagtatatacacgagcggcagcgcacgcaccgtggtcgtcggagtaggcgaggagcgcgacgatgtgcgggtgtcggagtcggcggagcaggtcgagctcctggcggaaggcgcg

SEQ ID NO: 32859 - DNA, 630 bp, Zea Mays
aatactagagaaaggatcaaacaagaccttgcaagtattgatcccttaacagctgcaacaggcacatactcatctccagtaggaatgttagaccaatggaaatgaatccttccccctccacctccaccactaccagcatttccgaagccaccaacacttgagaggacagagctttcagctaaggacaaagtatgcacaaatagaagaattgtgcccccagaaccaccaccaggtcctccaacagagccattagtatagctaccaccatttgattctactgagccatagagggcaagacttggcaaagaatactcccatgagcccatcgctggagagcagttacaaaaacatttaaaaagacaatattaagacatgctatgagtcaaaaaaatgagaataggagcatatgcagtacctattatacccccaccagctgtggacaactcggtagagtcattcccactgccactgccaagttcacaaggtagatcagcattgccatagatagctccaccctcagcaaggtttcccttataaaaaccatccccgccttttccaccatgtccaccaccaccacatatacctctgcttaacattttcccttgccctactccagttcgacagcctaaa

SEQ ID NO: 32860 - DNA, 2967 bp, Zea Mays
caagcgcgcacggcacgaacacggatccttccactgccactgccactgccactgccacgcgggacccaaccagccagcgaacgcctcctaggccacgtccgcgcggccgaacaaccactccggcacgcatccaccggcacgcggggccacattgacgggcacgcacgcgcaggccaggcaggcagaggccacaggcggtggccttgtggcgcggcgcaggagcaggccttgccgcgccggcgctgccttgctcgcgaagacgccagttcccaactatttgcggagccgagagccggaggcggaggcgttaagcgtaaggcagcgagcataaagcgccctggcgcccgcccgcccgccgcagccgcaccaaagcctagccaccctcctctgccctcgagtccacgtctcgtctcctcgctccactcgccagtcgccacccaagccggagcgaacccgctgcccgaatagagtaatccgaggagccagccaaatggtggtggccgcgtgagtgtagggtccgggggatatagagagagagagactaggggccggccgcgatgcgggcgtgggagatgcacccgctctgctgcctcgccggtgagtggccggcctcgggcggcgggctcgcgcccggcgaccgctccccgccggcggaggacgcgggggcggcgccggcggtggcgggggtcctgtacaagtggaccaacatcggcaaggggtggcgcccgcgctggttcgcgatccgcggcggcgtgctcgcctactccaagatccggcgccgcgtcgcggcggagccgcgtcccgaggccgcgggcggcgtccggctgatcggggtggcgcgcggcgccgcgggcgccgctgagcgccccatcggattcgtgcctctcaagatatcatcatttagtgaaagtaaatcagatgataaacggttttatataattactccgaccaaaacacttcaactgaggactggttgtgctaatgaccgggcgacttggattgaagcgcttgtcactgcaagaagcgaatattcttttaatggggatttatcagtaccaaacacagatgaagcaacgttgtgaagagtatttaagctttattggcactcttccacaggatgttgaggtagttaattcagtagattcaactgtccctgagaagccacggctagagctgttcaagcatgactgctccagctctggaaaatgtagtgaatatagcaacacagaatcttctgatgatgttggcaagcaagagattagtgaactatcagacggagatgaatttcatttctatgacacaaggcaaagtttcagtgaatttgcttctagtcctgctgacccgagaaagggatgtttaaacaacggaaatgaagatcataaatctgttgaatcattgacggttgacaaggctgagaaatatatgctatcacattcaaaaaggcgcttacagttgcctgaaccaatagaaaaggagaaaggagttagcctttggtcaatgatcaaagacaatgttggaaaggatctaacaagagtttgtcttcctgtttactttaatgagcctttatcttctctccagaagtgctttgaagagttggagtattcttatttgttggatcgtgcatatgaatgtggtttaagggggaatggtctgatgagaattctttatgttgctgcatttgcggtctctggatatgcatccacagattcccggccttgcaaacctttcaatccattgcttggggaaacctatgaagctgattaccctgaaaaggggatccgttttttctctgaaaaggtcagtcatcatcctatggtcatggcatgtcactgtgaggggaaaggttggaaattttggggagacagcaatctgaagagcaaattctggggacaatccattcaattggatcctaatggtgtgctaactttagagtttgatgatggagaaattttccaatggagcaaggttacaacaacaattaacaaccttatccttggtcgagtatattgccatcaccatggcacaatgaacataagtgggaatagacgatattcatgcaagctgacttttaaggagcagtctttccttgatcggaatcctcgccaggttcaaggagtcgtcaaggatgctggtggaagcaaggttgcaacattgacggggaagtgggatgaaagtgtgcattgtgtcatcaacaatgatgcctctaaggtgaactctcatggtccacatcagagttctggttccactttgctatgggagaaaaatgagcctccagtcaatcctacccgctacaacttgtccgcatttgcaataacactaaatgagttaacaccagagctcgaggagaagctgccaccgacggattcaaggctgagaccagatcaacggcacctggagaatggggagtacgagaaggccaatgctgaaaaactgcgcctcgagacacagcaacggatggcaaggaagatgcaggagagtggctggaaaccaagatggttccaaagggacagcgaggatggaacgtaccgctacgtcggaggttactgggaggcaagggagcagagaacatgggtcggctgcaatgacatatttggtaacttgtctagcagccagaagctcccaccatccgctctctacacgagctgaagtatataggggtgggtaaggccggaagggcatgttcagtagttgttgacatcgcattaaccagagggtttttctctcgtttctgttgtgttaagctgtgagctaacatgtttttcttgtcaattgtcacattgaagccaaggacatccaagcataacccaaccttttgtcgatactaggatacttatgagagatcttgtggacattattgcgaaaagaattgtcgatgatactattttcttctttgcattccgcaaggacgtgtctgcatttggcccttatgttgtcgtgcttttgtgtgtttatctcgcattggtgatg

SEQ ID NO: 32861 - DNA, 3614 bp, Zea Mays
gtcggttaaatttgttgtcaaaaaacttaaacgacaatcttagggagtaccaaaaaaatcaacacacgtgcatatggaatgtaattcttgaattaaaattttgtcaggtttgagcctcagttactgcccacagtcgccacagatagacctccagtaccagtcacacacgtgacactcgcaatcgcaaagtcgcaagcggatcgcaaactcgcaatcaaggctgctcccctccgtctccgtgttcgccactcggttcaccgcccgccgccgccgagacctcctcctcgccggctactcctgaccccacaaaggcagcgctcggaggtggccctctgtcgggtggagtggtggacacatccgcgcccatggccaacggcggcgctgcggccggcaagctcaccgtcgccgagaccttctccaacctcagggagcaaggcaagggttggattgctggcgccgtggtggccgatacccaatgttggtcccggttggttgcagggaatacctaattttggtcccatttagttgcaaggaaatggattagggctttggaacaatctgtgtattccttgcatgaattgtccaaatctagtggttttatgtcgagtacacatcgtgctggtttaatttccgtaaaaatctagcctgatcttgcacaatagtggctgctggcttgatgtgcacattgatccgtctttgtctttaaaagcagtgtttatattttaggtgccacagtgttcattctcaacaaaggtaactgcattaagaaatttgtatccagagtagcgataacatgctaagcagagaccaatctttagttgcagggatcttgcattgtactccattccaaattctgtgttattttgtcttttctagatgcataccttattagcttttgttatgcactttgatatatggtatgtctagatatatagcaaaaactatgtacctaataaagcaaaaacgacttacaatttgcaattgaaagagtatggtgcagatctgccttaaatcgtatccagcagttcactcatatggttacccaaaatactgttttacactgttcgcagagtgaagttttaatatgggtgtgagcatgggtaaaagtcttagttggcaaatagtcttttggtgtaaggatttagaaaatactccagtgaacacgtgggaaaatcacttgtcagagagggagggtggagccacaaaccaaggagccgcacagatgccgacatcaatacacttatgttgtggagaggagccgcatctcgtaatgtctgattttgtttagatgccacacagtagtatcccagccatgggcgcatggatgggggatttggacccagggtcaatggaatttaattcccagatttagggggtgtatggtacggatccaggttccagctttaatttaaaggtgtagtttataatagaaatttaaatagttttaaaaatatttttaatctaaataataaataaaatgacttatctaaatgacttacgggggttcacaacttcaaaactatacgattttatggaacacctaatggcctgctctatcaattccactaagaccccgtttggttccaattagtcctaggactaaagtttagttctaggactaaactttagtcccttcctgtttaattctagggactaaacaaattctaaagtaattaaatatagtgtccaaagactcaaatacccctggaatctatagcaacatggacgtgggataagggcaatggaggaaaaaaatatggtttagtcccctttagccaccacttgagggactagggactaaactgatttagtctctcctttagtccttatgtatggcaaattagagactaaaagagactaaaacgaagagactaaaaattatcccttgcaaccaaacaccccctaaattttctggagctggatcaatcccagacagcaccttaatttaagttgacagtctaacctgggaaattttcagagtgcattcatcccgttcataactgctggtgatcctgacctggtaaccacatcgaaagcattgaagattctcaattcctgcggttcggatgttatagaggttggcgtaccatactcggatccactggctgatgggccagttattcaggcttctgcaacacgggcgcttaagaaaggcactacacttgattctgtcatagagatgctgaagggggttacacctgagctttcttgccccattgttcttttcacatactataatccaattctgaaacgtggtgtgggaaacttcatgtctactatcaaacaagctggcatacatggacttgtagtgcctgatcttcctttggaggagacagcgttgctgaggagcgaggccattatgcacaacatagagctggtgctgcttacaacgccaaccacgccgacagatcggatgaagggaattgcacaagcttcagaaggatttctctatcttgtgagcgctgtaggggttacaggtgcacgctcaaatgtaaacttacgtgtagaacaccttcttagggagatcaagaaggttacagacaaaccggtagctgttggtttcggtgtatcgactccagagcatgtgaaacagatcgtgggctggggagcggacggtgtgattgttggcagtgcgattgtgaagcagttgtgtgaggctgctactcctgaagagggtctggaaaggctcgaggagtacgccaggagtatgaaggctgctatgccgtgagctgatctcactccccgtcacaggcaaggtaattagaacatggttttagcaatattctgggcatggggttggcatccataactcatctagtgctgtacgggtcgttctccggtggtgagaacgaagtctggctttgcctataatagaaaagggttataaactgagttagtgcgacattttgatgaaaaagtgagcgattgcgagatatcagttcatgcttattggcagatcctttttttggctgaaagattgaaatgttagggatgaggttgccctggcctcttgagaggataggaataagagaggataagttcgttatgatttatatggcttttcgcttgaaccccaccagctggtgtccatggatgcgggcagagcagtgtctgattggctgcactgaaaatgacattaccttcagacaattcgccttgctctcttctggttctggagtactactttcgaggtccgtcagactgggtcacaagatgatcccaaacggccccagatgctggatttttggacaacggaaagtcgattctgacctctgttaatgtcggcactcatgggtcatgaccaagccatgtttatggtcaaatcagtcccggatgctaacacgcttctctaatctctacctacggagacgactttttccggtgcttatcgtatcattatcatgcatgttactggtagtaacatgttgtctgaacagattctttagctctgtcatggcagcatgaagtgtatctggatgcgaagaagcagtgttggtattgaactgtccatgtacgagttgtttgttgctgtgctttggcggggtgaacagctaggattggataggctctagtgccagccgagccgccagggcccatgaaaagtcaattgtttg

SEQ ID NO: 32862 - DNA, 2608 bp, Zea Mays
caaaaaaaaaaaaaaaactcttcgtccctactcccctgcagagtgcagtgtgcagacacccgaggagccgagacagagaagcagtgaagggaacccgcgcgctttctcccgacgtgcaccggaaatggtggtcgtggacgcgtcggagttcggggcggagggcttcgacccgaagcggtggatcaacgcggcgctggacgcgcggcacccgtcggagcctctcgatcgcttcctcgccgacgccgaggagcgcctgcgttccgcggccgacgacgccgcggccgcgctcgagagggatagcggcgacgccctccgccgcgtcccgttggcatgccgcgacgcgctgcgcctccgcgacgacgccgtcgccctacgctcccacctcgcctccgtcctccagtccctctccctggctgagggctcatccgcagaatcaatagctgcactagcgcgtattgacactgtgaaacagcgcatggaagccgcatacacaacattgcaggatgctgctgggttagctcagttgagccagagtgttgaggatgtgttttctagtggcaatcttccaaaagctgcagaaaccctggcaactatgagacattgcttgtcagcagttggagaggttgccgagtttgcaaacgtcagaaaacaacttgaagtattggaagaaaggctagatgaaatggtgcagcctcgattagtagatgcactttctaatcgcaaggttgatgccgtgcaagatcttcgtggtatactgatccgtatcaataggttcaagtcactggaagtgcaatacactaagatccatgttaagcctctaaagaaactctgggatgattttgagctaaagcaaagatccagcaagctttgtctctcgtataaatatagcaaccggggatgttattcctgaaaccagatctattgccaaaggtatattggatgttctatcaggtgacttaccaaaaagcaccaaattgcagaataagcatcttcaagcgctaattgaactgcacaatatgactggcacttttgctaggaacattcagtacttattttcagaatcagatcttgcagttgtgctgaatactttgaaagctatttattctccatatgaaacctttaaagcaaggtatgggcagatggagcgtgctatactctctgctgagatgacaagtatcgacatccgtggggccgtccctcgtggtgttggtgcacagggtatagagctgagcgaaactgtccgcagaatggaggaatccatcccagaaatgatagtactccttgaggcagctgtggagagatgcattagtctgactggtggttcagaagcagatgaactggtactggctcttgatgacgtcatgctgcagtacatatctaatctccaagaaacattgaagtccctgaggataatctgtggactggatagtgatgccttgaaaaaagatgcaggtttagagaaaaaggaagtacaacgattggtggatgtttctgaagaggaagaatggtctattgtccaaggtgctttgcaaattcttacagttgctgattgcctaactagcagaacctcagtctttgaagcttctttaagagctacacttgccaggattggaacaaacttttctgtttctggatttggctcaagcctggataaatcacctgcagcaactgctgatgagaatgcagacttgtcttttgctgggagggctgcgctggacattgcagctattcgcttaagtgatctgccagataagtctaagaagttcttaactgtgctagaacagtcaaaagatccaagattccatgctcttcctctcacatcacaaagagttgcagccttctcagacacagtaaatgaactcgtctatgatgtgctcatatctaaggttcggcagcgtctcagtgaggtcgcacgccttccaatctggtcatccgtggaggaacagggtggtcttcctcttccaagcttcagtgcctacccgcaagcatacgtgaccagcgttggggagtatctcctcactttaccacagcagctggagccactcgcggaaggtatctcaggcaatgaggctggcaacgatgaggcccagttctttgccaccgagtggatttttaaggtcgccgaaggtgccactgctttgttcatggagcagctccgaggaatccactacatcaccgaccgaggttcacagcagctcgctgctgacattgagtacctaaacaatgtcctctctgcgctctcgatgccaatccctccattcctgtctaccttccacgcctgcgtctccaccccgagggaccaggtccgtgatctgatcaaatctgatggtgcaagccagctcgacctccctactacccatctggtctgcaagatccggcggatcacattagattagtgaaatcgtcctaacttctccccctttccatgaggtttacctctgtaaaagcatgcattaccgcacgcttctgcgatcgtatgtttggcatgcgggcttgtagcttgttgcttcaccttttttttcttgccttgtaaccgtactgctggcacatagtgagaataatcctatatagaataattcattacttggagcctatattgattgcacga

SEQ ID NO: 32863 - DNA, 562 bp, Zea Mays
gtttgggctagttatctccattccaaaaggatcctgaaagggtattgagcatgaacacaaggcgcatattgcttgaggtttggaggaaggaaggtgtggaaggtctgttcagaggcgcaggccctcgaatggggcgcgcaggcccgtcggtgggcatcgtcgtctcctcctacgaagttgtgaagcacctcatgcacaagaacacgagcaatgcagcagacctatgattcgatgagctcgattagcacgccctaatggcacaagtaggattaggaatgtcgctattcaaagaaacacatttttttacggtagtccatgacagataaatgttatccctccattccattacaaactgttacttctaagatgggtttttatgcatctagtggctagcttataacctgagttatatcgcaacgagatctacgtatctagccacgtatgtagtggctaggattttatgtacaagtggcaaaggtttatgttctaacagattgctcaacacatgagtcgcacactatgtaattaaaattaaggtggtgaaccgaaatataacgtaaat

SEQ ID NO: 32864 - DNA, 1449 bp, Zea Mays
aaccaccgctggcctgtagtgccgtccgtgcctgttgcctgccaacgcgcgtcgcggccggaatcatcgccaacctgccggtcggtacgttacaattacttacgtactgtaccctactactacacgcgcctcgcaaaaagtcgccctcttcctccactcgccgacacacacggcgcaaatccccacaaccccaagcgggcgggcggacttccacccaccttctcgcgcggcgacgtgctcggctcgcttccagccacctcgctcgccgcccgcctcggaatccccgccgcgagatcttgttccccggaggatggaggtgaaaacagtaaaagttagcaatctttcattaaatgctttgaaaagagagatcacagagttcttcagtttctcgggagatatagaatatgttgaaatgcaaagactcacagggagcagacactgctgttcttctctcgggggcaacaattgtggatcgtgctgtcattataactcctgctgagaactatcagctgcctcctgaagcacacaaacaattatcgggagcaaacgtctctactgaatcagcagtgaggaaggcagaagatgttgtgagcagcatgctggccaagggcttcgtcctcagcaaagacgcactcaacttggcgagatcatttgacgagcgtcacaacatcctatccaacgccactgccactgttgcatccctagaccgccagtatggcctgagcgaaaagatcagtctcggaagggccattgtcggcagcaaggtcaaggaggtggacgagcggtaccaggtctcagaactcaccaagtccgccttggctgccgccgagcagaaagccagcgtcgcgggctccgctatactgagcaaccagtatgtctcggctggtgcctcgtggctaacaagcgcgttcgatatggtaacgaaggcagcgggcgacatgacctcgatggccaaagataaggtggagagggccgaggaggagaggaaagccatcatgtgggaggagaggagtgggctggtcagcgagtacgcgaagatccatcttgacgagccctcttcgtgggagcccgcggttctgcctctggaatcagtggacgagcagaagctccaagctgtctgacacgcacagaccgagtgtctcgcacgaaattcttttgcagctcgtcctatatatagattgttctttttcgttgatgcactggattaaaacaagtgcgcttgtcggccagtgccgtgtaaatttctgagagttggtcttgtgttattaccaggttttgttcgtttcttttgttttggagagagtggtgctaccagcattactacactagactactctgtgtgaacggaatactactgtactttgtctcttctactactactacagaaacagaatacaacttccttcgttagattcagattaatacaatggtgaggttgtaagtgtggca

SEQ ID NO: 32865 - DNA, 2367 bp, Zea Mays
ctaaaacctaaagcgtggaaagttgcatcttctcactctcgtttggtgctgtctctgtagcagctccacaaaagccaacaccaaagaccccttcttcccaccaccaccctccacccctccttaataattccttctcccagcacaacctgagttgtaattattatactagtactcgtcagtattcaccttcgtttattgtttgttcccccatctggttgttgatctcttcttctcccctcgggcgctctgcggctatatatatacgtccaatccaatcccctctccattcggtctccatcgcctgatcaaactagctagaggtggtgggggggaaaaggaacaagttttctggctcttcttcttgttccctagtccctcctccgtactattcttagcgctagctgctcttcaccgagatcgcctcgccgtcacccatgttgggcttctgcgcccccgccgccggatcgcctcccgacgaggcgatgccggagccgttctgttcgctgcagatcgccaccacggccgccgccgccgccacgacaaagaagaagcgccggcccgccggcacaccagacccggacgcggaggtggtctcgctgtcgccgcggacgctgctggagtcggaccggtacgtgtgcgagatctgcgggcaggggttccagcgcgaccagaacctgcagatgcaccggcggcggcacaaggtgccgtggaagctgctgaagcgggaggccggggaggcggcgcggaagcgggtgttcgtgtgcccggagcccagctgcctgcaccacaacccctcccacgcgctgggcgacctcgtcggcatcaagaagcacttccgccgcaagcacagcggccagcgccagtgggcctgcgcccgctgctccaaggcctacgccgtccactccgactacaaggcccacctcaagacctgcggcacccgcggccactcctgcgactgcggccgcgtcttctcccgggtggagagcttcatagagcaccaggacacttgcaacgccgggcgggcacgggcggacccctcgccggcgtgtggcgccgggagcaccggtgtggctgctgctagtgctgggtcgcagccgcaggcgccgccgcccatgtcactgtcgaggaccgcgtcgagcaccagcccgtccagcgacattgtcatcagcccggtggccgcctggcccggttcgtcggcaccgacgattccaagccctgcgaccgccgcgttccaccggttcgaacaagtcccgtcgccgcggacaccgccatcggaccaccatcaccgcggcgggcacaacctcgagctgcagctcatgccgccgtccggcagcggcgtggtgggccgtggcgcgccgggggtggcggagtacggcgtcgcgccacgcactccggccgctcctccacagagccaccccgccaccatgcagctgcagctgtccatcggcgtctgcggcggcggggggttcggggacgaggcgatgctggcagcggcgagggagaaagaggaggtggaggcgcgggagcagctgcggcaagctgtggcggagaaggcggcggcgaacgaggcccgcgcgcaggcgaggcggcacgcggagctggccgagcaggagctggcgagcgccaagcggatgcggcggcaggcgcaggtggagctgagccgagcccacgcgctccgggagcacgccgtgcgccaggtgaacgcgacgcttctccagatcacctgcctcggctgccgccacaagttccgcgcgcgtccgcagctcctggatgcggccctgggcgcccccgaggtgacctgcagctacatgtcctccgtcgtgacagaaggcggcgacgccgaggccgacgatgagccgcccctcgacggcagggacggcatgctgcagcggcgccgacacgccatggcaatggacgtcatcctctagctaacctgaaatgagatgatggtcttcgtttcaaatagtttcttgtgtttttgccggcaagacgccggggttgcatttgcattggcccctgctgtatgaggtgtatcagatgccgatgcctgatggtgcgtagacagtggaagaccccgctagctcgatcgggccagtgctgcctagacttcgagtcctgtgatgagaaggaaggaccggagaggtagccattaggcaagtccaaggagagacgaagacgagggctagctgctactagcttactgtgacgtacgtgcatggaatctttcggtgtttgcttcctattggatcttgttggaaagaaacattcattatattgctcatggaaagcaagttgatgatgccctttgtaaaggtcttcagtagccaacagggaaatcaagaatatttgtcacacctaaattcagcg

SEQ ID NO: 32866 - DNA, 2564 bp, Zea Mays
cccgaccgaatgagcgcgtgcaaattgctaaaggcaccccacgtttataaagcggaggcccagcctgtcttctgcccgcacgaattcgaatccgccggaggcggaggagacagcagccgggtgattgggttgggtacgcctctcgtctcggccgatggcgtcgctgttcggcaacggcggctacatctactcctcggggtcggagggggaggacgaggacgagggcacggaggggtaccggaaaggcgggtaccacgccgctcgccccggggatcgcttcgccggtgggcggttcgtcgcgcagcggaagatcggctggggcaacttctccaccgtctggctagcctacgacaccctccacagcagatttgtcgccctgaagatccagaagagcgcaagggattacgcgcacgcggctctccacgaaatcgagctactgtcggctgtggccaaaggagacccgacgaattcaaagtgcgtgcttcggttgttggaccatttcaagcacgctggccccaacgggcagcacgtttgcctggtcaccgagttcctcggtgatagcctgctccggctgatacggtacaatcggaacaagggcattgggctgagcagagtgaaggaaatctgccgatcagtcatggtcggccttgattacctgcacagcgagctcggcatcatccacacggatttgaaaccagagaacgttcttctggaatcaacaattaacccggccaaggacccagtgcgctctgggttcacaccgatcctcgaccggcctgtggggaaccagtacggtggcacagtgatcagtttcagtgagaagatgctcaagatgagagcaaggcgtgcagtggctaagatttcgcagagacgggtttcccttggtggggttggggcagaactggagaaagagaggtgcctggatgggatcagtttgaagtgtaagattgtcgattttgggaatgcctgctgggccgatcagcagcacgctggtgaaatacagacaaggcagtacagagctcctgaggttatcattggttctgggtactcatattccgctgacatctggtcgtttgcttgcattgcctttgagcttgccaccggtgacttgttgtttgctcccatgaatcgccagggatgcagcgaagatgagacagcacgatatttggtgtattcatccactaaactttcaaacactcccttgcaattattcggacatttaaaaattgcactgacacaaatatatatatcaggtagtgggggcacttcagaatttaaaacgatatattcaatcctgtaatgtacccaacctgtgacagctttcaatctagctaacggagagctttatggaaatgaaattagaactaactggtccactatggcagtatttaaataaacttaccaactttgatgatgctgctatcgctggcagttttttatcgtgataatatgcttccgggtccctttctatttgtatagcaactgtagattcaaatagcctaaactaccatgtagattcaaatcattttgtatagtaactgtaagcagaaactgcactttgtcaattctactgaaggtcacagaaaagggggatgacttgtcagctgttccctttgtagtgacattttctttctagaaaagcaagatcaagctatatgattatggttgccggaagtaataatgccttgcaaaaattgaagtaccagtggactgacaaacaattagttgcatgtacaacttttctgttctgttacccggtcgaatgctctgttactgagaatatgatgccatgcctatgaccacttggctttgatgatggaaactcttgggaagatgcctcggaagattgctagctcaggaactcgttccaaggattactttgatcggtatggagatttgaaaagggtcaggagactgaagttctggcccctagaccgtgtgctcgtagaaaggtacagtttcagcgaacccgacgccaaagggttcgctgactttcttcggccaatgttagatttcgctccggaggacaggccatctgccgcgcagtgcttgaaacactcttggcttaattgatccaacgcgacacgaaagtctgaccaatagatgtttacatacatcctacgtgcaaattcgctgccgaagactctttgtgactgtgattgcagatatccacggactttgatttgatgtaaccaaggctgagaatcaggagccactttttaggcgcagcctgatgagaacgggacatgagattcagctcggatgtagcaagcgtttcgctggtgtgtttgggggtgcagactgcagagctaatgtgatgttaacctgcatgtgtgttagtagggccaaaatattgatgtattattattttttggtaatgtgatctggccaacaaccttttcctttagctgagaagatgaactgctacagcactgcagtgtagtggttcagctagttatccaatggattgtgtgctgtaacctgtaacatttgtttgaaattgaccttatggatatcggaaaccaaccacttggtggtgcaaatgggacaaaaccaggggcggt

SEQ ID NO: 32867 - DNA, 1593 bp, Zea Mays
gagccagtaagccacacacagacagtcagacacaggcacacagcgagggagtcctctcctcccccagaaaaggaaaagacgcattccgcacacgcgcggctgggtgtcgaggccgggagacgcggtgaagctagctgctagcgtagccgcgcgcggcgggcgggctcgagctgcgctgtcgctccatgtcggccaccgccgagagcggtggggatctgtcggcggcgcgccgccggtgggatctcaccaacaagggggccgagagcacatgaagaatcagatggtgttgttacatgccatccgaatggtaacactgatggatgcgaagaaactattagtggcagtcacgatgatgatagcccagaaggccaggaaactagttccattaaggaacctgatgtagaaggtgacacacaggaagacaaacgtgtaaatcaagattcactcaagttgattgatgaagagtctgctcctcccaagtccccagcaaaatccgcgactgcaagttctagatcggagaggcctaaacgtgttgttccccgaccattttctctttctaatcaaagaagtttgtttggagtaaatggtggtgtggccaatccattggccaataaggataaatctggtgataaaagtagcatctctccagcaagcatgacaaagaagagtacgcagatggcacttaggaagactttgcagcctgagaaggtatttcatcctctggaagaggactcttgttctgtgacatcctctacaacatcaacaagagctggcagaactaagatgactgttcccgtcgctccttcatttgtgtgtgctaaccgtgctgacaagaggaaggagttctacacaaaattagaggagaaacataaagctttggaagcagagaaggacgaggctgaggccaggaaaaaggatgagcaagacgttgctttaaaacaactaaggaagtcattggtgattagagcgaaacccatgccaagcttctatcaagaagggcccccaccaaaggctgaactgaagaaggtgcctcctacccgtgccaaatcgccaaagtttacaagttcaaggagaaggagctgcagtgatacaccattgacacctggcggggaaaataccaacgcaacatctacccggccacatcgtcacagcatcgggagtcctagagacgctaacagagtacaacaatgctcgccaaagagcggtgtggcaaccaaaacaagatctgtcaaggctgagctgaaggccctctgaagagcatggagcagccgagtgatgtgtttctctgtacaaaccgaattgtctaaccgtttccatttccatgcatttttgcttctattttatacccaacatctccagcaaaagaaggctgtagggccaatgacgttgttcagcgccgctggaccttatccattttcttacattcgccttgtactcgtaagaactcttggtggcaccatgtgacattccatgtaaattacttgaggatccttgtagggagttcgtccggtgttttgctcctgttaagcccttggccttaactaatctgtgagctgaaaagactatcggaatggcactgttccgtttgatgca

SEQ ID NO: 32868 - DNA, 1263 bp, Zea Mays
tttttccccaccgctgaaggctgcttcttatccccatcgcgtcttcttcctccgatcgcgcgttcccaatttcagcagtcttcttctccagggaatcgcagagctccctggcgagcgcctcttctcttgccgcgcggcctgctccctctgcctgcgtatttctctgctcgccatggagtttgccgagctctccaccgccctggtttctctctccctccatctctctctagcgccgcttctcttctccaggccgccggcttctgctcgtcgagctcctgtgtgctcatccctctgctcgggacgcgccctgccgagtccctctccatccccatggcgcactgctcctcttcatcccctagccggttccctgcgcgcgtgctccagtctccttccagtgccgcgtcccagcccctctgctccctagcgaactcgccccagccccctgagtctccaagctgtggagcttcttcctcccctacgcagatcgttcttcctccgctcggtgccccctcggctcgcccccatggtgctggtcgtgtccctctgcgccggtcgcttcttcttgctcttccatgccgcggcaatcgccctgctgctccagcgctcccagccgagcggttctctgctcctgcgcgccgaactcctctgttggctgcgtcctgctcgccttcagccgtccatggagctgctcgcgcccagctgtttctctccctccctctatttcttcctcgctgcgcgctgcggtgctcagctctccagcgccggtgcccagctcgccagggccgcgtgtgcttcagcgccgcgctctgctcgcggagttccttcgcgacgttcatctccctgctcagcttaattactgattttgtatagatttgtctgacaatgctgaggtatacaaatcactgctcatcttaacagggcaagcattgaaccaaatttccatgatctgtatctgaagttctttgataaagtaaactcaaaatccttgaacaaggaaatactgaaagccacatatgagaactgcaaggtttttgttctctccaattcgtctgccctgtttttattttttgctagccattttgtttaaacttggatacttttgctgcaggtcttgttaagatcagaccttatcaaatctagttccgaggagcgctacttgctaaaaaacctaggcaattggttgggaaagttcaccattggtaggaatcaggcactaagggctaaggagattgatccaaaatctcttatcgtggaggtgctatt

SEQ ID NO: 32869 - DNA, 1571 bp, Zea Mays
atcagaaggaagaccaatcaaagggaggcaaacgccatagcggccaatcacttggcggcggcggcggcggcgatggggcggctgaccgaggagcaggcggcgcgcgaggcgggctcggcggggaccaacgctatgtccctcaagctcacacaccgcgctctctccgacgtgtcgtgcctgagcagcttcaagaacctggagcacctcgacctcggcttcaactgcctcgtcaccctcgagggtttgtcctcctgtgccaatttgaagtggctttcggttaaggaaaacaagcttgtgagcttaaaaggtgttgaggggctctcaaagctgcaggtactgaatgctggcaagaacgaacttacaaaaatggacgaggtcacatctttaacaagcctgggagcattgattcttaatgataacaatatttcttccatctgcaagcttgatcagttgcaacagttgaatacacttgttctctctaagaaccctgtctttaccattggcaatgctttggtcaaggctaagtctatgaaaaaggtactttctgaattgcgctacttgaggaaccttaatttgcagggaaatcctgtttccaagaaagacagtcttgtcaaaaaggttaagaaatctgtgccaaccttgcgcatactgaacgcaaagcccctagaggccacctccaagagtgataagaggtctacaaaagagaatcctccgagcaaagatgaagacctcattgggattgatgcgaagaagaaggataaaaggaagggatctaaacaagaggtaaagggccttgaagagcttgaagtccagagtgtttctacaggtatcaccacttcgaaccctggtaaacttgaagtgccagacagtaaggaaaagaaaaaggtcaaggaagctaagacgaagaaatctgaagagccgtaccatgccaataacagtagcttaaagaacaaagaagttcaatcttttgtctatgataccagcacgaaggacaagaaggaagccaagaggaagaaatttgttgacgaagaagatgtagatgctgaaggaattgacaatacagaaatctcgtttgcagatttaatgttttccaatgtgggcaatccagagactaagctaaagaacatctcaaccctggaagcagctcctgatggaaaatctgttggaggtctggtaattgatcacacaaagaagagaaagaaaccaaaaggtgttgtcaccatcactgactcctcagctcttaagatgttttcctcaatgccagaggtaggagcaggagggcttggcctgtcaggatgggatgagtagcgtctagctctctagtaccataagtttgctgcctgatgaatatcgttttttggtgaaaacctcaattttatgtgaactgagcagcattttcttctcttcccatcaagtgcatttatgatgtgtgatttgaggaaccaagcccctctagatgagtggtgcatcttcggttcaaccaataatttagtggaataactacttttctcacgcttgcatgaattataaactactccgtccattctaaattataaaatattttacttttc

SEQ ID NO: 32870 - DNA, 167 bp, Zea Mays
ctttattatatagtaggggttctatacaaaatagctaaataaatacatcatatgatgacaacggtcctccacaactctagttgactgggagacgatgacctagacctctcatgaactcatcgtggcatccttcatgctcctcatcttatggtatctgtccttaacct

SEQ ID NO: 32871 - DNA, 1411 bp, Zea Mays
ctcgaacctatgatttggtgacccagtgaaacaaacatctctcactactgcactaggcctgaaattgtttacgagcatcccaagggtcttacttaaattcactctctaaattttaatttgcgagccattttcataaaaatatgtttttataggttttttaccttctaacaatttttatgtatcttgtacgcactctagagaaccaacccactctctattctttatttactgtatgttatttaggtctgctaagcaaaaaattgatattcttcctcaatcttttaccatgtttagataattttggggggttttaggataaagtttgtgaagggcttcacttttttgtttgtaattagcatttaactcaaaagtttcccttgaaattcaagttgattttgagaagtatgaagggatgattgagttcatggagaaggtggtaatacaattgattctatggagctcactggaggagcactaccttttgttagttgcctgcaagaatgtctttggaatccgatctgcttcatggtgcatcttatcctcgattgagtacatggaagaaggttgtgtcaacatggattgtgtcactctcatcgaggactaccataacaagattgaatttgaactcaataagatctatgatggaatcctcaagctctttgcttcccaccttcccccctcactaacagttccaaagtccaaggtcttctacctcaagatgaagggtgattactacagttcaattcatgtgtatcaggtaccttgcggagtttgaaacttgatataggagaaaagatgcagccaagaataccatggtggcacacaaaattgctcggttaatttgcttatccttaaattcacggttctcgtattaaatttgctggctaggacattaacctttttatatgtacaatcgatcatttaattgatgtgtttctaaatgaaccaaacaatgagtggcatgctggcacttgaggggatcagtggcgacaataagaggagggttagcattgccctgcagatactcatgaggcctcgactgctcttcctagacgagcccaccaatggtcttaacaggtacgcgcttgcttctgtttcatgcctatcatatgggtgcgatgcccaagtcacaactgatgcaaccaagaaaacacgcaaaaatgtggagtgcttcggcgttcttcatggcagatgttgcgggggctgtcagctagtaaaattttagagttttatgatcctcatagcctagcatctaaacaaagtattcaaacaataaggtagaccaagcatttgcctctatatggtcaaactaatccacttttccatcaacataggtcctaacgtaaccataacccacaaaaaaaacccttatgacgaacctctacactaaactcaacattgtcaacatccg

SEQ ID NO: 32872 - DNA, 1583 bp, Zea Mays
atcccagcccaaacccctcaggactgatttgggcctcaggcagcccgcagccggtcagtccttccttttcctgttcgcgtccacgatcctgccgccgccgccgctcgcacctccacgatcctgcccagcgccgtgcgcctccacccccgccccgtccgccgcccgcctggtccatccccgtcccgtctggccggcgttgccaccccgggtcccgcgcgcgtggagccccggcctctaccagccgcacgtcgcaaccgacgaggacgcgcgcgcctgcagctcctgcccggtcccggctggccggccgccggcactccggctgcccctcagcggctcagcccctgagcttgtctgcttgaatgcttcagtgcgggtgcagcacagcggcagtgccccctattcaagtcctgggtccgccactgatagtggccctagcctctaggcgtcaaaactgaccggcgacaccactggttgagggcatttgccgtgggaacaaagggttagtacttttcagttgtttcctctgcttgtatggtccttggtaagctgcagtagcttatttgtatttggcaacgtaaataccattgactgatagaccagttgggtttgtggctatcatcaaatgccctagtgaggtttgtgtatcttctaggaaatgcatcatgcaccatggaacgtcaaattgccctgcattatttattttattcttttgctttagcagtaggatgtaatataaatacaatcatgatactgaacaggattaatattttgttgccagactgtgtatcgagcaggcataccctgttaaaaatcctggttccactactagtcaggccatggctgcagcagaggcatgggtgcggcaggagaaagttaggaagtttgaggagttcgtggaccagcggttgaaacccgacctcaccaatgccatcgcacagcgtaacaaggtgtttgagcagcagaagaccttcttggatttgaagaggaacattgaaaatttggagaggaatggtgttaccagcatgcggtccatggtcaatcttggctcagaggtgtacatgcaagcagaagtaccagatacaaggcatatttttgtggatatcggtctaggttttcatgtggaatttacttggcaagaagctttacagttcatatctgtaagagaggcaaggttgactaggcaaatagacgaatacacgcatctcatcgcaagcataaaagcacagatcaagttggtatgtgaaggtatccgcgaagtgctgcagctgcctgcggagaaagagttatcgcccaggaatacgtggtagaatttggttctcaatggagcagggggtggtgttctttaaacgtggttccgtttcaactcttgcagttgaaattattgtggtgccgacagtattttagagcagagaatgaggttccccttcgtacaacaatctcttcgacgacaccacgtacaactcatactgatttctatgtattcattacgttggcatatggccttgccgatttgcagtttatttgagcctcttttccaagttaggttgagctcacaccaccgggccttccctgaccccgacgcg

SEQ ID NO: 32873 - DNA, 2054 bp, Zea Mays
ccgctcacgagcactgaaaaactgccaaaaccgagcgaaccacacaccccttgtcaacgctgtggcggcacggcaggcgatccaaggaaagcgatgacggcgtacgaccccaaagacgacgtcgaccgcctcttcgcctgcttcaaatgcggcgtctcccctcccaagtcggccttcagggagaggccgctcccgcaggccaagaagtcgcggggctcgcccgtgtcggagactgccggtagcggtggccggagctcctccgatgtttccaccacgccggatgccgcagcggacaagcgcgcggcgccgtcgtcggccaaatctacaggccgcaagcacatgtccccattcgtgttctacggctccccgcggggcgtccaagtcaaaaggccgcagagcttcctgaggctgctgcacgtgatccgcattgatctcaagaagcaaaccgacttcaaccccagggatgttgtctgggctacatttcctaggcaagacgaggcgatcaggttctctaaggcatacgcacataccaatgtcttttgctatcaagagcatatgtccggtacgcgaaggttccttgtgtctacatacgacgagttctggaaaaggtacaacgatatggattccaaaattcgccatcattatgaggttatccaggaggcttcgccttgccacatttactttgatcttgagtttgatacaagattgaacaagaagagagacacagatgaaatggtggatatattgattgctgttgtattcagtgctttgcgtgataaatattctattgaaggacatgaagagtggatcacagagctagactcatccactgaagaaaagttttcacgccatctaatcattcgtatacccaagattgcatttaaagacaactcccatgttggtgcgtttgtctgtgaggtctgttcacaaattgcagctcagcgtacaaccaatcatgaccttgataaactttatattacaaaagaaatcagctcagaatgataaagatgtctttatggagtcacttatttgtagactggatgataactgtgaaaaactgttgatatgcaaactagacttggaatgcaagaaaacattgcattttgactctgaaatcagcatgtctcaaattcaaggaaggagctacaggcaccgcattgctacatatcaaaatgatttttctcatgcatatacttgtggaaaatctccttttccacctttggatggttttatagaatccatcgcttcttttggaaatgtttcagggaaaattcgatcttggttctggttttcacaggagagtttgataatctacaacatgttacgaagcagatactgtgagaatattggaagagagcataagggcaatcatgtgttttacattgttgatttccagagagcagcatactaccaaaagtgtcatgaccctgattgtcgaggttaccgttctcccctgcgtcctgtaccttgggatgtgattcctgagctagtggagtcagaccagatagaataccagggccatgccatggaaaccaacattgaaaacagcagcatgagcggtaaatcaatcacgggggctggtgctgaggatcctgaatggtgggaacaagtggtggaatttgcggacagcatcgagaacatggatcattctttggctaccttggaagtgaaatctgacgccagcatcgagaacatggatcatgctcccagcttgtgtgcctcggaagaaaacggttgttttgaagctgaccctgagtgggtgatgcacgcggaaagagccatggagcagtacgaggaacaaagcggaggatcgcagtcacacgcaacttcccaagtctttgatctcgaggatgtttaacagtagatgctgttctaaacaatttgaacagtgacttgtaaatatacgttttatgatatattttaatctaaaaatatgtagataaataataaaaatggatattatgaatgaagcagtgagaacataatctgtatacgtgttcatgttttaacatcgtgttaacataaacaatataaaacaagaagttttaggaagt

SEQ ID NO: 32874 - DNA, 940 bp, Zea Mays
ctcgcagcctcgcctaccgacctgcgtgccgctcgtgtccgacccgaaatttcgggtaaacccgaacgccatcccagccattcaccagtcccgaaacaagagaacggagacgcagaagcggtggagcctccagcccgtgccgaaggggagaagccctactatgcgctcccatggccgcctgcgtgctgggcctagcacctactctcgttagcatgtggcccctccggtgcgctaccgcttgctccgccgctacagaggcctccaccacggccgctcatgcgtcgcgtcgcggcgtgggcgcggtcagctcggctctgtccggtcttcgaggaaggcactccttatcttcggcgcaattcatggatggtcttagaagcaatcttcaagtggaaaggaacctgacactttccccaaagtcaccaatgtctcgtagtgatgattcagccataacctgtaaaggattctgtacaatattatggaacctgaaagcagatttacaagatgggtgcttaatattcataacaggagacccgcttaccctgggctgttgggaatccaacatggctgttcagttggctccttctgttgaaagcaataatatatggacagctgaaataaaggtaccatatggagtgcatttcaaatatagttattttgttcgagaagaaatgagttcctcttctgatattatatggaggccaggtccagtatactccttatcaataccttcagatggccagaaaaagcaggttattattgtgaaagacctatggatgaaaaccagtctaccaggtcttcctactcctacatggggatcatggctgatggaagctgattctcttgaaggtgaactttttgatggtggaaataaccagaacattgtgaaagatcactctgtcagggatacacggaatcaaggcttatctgtagtggatttgca

SEQ ID NO: 32875 - DNA, 1942 bp, Zea Mays
caaagtgccgaggaagggtgtgatactgatttcagacaaggcggagggggcgagggtgaaacgacgcgtcatttgttcagcagcccacggactccggcagccattcaaggctccaccaacaaaacgctcatccccttcctgattctcggcctccgtctccgcctcttcctcctcgcctccaacgccgccaccacagccccggccccgtgttgttcctgcaccccacccgtcctgcgaggctcctccgccatgccgtcatacgcgcaccaccatagcagccctctggtaaggaacggtgccggccgtgttgtccgtagacgattgagggggacagaaagagattctttggatgtttttctttgtttcctttatttataccgagagataaacaaaaaaaaaaacccagagacgaaaaaactttttttcttgaaccgccctgcttcccctctggtgttgggaatttgtgattttgacatacgacctgtatgggtatttttccggccggtgaaggatgataccaggatggacgcgctgaagtgtaacaacaacagcgccccgccggaggagaccgcggaggacgccgacgccgccggggcgctcgtcgagaaagacgggttctcggtcgaggacttgctggacctcgaggagtttggcgagcctgacaaggacggcgccgagcctgaggacgatgacgccccgccggtacccgccgcggccgaggagaggtcgaaagacgactcgcagccgttgtcggtcgtgacgtacgacctcccgtcgccgccgccggagatggttgaactgccgtcgcatgacgtcgaggagttggagtgggtgtcccgtatcatggacgactcgctctctgagctgccgccgcaggcgcagcctccccccgctgtggttgcgtcgttggctgggcggcccccgctgcagccactgtggcgtgcagaagaccccgcagtggcgcgcggggcccgagggcgcaaagacgctgtgcaatgcgtgcggcgtccgctacaagtcgggccggctcctgcccgagtaccgcccggcgtgcagccccaccttcgtgagcagcatccactccaactcccatcgcaaggtcctcgagatgcgccgcaagaaggagggcgacatggtcgccaccgccgcgccggccgtggcgtcgttctgagctgcactcgctgtcagcaaggacgctggccacccagcggtggctgtacatttttttttcttgccataatggccctgtaccgtacctgaactctcctcccctcactcatcctagtgtggtcgttgtagtcccggttgggttaattagagtttaggagtctcaattaggccaggttagttttagctttggttccggttaggtttctactgcgacagctgcggcgcagaacttcaattcgtagcatttctaaaaagtagtttctatttcgtcttcctttctccgagtggagtaggtcgtttggtccatccatcaatggccgaaccggactgctggggtactccaccactgatgaggagggctgttgctggtgttggaatctggaaggcagaagacgagtctgttcgttcggccaaggaagaagagtgcaccttgcacttggactgtatgtattgggacaggtgcatgttgcgtgcacccttggttacatacatcacatggtgttgtcacccgtaacgacatgataggcctagttaggagagctgagtggtggtagcgaggtgttgaagcaagaaactatgactttagcttgctatctgtgtgattgcgatctgtgtgaggctgaggtaaaaaaatatgaatggaccaatggaacagtaaagtcagtggaggaaagctcttcccttggttgtgtggcatactgcaactttgtgtaatggtctccccctgactctacctggcgcagaggcagagagagagctacgtataggagaa

SEQ ID NO: 32876 - DNA, 2777 bp, Zea Mays
cgcacacgcaatccatctatccatccatccatccgtcttgagaggcggcagcgtcatctgttagagaaaaaacaactgcggtgaatcagtcggatttggaggagccgaataaataaccaaggatactgcgaagggactcctcccggccccaaaagcactttccttgcgtccccgtcagggagggagggagggaggggagcattgctgtgcgggatggcgaggaggaggatgaggaggggaggcggtggcggtggcggtggcggtggcggggtggtggatgtggtgcgggtgcggcggctgctgctgctgtccctgacctgctgcagcagcatttggccaggcggacggatcttcgctgctgcggacactgaccccaacgatcttaacgtcctcaacacgctcttcaccagtctgaattctcctgggcagctcacaggttggcaggcgaatgggggtgatccttgtggccagtcatggaagggcattacttgctcaggatcaggggtcactaaaatccaattaccaaacttgtcactcactggaaatttggcctacaacatgaataacttgggttcattagttgagcttgacatgagccaaaataaccttggcggtggaggtcaaatacagtacaatcttcccaatatgaagcttgagaaactcaatcttgcaggaaatcaatttggtggaaatttaccctactcaatttcgacgatgcctaatcttaagtatttaaaccttaatcataaccaactacaaggaaacatcagtgatgtattttccaacctttacagtttgtcagaactggatctgtcctttaattcccttactggtgatctaccacaaagtttcactggattgtcaagcctgaaaaaagtgtatttgcagaacaaccaatttactggtaatatcaatgtcttagccaatctcccccttgaaactttgaatgttgcgaacaaccatttcactggttggattcctagtcagcttaagaagataaacagtctacagactgatggaaattcttggagcacaggaccagcgccacctccacctccatacacagcgccgcctcctcctccaaaccattggaatgctgatggttcatcaagttcatcaagttctggtggaagatctgggataggtggtggaggtgtagcaggaatcattatatcgttgctggttgttggatcagttgttgcatttcttgtgatcaaaagaagaaaacgcaaagctgctatgaaagaacattttgaacagcaccagccattcacttccttcccttcaaatgaagttaaagacatgaagcctgtctacgaggccaccacagtagacatagagtctttggcttcacctgcttcagttaatctgaaaccacctccgaagatagaacgaaacaaatcatttgatgatgacgatgatttttcaaacaagcttgttgcaaagaaaagtaatataacacctataaatgcaactgtttattcagttgcagatctacagatggcaacagatagctttagcttcgacaaccttgttggagagggtacttttggacgtgtttacagggcacaattcaatgatggaaaggttctggcgatcaagaaattagatagtactgtgatgccatttcaatcatctgatgactttgctgaactggtctcgaacatttcaaaattgcaccatccgaatctgaatgagcttgtgggctattgcatggaacatggccagcacttgcttgtgtatgatttccacaggaatggatcacttcatgatctactccacctttcagatgagtacagcaagccacttagctggaacactcgtatcaagatcgcactcggctctgcccgtgcactggagtaccttcatgaaatatgttctccatccatcatccataagaatttcaagtcgtcaaacattttgctggactcagaattcaatccacacctttcagatgctggacttgcaagctttattcctgatgctgaattccaggcagcagaacaaagtgccggatacactgccccagaagtggacatgaccggtcagtacaccctcaagagtgatgtctacagctttggagttgtcatgcttgaactattgacaggacgtagaccatttgacagctctagacccaggtcagagcagtcacttgtgcggtgggcaacaccccagctgcatgacatcgacgcattggacaggatggtcgatcctgcactcaagggtctatacccagccaaatctctatcccgatttgctgatgtccttgccctgtgtgtccagaattcaggccaccaatgtcagaggtggtgcaagcattggttcgacttgtgcagagggccaacatgacgaagaggatgcttgatggggatacttctcggcgaccagatgacctggaccaagatttcatatgacaagctgaactcttgtcagattgtatttatttcgttcgactagcggcccagcagagacataatcacacaagaggaagaaacagaactctgtcagcttcgccagtacataatcacaagtttttcttggtagcaaagttgtgctatatggttgtactgtgtctacaaaatagtaccttgatcttacgctaatggcatattgttataattctttggtaacttatatgcaaatgccccagataaacaaaactatggtgaagtgtgccgaatgttaaaataactgattagtccagtactgctgcatcaactgaaacaagttgcacagtggaaatatttatcttggtccctcaactatccccttgaggc

SEQ ID NO: 32877 - DNA, 1388 bp, Zea Mays
tttttttttctcgaaagcgcaggggaactgcgcctttaattatattaagaagaggagaaacataatacattgcttgtggtcccttttgccagagtacatgccttgctataagagttgaagacctgtatcaatgagaaacactggtgaaattgaatcctgaacccatctctactgtttgtcctcctgtagctctcctctgatcccccactccctcctatttcagtatcttccaagtccgtcccagtagttagttgcattggcaaaactttaacaagtcatagtaaattagtaacgttttttatttattgtgaaattttttacaagtctactttgaatttttatgctgtcaggtagtaaaagtggagcattgtgaaagagtgcatatcattgcagctgcaaaacggatttgtattgccaactgccgggaatgcatcttctacataggagtaaatcaccaacctcttgtgttgggggacaaccataaattacaagttgctccattcaatacgtgctacccacaactgcatgaacatatgatacaagtggctgtcgatcccagtgtcaacaaatgggaccaaccttttgtgttgggagttgttgatccacatgattcattatcccatcctgctggagtttcagatgttaaagctgaatcagcaacatgtctggatcctgatctattcaccaattttttgattcctagttggtttggggatgaaaggcaagggactacaaaccgcaatcctttcccactgcctgaaatttatgggacatcccaaagcaaaaagatatccaaaagatgattcgggagctgcagcttgatgagaaccggaaaagggaattggcaactgcccttcacgttcagttcaaggattggttatacgcttcaggcaatatccgccagctctactgtctacagggcgattaacgatgggatttgcaagactgactacccttttgccgactcctactccaaaacattcgacaattgtcgaaagctgaccttcctttccctgggagagaggattcccacccgcgcagaaggatgtgaagatgtactgttacctacttttttacagattcatttgggtatattccctttgctgcgagttggaggtactaattaggatgtaatctccaagcctactcattttttttggcccttgataacgtccacgagtatgtaatagggactggtgaatcatacgttgtaaacatttcttcatcccgttttgctaaatggctcgtcatgtcaaccctctattggatcaactgtattgtgctcatccttatagacatgcttgtttgcaacttttttcgttggtcaaggttttgccactctcaggacgattattgtcagaatttatttgcaacatgttttggcccag

SEQ ID NO: 32878 - DNA, 4890 bp, Zea Mays
ataacaaggagtcctttattattattcttattatcttagtgtaaatattattattattaggggcgtttacagcgtagcaagttcactcttgcaagcaagggacttttacaagagcatgtagctagttagttcatttggagtgtgaacatgtcttatttgcacacttgcttttttcccctctctttattttctccatcttcaggatggctattattagctcctttgcatgcgttcatggaattctgcgtcagaaaaccaaaacggaaaatagcattattggtcagtgtaatatacatgatatatatatgctacggtggagttattaggatgatatatctctactactacttatgttagtagtgtaggcgtccacacaccctctcggcgcatggttctgcctctgcagccgcgacacccgcgcgtgccttcgcctccgccgccgcgatggccgtgcctctgcccccgcctcctccgccctcgcgacgctgcgccctcccccgcgatgcctgcgccttcgtccccgtgatgctcgcgcctacccccgcctcctctgcccccgcgacaccgcgcgcgcagcctcctccccgcgatgcccgcccaagctcccaaatgccggcccccgtctcctccaccgcgactcccctcgctctcccgagactcccagatgctggcccccgtatcctcggccctgatgccgccgcgattcccagatgccggcccccgtatcctcggccccgcgctcgctctcctgagctccgacgggctcccgccctagcccctgacaccatgttgtgcccaaccctaaacctagccaccacgccgtcaacaacgccaccttccttcctcgccaccacaccttctttagatggaaggcgcgactggtggcatcttcctgatctcggagcacgtctaatcctcgctccaaatgctgctccgcccccaatccgtgcggcatcttcagatggaagccgggacaatgccccatccccctctcccgagccccgacgactgacattccagggatgtcgctctgcgatcctcacctcctcgtcgttggcggtcgcgcgacctcctgaccgtcgtctccgcccgcgagatccccccgactcgcccacctctccgtccacagccgcctccatcacgcacctccacgccgacgagaaggctcgcccacctctcagtccacgactgcctacgacgcgtcttctgaataaagatctctcgaagcacccggtggatgggttctctgctgggctggtcgacgacagcaatgtcttcgagtggcaggtcaccatcatcggaccgcctgacaccctatagattggttgttggacctgtttggtgttcttcatgatgggaagaagtcgtacccgaccattctggcatgtatgttggtagtttctctcgaggtttgtttcctgtcacttctgcttagcatcagaatggatttagtgtaatcggtttttcattttttcatactatagaacttggtttgcaagttgtgaacaatgttgatgatgcagagtttatattagcccatggtactgaagtctttggttcaccttctagcaatcctcttcccaaaagtctcgagaagcttgagcaggttctaatgcttggcctagaaaagggacttccaatggtgctgcctaatccagaattccagattatgtcactgtcgaagcttgagatcttcgtgtcatgtctggtatgttttttttgaacacgctggacatgtgtgtatccttatagagtagagagataaaatgagaaacaatcccatacaaagcaacttctccaccttacctaggagataagataaagttgaagcaaaacaccaaagttaatcatctaatatacatgtaaacaatgaaccgaccttactgaaaacactcgcactggaccctctctgcgaccaaaaaaatagctcctagagtttttagggactagaggctcaactcatctttgtagaagtgttgtgctgatggaagtgatggggttgcaccataaaaaatgttcctgtaattccataagtacttatacaatagggtttggaggctcgtcggcaaccggacaggaaaacagcaaggcggaagggcattgctcgatcgctggtccgatgagtggcactgtcagggagcgtgacaggggcgacaaatctagacctccacgtcggtaagatgttgtggcaaaatgtcagtgagctcacattttgaggagctgagggtcaatgtcagcgagctcactgttgaggagctgagggtccctgagtacctgcagttcaaggaacaacttatggaagaaggctttaaggttgaggctgggagaacttaccatcggacagttctagagatacttgaccaattggaaaaagtatgtatgttcctaacttttctatttgagtatatttatatatattgggttgcttgttggaactaattttttgcgctccgaacttctgaaaatctttgccatatccatttgatgattatgttctgattaagtgatggtgtctaagcaccaaaaatgaaagcaccctgactcccgcaactgaaaattgatatcaaggtctttctgtttgatcttgttcactgagaatatgatgtacccattcacattctttgctttcccatatatttttctagctttcaataggatccttgtgaacccaatccactatcatttctgcttaagttgtctccctaaaatgaaagaagtatagacattgacttaggaagcatgacgaggtaaaatgaaaattaaacaaatcctgactatagcacacattcacgccaaagaccttaaattgcttcatgttttagcccatttcccagtgtgtgaatggtgttgttgatcctgaaataaaattgttggttttctgtgctgtttttcttcacaaattctggacagtaggtatgattcatttttatcactgaatatattagaattcttatcttttcagtgtgcaaaatcatgttctcctattgatagaagcatttatttagatttggcttacattgatggatgaatatgatttatatgaagttcctggtatctatcggcttcatggtatatctctactactcttaagaagataccagataataacaaggcaaatagatggttactgtggcagtcaaaagtttgaagccagatgcgcttcaaggtcatagagaatgggtggcagaagttgactttctgggacagttgcatcataaacaccttattaagctgattggatattgtattgaggatgatcaaaggttacttgtatatgaatttcatggcacggggaagtcttgaaaatcatcttttcagaaggactcttcccctaccttggtccaacaggatgaagattgctctaggtgccgcgaaaggactagccttcctccatggaggtcccaaacctgttatttacaaggattttaagacattgaatgttcttcttgatgtggagtacaacgcaaaactatctgatttcggtttagcaaaagctggtcatcagggtgaaaaaactcatgtatctactcgggttgttggcacctatggttatgttgcaccagagtatgtaatgacaggtatcagggataaacttttgacttcagtagctacctatagcagaaattatgtaccttgtttatctgttgcatgttggttctttacactgttttctgagcttgtagttattctcgtgttcactccatattggatagtaaattggcttaacatttttgtccgaagacataaaactaaggtgccattacaaatgttcttctttcaagtgaaactgtgtttttcgtttttacatgcagtaaaggttgtaaggctgtagacttatataatgaatcttgcgctccacttctttgggacatgatttaacatttcttaacatttctcactctataacgctttcagatcacttttcatatgttttttagatgcactttttttttggagactaagccctaagggcaacaatggagatgaccagcgtcttggtttatcaagaggaagttaatccctctcaactgaaactcccatcaaatttggggcgtagtgtgtcgattcagttgtaactattatatgtcattttgggttagcaaactgtatctactaatttctcagacttatgccttttgagctagaaacttgtgtaagaattttttgcactcagtgacatgctggatagtgcgagtagcagattacaatagtgacggatgaacattgtattttactttacatgatggatttttttgatgtgtaaggcttttaaggcatgtaaaaattcttaacttttaaaagatgctaacacgaatataaaattgcaatcattattcttgaatttcaatgtatcttatcataacatgttcactccgtagcaacgtacgggcatttacctagtatatatatatatacgcacgtggtgcagtcgaagttgagggtgagcgggaacggcagcggcgcgccgcactgcgcggggaggtcgcggatggcgtcggcgttgagcggctggtaattggccgccgcctgcttgacgcactcgcacgcctgccgccgctccgccgggccggacggcatggccctgatccgcttcacgccggcgcagcactcggcggccggggccgcctccttgcccgtcacgtagccgacgcaggggcgcaggcttgcgtccacgtccgcgcagttcacgtccgccctaaccgccgccgccgccagcaggaccaacgccactgctgccaccgctgttgttgcggcgccgcccttcttcttcatcatcgccatcgatcgatctgtgtctctctctctcccgaacttgacttgctgctgctggagctcgatcttagcttgttgctgctgcgttcatggagcggctcgagcgctggggtttta

SEQ ID NO: 32879 - DNA, 2898 bp, Zea Mays
tcggttagcttttactcatcttttctcttgccttctactcctcgcccacgcctcctcctccctccctcccgtcgtcgcttcgcttcgcttcccttcccttcttcccttgcgaatcctctgaccaccgcagagccacccccggaggaaacgaaccgtagcgcagccgccgatcaccatggcgtccccggcacggcccgccgccgcatccgtctccgccgccttcggcctctcgcccgaccccaaacgctgctccttcgaccaggcgctccggcacaagactgttgatgtcatttgttaattaccacgatcaagaaaaggtctctaaagaaatcgtaacagacgctatagaaagctgcatgaagaaacaggcagataacttgttgaattcgctggaagttatcagtggtaggctgtcgcaattggagctgtattgctataagctggaaaggtccattggagaattacgaagtgacgtgatggattatcataacgaagcaaatctcaacttccagtgccttgataagcaattgaaagaggttcagaaatctgtgcaggtcgttcaggaaaggcaggagcttgctgaaactcagaaagaaatgaccaaacttcagatagtacatgaggattccgcacaaaagagtgaacgtagtgctccatcagttttcataaatagggaaaatgagattgcccttgtgccattgcaccaagtaaattctgtccagtctcctgctgtgcaattccaaagttgcagtggccttattctacagcaactggtgccagtccaagaccagcagcgctcaaaccaaactgccatgtactgcatgcgaggccaaagtcatctggagcacagacaggcccaaatgttccaagctgctgctcaacctgtgcagacacacactactaggaaaactcaggcacatacagtacttgaggtacctcaggtaaccaccagacagacaccagagttctacgctcaaccgcagcatcaatggcaacatcaaacaggtcagcagcttcagtcccaggtaaggcaaccacaaccacaggtggttcaacaacagcagcagtacaacaatatccagcaaggtccagcacagatggtccagccgcaaacatcctctccacatgctcatagcacgccacagatcacactagtatatcctccatacggagctcatcagtctgcatgtggtaacgctgaggcacgcactgggagcattgtcgtgccaccttcgcactctacaatttcctcatcccagcggaagcatcatgaagctgctcctatttatgtacaaagcaacacagtttctgttccattgacggagcagcaccagcaacttcattcacttggcaatggctcatttgtacctcagccaagtaaagttagtccatgcggtgtagcatcatatacggtacaagggaatgcacaggcctacagccctgcttacggaagcccttccagcaatcctgctactattgttgctgtccttaatcaacaagcacattgcagtgctcccatggtgcttcatcacctgggaccatctcagtcagtgcagaaccatccgataggcattgctgataaggttgctcgaatgggttacccaaaggatcaagtagttgatggccttgcgctccgtatggtggatgcaggccagcctgcagaatgtaacaccctgcacgataggttgagctctgtcacccatgcggtggctcctcaggcatggtctggatagttaagaatgaattagtcatgagatgctcgtgtgataatgtacctcattatcgttggaaatcttcaggtatttcctctggcgtcttcttatctgccaggactacatatccaccagcttattttttgcagctggatggtcaagatgaaataagactgattagattagttgaaatgatgctggcatatgtcctgccttttaatggacatatgtgattgtaacctgtttgtgacttgcacacgcatgcttgcaatataaaaagatacgatgatttgttggttgctgctactttgctgtggtgaagtgttgagctcgttccatctgctccggcgccagttgaagtgtgggagaaagatggatgcgaagttaagttgacttgtttttgaaataaattcaattggattgcgagtttgagcggatgatattatattttttatgagagggatacccccaactctattacttgcataatagaaatacaacatgtttacagaaaggttttcagcgcataacagcatggtggccaagttcagaacccattattacatcatggtggagtacctgattgaggcatcacaaccatcagaccacaacaagtgcgacaacacatcaatcaagcatccacctagactgggcgatgaagtctacatactacagtcacaaaggggctgaaacccagagagataacaccagaaagcagtagcacacaaaacagagagacgacgttgtcgcagctggaagccaggattactccgcatcatcaactttatcattggtgcccgtgatctgccttccacttgcagcccggacaagaagtttagcaccctcctaaagatcctgcaaatctttttgctgagtcctgcccaacacaaaatcaaagcaccagcatggcaaataatcacattaggtgatttgattaagattttttcgaagctcattttgtttctggtcttccatatggcccaacaagtaacggcaattagaactacacgagtagacttgtcaattttgagatatctctgtaaccacacaatacaatgatctaagttccccaggcacataaggtgtgtcgaggcacttggccaccactccccatatcactttagcaacagagcatgtaaagaaaaggtgatcaactgtttcgacttggggacagaaactacaggag

SEQ ID NO: 32880 - DNA, 1121 bp, Zea Mays
tggcacccctcacctctctctctctctctctctctctctctcccctgtccgcggtcgcgtcgccttccaccaccaccccaccagcccacccgcatccgcgtcgctgctgctgctgccaccgtcgtgcgtctccgcgccacgcgtgcgcgtacccgtggcggatcgcgctgcagcagaggcgatcggcgagcgatccaggggaggagatcgcttgtcggcgccgccgctgccgccgccgatcgagccgcgactcctcccgttcggtcccctcgcagctcccgtccgggcccgtccctcgaggcagggcggggtggctcgatcgcccgcagatgaaacatggcttcgacgttaaacattgtaataggttctcatgtatgggtggaagataaagatttgtcctgggttgatggcgaggtatcccggattgatggtaaaaaagcccatgttcgcacaaccaaggggaagacggtcattgcaaatatatcggatatccaccctaaagacacagaagcaccgcctgatggggtggatgacatgacaaggttatcatacttgcatgagcctggtgttttagataacctggctgtcagatatgcgaaaaatatcatttatacctatactggtaacattctgattgcaataaatccattccaaaggctacctaatctggttgatgcccgtactatggaaaaatacaaaggtgcaaatcttggtgacctagatcctcatgtatttgcaatagctgacgtctcttacaggcaaatgataaatgaaggaaagagtaactccattttggtcagtggtgaaagtggtgctggtaagactgaaactacgaagttgttgatgggatatcttgcatatctgggtgggcgatctggaacaggagagaggacagttgaacagcaagtattagaatctaatccagttcttgaagcctttgggaatgcgaaaactgttcggaacaacaactcaagcatttcaggaaatcttatagcagctctggtgaaagttatgtggcatacttaacccttttttggtcaccatagtcactagttaaacaagcccgttgattgaagtaactgtggtaattttagacaactccattcgaaattataagtcac

SEQ ID NO: 32881 - DNA, 2206 bp, Zea Mays
ccagctcctacgtgcgagcgccagccgccctcctctccagcgcgtggacgcgcagccggccgccgccctcatctacaccagcgtcgccgctctaccccctccagcggaccagcgccgccgtcggtcggcctccagcggaccagcaccgccgccctgactccctctcctccagcgtcgccacccacatcctccctccacaatcctctaacagccagtgccccacctctcctcccctctgcccccctcctccctccaccatcctccagcagccagcgtccatcccaggtttaggtttccagcagccagcgcccagcccaggttcaggttttcagtgacactgaagcaccccaagttcaaattcagacataagtcaccatgtcttcgtccatgcaatcttcataccttcctgctaccactgagtccgtagccaaggctcaggaggccaaggacgcttctgagtccatctcaatcctctaccgcgtgcttgaggatccctcttcatctgcggatgcactgagagtaaaagagcttgccatcacgaatctcacaaactacctcacaaaagagaacagagctgaagacctcaggaaccttttgacccagctcaggcccttttttgcattgatccccaaggcgaagactgcgaagattgtgcgtggcatcattgatgccgttgccaaggtgcctggaacatctcagcttcagatctcactgtgcaaggagatggtagaatggacccgtgcagagaagcgaaccttcctcaggcagcgtgtggaagcaaggctggcagcccttctgttggagaatcaggagtatactgaggctcttacactcctttctggactcatcaaggaagttaggaggctggatgacaagttgcttcttgtggacatcgaccttttggagagcaagctccatttctctctgagaaaccttccaaaggccaaagcttctctgactgctgccagaactgcagccaatgccatttatgtgccgccatctcagcagggcacaattgatctgcagagtgggatccttcatgctgaagagaaggattacaagactgcttacagctacttcttcgaagcatttgaagctttcagttcactggaagatcccaaggctatcttcagcttgaagtacatgcttctgtgcaagataatggtcaaccaagctgatgatgttgcaggaatcatctcatcgaaggctggcctcaagtatctgggtcctgatgttgatgctatgaaagctgtggccgatgcctactccaaaaggtctctgaagtttcgaaactgctctccgtgattacaaagctcagctggaagaagatcctattgtccacaggcacctttcctcgctgtatgacactctcttggagcagaacctctgcaggctgattgagccctactcaagggtggagattgctcacatagcagagatgattgagctgccaatgaaccatgttgagaagaagctgtcccagatgatcctcgacaagaaattcgcagggacacttgatcaaggcgctggctgcctcatcatcttcgaggacagcaagactgaggagatcttccctgccacacttgaaacgatcacgaatgttggcaaggttgtggacagcctgtacatgagatcggccaagatcatggcctgaaagatgcagtgggaggcctaggtgtcgtcagcttcttttcttggtctattgtcagttcagttaaccaaactttagctgtccaagagacatcttattgtggattttttttttatttgtggttttgggtggcagactgtttgcgttacaatttgctcatgttgctcatgaatactcatgtttctgtttgatggaagtactgttaaggctatgatgtttttatactttatgttatttctgctgtcatggaaatccaggtgttagctagctacctacctgttgccatactttataatgaatttctgtgtggctctttctttcacatatcaaggggcgaaacgtattcctcttgcatgtatgtaaagtgcggaagaaagcagccgatgccacaattcatgcaaggatatggggagtatttcacaccaaattgcatactttctttaaactgaaattttgattggtaaatctatcatccactttgttgtgctgacaggtagagcaagatcttcatttcaggagatgctggtttgtcaaataaaacttacttcctccgtc

SEQ ID NO: 32882 - DNA, 4087 bp, Zea Mays
atggcggccgtgccggaggacctccgctgcaagcgctccgacggcaagcagtggcgctgcagcgcgccctccatgcccgacaagaccgtctgcgagaagcactacgtccaggccaagaagcgctccgcctcctccgcgctccgcgcctcgctccgccgctcctcagcctcctccctcgcgcccgtcttcccattctcctcctccccctcctccgccgctcgcctccgcgccgccgacgaggacccgcccatggcggtcgcgaggcccctctacggcagggtcgccggggaggcggtgtacgtggctgaaccggtgccggcgcccgcgcggagggaggtcgcctacgaagggctgcctcggggcaatgcggctggtggcaggactgcggcggggctggtcggcagaggcccactatggtttcctggtggcggctctgaagggataaggagttgccaccagtgccggaaggctgggggtgtcatctggtgtaccagctgtgacaggagaggctactgtgccagatgcatctccagatggtactctgacattccgatggatgaagttcgaaatgtttgtccagcatgccgtggtatttgtaattgcaaagtttgcttacaaggagacaacttaataaagcattcactgacgctattattgataggaccaaagacagatgtcctcagagcaaagataacttctgatgagcagatgtgctgtgacttttgcaaagtgccagtgtttgattatcaccgatactgcccaagatgttcatatgatttatgccttgattgctgtcatgacatacgtcattctcgggccaatgttgcacgaggagaatatactgaaggttatgttgaagataaaggtagagattcttttaatagaagagcaaggttggaaccatctgctgagagtgtcaatgacaagtcattatcttggccaatagatataaataatattgacattaaatctttattccctacatggagagtcaacaatgatggcagcatcacttgtggacctcacgaggctggtggttgtggctcctcaaagttggtattaaggcggatattcaaaataaattggattgctaaacttgtaaaaagttctgaagaaatggtcaatggttgcaaagtacatgatttggaggatggatgcttgtcttgcagtgatggcagaagatcggagtttactggtcagcaaaacctcggtctctcaaaatgctcaaacagtgatgagattggtaggaattgtttgtactcacctgtattggaggacttaaaatatgaaggcatcattcattttcgtaagcattggaaaaacgcggagcctattattatcagggaagcatttgagccttctctatcatcaagctgggatcccttgagtatttggagaggtatccaggagatcatggatgaagaaatggatgaagatgtcatagtcaaggctgtggactgctcgaaccaatcagaggtagatatcgagctcaaacagtttatcaaaggctactcagatggcagcaaaggaggagatggcccacttgttgatgctgaaattgaaagagtggccccgacccaatggggtctcctaaaccttgctgccaagttacccccagatgccttacaacctgaattagggatgaaactgctaattgcacatggaagtcaccgagaacttggtaaaggtgattcaatgacaaatctaatgattaacatgagcgatgtggttcacatgttaatgcatgcaactgaagtgcattaccaatgtcccaagagggtaagggtacagtctgatgtatctgaaatgattgctaatggaactagtgtccatgtaaatgctcatactcctgttcaaaatttgaatctggatattgaagagcaatcacacaaacactcgaaatcacacatcgaggagccaaacactaataattcagaaggatccctggctggtgctgtctgggatgtattccgcaggcaggatcttccaaagcttaatgaatatctagctgctcatcgggaagaatgtgcagctagatgtcaagcagtgtcttctgttaagtatcctatttatgatcaaactgtgtaccttaacgattatcataagaagatgttgaaggatcaatatggaattgaacccttcacattccaccaacatattggtgaggctgttttcattccagctgggtgtcctttccaattgaaaaacctccaggtgatgcatctcgtcgtcatatttaaactttgtcatgctcagagtttttgttcttatttttgtaaaaagtggtgcctgaattttcaaccttaactattaagggataaaatgacctgggggttccataaattacttgtgttaacactacttgtatgctcagaccatcattttcaatgagcagagcttttctaaaatgtttcttgaatctgcatatttttatgcctgtttggtagtcactctagaacataatgaagtggtaggactcttatcaattttaattttaatttaggctatgaatatagtgatttacatgcgaacatgctaaagagcttggaaaaagaaaggaagaaaagcactagtagcagcagtgctcagaagtcagaaataaagcgagagtgttactgcacggaacatgtggaaactgtattttgacttgtttttttttccataaattacttgtgttaacactacttgtatgcgcagactaaggtgcgtttggttggagagttaactagaacggagcggctctattttagtttttgagaatgagccgttttattctgcgtgtttggcaaacagaacagtgtcgctccattttttgtttcgttgaagagtagaatagagtggagtcgcttcgttctttgtttggttggagacccatatgagtatagatagaaggagagggaggatagcgctcgcgtccgagagagcgctcacatccaatcgtttttgtggagcaagatcattccaaccatttatggtaaatttccatatgggtcttataggagccgctccgctcatttttgttggaaaccaaacatctaaaaaataagaatggagctactctattcttcactcctcaaccaaacatacactaagtttcatgcgtgctcatctctcactacgtgttgaatttgacttgcttgttcttatttgttatgcttattacttggagaagaattttgttcctctatctttgatatcatcttctttacatgtgattatttgaactagttatgtactatctactgaatgcggctgttatgctttgatttgttgaaaatgataatatcttctatgcttctgttattgtttgaatactttatttggggatgtagtttacatttgttttctgttatattgacatgatcagtccacggttcaattggctctcaattttttgtcacctgagagtttgccagagtcagtccggctgtcccaagagatccgttgcctgccaaatggccatcttgcaaaactgaagatgcttgaggtaaaaaagatctccttatacgcagcaagttctgctgttagagaaattcagagaataacccttgatcccaagttcaatcttgatcctagttttgaggatcaaaatttgactagggcggtttcagagaacttggcaagagtaaacaaacggaaggtatcttgcagttgagattgtgggggcctggtgaaattatgacatgccattcagaggattgaagtagatatagtgcttgtacatgtattatattgtgtcatatgaaaggaacacattctaattcttattgggttacacattgactttacctgtatattgtgggttaggaagagtaacagttaagcttctgaggaacaagataaaaaggcgctggaaagctcatgtagaattgttagcacaataatctctgttggtagcatctgaagaataattaattagaccgaaattgttacattgtgaacacagggttcaagatttaaatactatattttcaccacggttttgcatttgtgtcaacctgcacgtagtaacgtctaaattactatagtgtttcaaaccaagtgccttttttatatatagcatgatttatctagaaaaatcaaaata

SEQ ID NO: 32883 - DNA, 3073 bp, Zea Mays
gcaaatgtttctgcgctctcttttctcccctcaccctttctctttctccctcgaccgccccggatctatctcgccgcgccggcgcgcagctgagccgccgaagcgaggaggcaatcgaggcggacgaagcgccgcaccaaattcgacgggggatcgagcaccagaggcgtagcgcaaaatgttcaagttcctcaaggaggtggtcgcgggatccggatcgggactcaaggacttcccctacaccatcggcgagccctacgcatcggcttggggctcatggaaacaccaccgcggtacctccaaggatgatgggtcgcctgtgtcaattttttctctgtcagggagcaaccctcaggacagacacatggttgctggtcgcaacggtgttaagagattacgaacagtgcggcatccaaatatcttatcctttttacacagtactgaagcagaagctgcggatggacctgccatgaaatacacaatttatattgtaacagagcctgttatgccactttctgaaaagctcaaggaactgaatcttggtggtacacagagagatgagtactttgcatgggggcttcatcagatatccaaagctgtgagctttctcaataatgactgcaaacttgttcatggtaatgtatgcttggccagtgttgttgttacacaaaccctggattggaagcttcatgcttttgatgttctgtcagaatttgatgctaataatgaagcctctggtagccccatgttgcaatttgaatggttagttggaacacagtacaagccaatggagctgtcaaagtcagattgggcttcaattagaaaatcacccccatgggccattgattcttggggactagggtgtttaatttatgaactattttctggtgcaaagctggctagaacagaggaccttcgaaatactgcttcaatcccaaagtctctacttccagattaccagaggctcttgaattccacaccttctcgtagactaaatccttcaaaacttattgacaacagcgagtttttccagaacaagttagtagagaccatccagttcatggaaattcttaatttgaaagacacctttgagaaagacagtttttttcgtaaactccccaatatagctgaacagcttcctcgtgaaatagttctgaaaaagctgctccctgtattggcttcttctcttgaatttggttcagctgccgctccagccttaactgttttgttaaagatgggttcctggcttcctgctgaccaatttaatatcaaggtcttgccaactattgtcaagctttttgcctccaatgaccgagctatccgagcatgtcttttgcatcacataaatcagtttggggaatcaatgtcagctcaaattgttgacgaacaagtttttcctcatgtagccactggcttctctgatactgatggtactattcgtgaactgacattgaagtcgatgctcgtattagcaccaaaagagcgtgcacatacgcacaacaatttgccatggcatgctttgatggaatatttctgggattttagatcctcaatccctcatgcactgatttctatttcctgccaaaagctatacttgcagatgactgattgtctggtccgttattgcagttatctcagcgtacaatctcaggatctctcttaaaatatctctctaagctacaggtggacgaagaacctggtatcaggacaaacacaacaattcttcttggcaatattgcaggctacatgaacgatgggacaaggaagagagtactgatcaatgcattcacagttcgtgcattacgtgataccttccctccggccagagcagctggaatcatggcactgagtgtcactagttcatactatgaaatgacagagattgcaactcgcatcctgcctaacattgttgtgctcacatttgacccaaatagtgatgtccgaacgaaggcttttcaggctaccgatcagttcttgcaaatagcaaaacaacaccatgaaaagcttaatacaggagacaacagtgtggctgaaagtactggtgttaagttaaagcctggaaatgcaggtttacttgggtgggccatgagttctgttacacaaaagggtaaaccttttgaccatgccccaatatctactgcaaatgccaataattctcaagcatcaacaacctcgactgccactccagacactcaggcttccacactagcgtatgcaccatccacatccacctcgcttgatcaagctgcatcagcatcagcaaggtcgtcagtagatgggtggggtgagcttgaggatggtaatatccatgaggagaatagtagcgataaagatggatgggatgatgtagacccatttgaggacaagccatccccatctcttctatccaacatacaggctgctcaaaaacgtccagtggtgcaaccaaagcaaccggttgcaaactcatctaaaccaaacccactgaaagcgccaaagtcagaagacgatcctttgtggggtcctatagctgctgcaccacctaaaagtgcagtaaaatctgcagacatcaagccatcaacatcacataatgatgaggatgacctctggggttcaatagcagcacctccaaaatcatctgggaagcctttgaagccagctgtagcgaatagtgacgacttatggggtgccatcgcagcacctccaccagcaaccaaagccagacccttagcctcgtcaggtaggggccgaggaacaaagccagcgcaaccaaaacttggtgctcaaagaataggaagaacatcttcaactggaatgtgacgtcttatgatatcaagtgttgtacaagaatgcaaagttttcctttttttttcccctgccttgcgttgagtctgtccaggatgacattctttgtaaactagtaaaaagatttatgtatatgagcacagttttgaccaatgtattagtattattttaccattgtgtattaaaatagatccagaagatttttgcacatcacagctgcaatcatcttaagtccatattattaatatattgctatgtcttattttggcgtgataagagcaacttaatg

SEQ ID NO: 32884 - DNA, 177 bp, Zea Mays
gggttcttcccttcctccttccttcgtcctccctccaaactccaattgagatcgcagccacacgacggagaaccacgcgggagggctgcaccttggcgggggggaagagaaatgggggggctagggtttttagtggtgagggctgcaaaggtttgaggaggaagaagataggagagg

SEQ ID NO: 32885 - DNA, 5721 bp, Zea Mays
ggcaggggaggacagcgaagagagagagagagagaggggagaccggggggcaagcctgggaggggccgaggaggcccgcttacgaatctcgcgatccccaatccggaagcctcgattcgccgatccgggctcggccggggagagagggatcccgccgatcggggggcgctcgtgctgcaccgattcgagctcgctccctgctctgcccgcgcggggtgcgttcctgcggaggtccgcgccgggccggtagctgctgcgtgctgcctggtggctgctgctaggtaggtggttaggcggcggcaggaggatgcgggcggcggccgcgtagcgccagcgcaggcgcagcagccccggcatgggcgacgacgccgagctcgaggagggggaggcctgcgcctgcggggacgacaccgccttcgtcgaccccgatgtcgcgctctcttacattgacgaaaagcttcaagacatacttggccatttccagaaggacttcgaaggaggcgtttctgcagataatctagggtcaaaatttggtgcatatggttcatttttgcctacgtaccagcgctctcctcttcctcaaactagaagtccccctaaggacttgtctcagaaacctccagctgtggcagtttcatctaccccccaaagtaatggtcctgtggtgcctttttctggtgattcaattaaaaaggaaatacgcccatccacaaagtctgaaaggggttccgtctcccatgattcatatgggccatcaaaatgtagtgaccaaaacagacttaaagtccggataaaggttggctctgataatgttttggcaagaaataatgcagctatctacagtggcctgggccttgatatttcttcaccttcatcaaacgaggatagccctgatggccgtgggagcctgtcccctgaagttaacaatgtgccacatgaatctccacaaaccattcttcagatcatgacatgcttttcagttcctggaggcttcctgttatcccctctaccagccaatatcttgcagttgacaaaaaaggtcgtgtcttcatcaaagaagtgggaatcaaatgtggatgtagaaaatgtacaagaatcatatgaaggccatgtggctaaaagggtgaaatctgatggtaacaaaaagaggctgatagatgcaaaaaattcaaagaacaaaaatgatattagtgcagttatgaaaaaggagattgatatggaattagttgctggtcaaaagatagtatctgaagctcttaaaatatcattgctgtctgaccccagagctatggatgcaaaaggtgagaatcgtcttgaagaggagccagcagaaaacaacttggttggaattagagatgctcgattgaaagagcggtgcaccaagactgactccatgacagtcaaagtggaacctgccaaagcagaggtgatggaatgtttagagaacagtagttttggcagttcagaaatggatctttcagcagtgaaagggaaatcaaaacccaagacagaaaagggtgaggcaactttagaagataggaatacaactaatgacaaagacctaatatcagataggaagcaaaaaaagaaaataaaatctgggagtaaatataatgcctctaactttgaaggtagcattagcaatgttataaacgaaggagcttcagctgttttccacatgggaaaaatttctggtctagaagctttgccttatgacacaaatggggaaaataattccaagagtgaggtcaaaaaaatgcagagagaacaaaaggccaatgtttcgacgtcttctgatttcctggaggaggagaaacacattcattcttctgctgcagttaaggagagaagtgacatgcaatcaaaacctatccatactggaaagaaacccaaagcaaaatcacatagagatgttagggacaacaattttcctgaaggatcttatggaagcaaggaacaggattcattggagaataaaagtgcctttggagatccccggccaaaggaaaaaccatggaagtttgacagcgaggactctgatgcacctgggatctcgaggaaggatagttcttatgtaaagcttgacaaacacctggctactgaggagcagaagatgcatatacttccacctgccactgcttcaactgcgaatgcagcttttatacatgcagccccagtcgtaatagaggaacattgggtgtgctgtgacatatgccagaaatggcgtctcctaccttatgaaatgaatccttcagatcttcctaagaagtggaaatgtagcatgctacagtggctacctgggatgaataggtgtgagattagtgaagaggagactacaaatgctctgaatgcactgtatgtccctgcccctgcaaatggtattccttcagttggccttcctcatgttgcttcatcaggactagtaacatccagcactcccaatatgaatggacatattgagcagagtaggaaaagaaagaatgttctaagtgatggaaattttgtggctgagggttctcaccaaacacagggttcaggtcatccaatgagcaaccaacatgctcccaataaaagtaaaactcatactgatggtatccagtatcctattgatagagattctgtaagcaaatcagttgacccaacaattaaaaagcaaaggtccaaaagcaaacatcacagtagctattctgatggagtagatcttgttgaaagacctaagaagcattctaaagtaaaaagcaagagagacttggatcgtgatgaatacaaagcttctaaaaaaatcaggaaagaagagcgccattttgatagagatcggaaccttggatccggtttagctagtcgtgatgttcccgatgaggccaaggcttttcctgtgaagtcagtaacgtcaaagggttcaggtgaaaggagtgatctttcttcatcaaagcaaaaaaatgtctcacatcataaccatttggaaaattccaagaaagcaaggcaagattatgtaggttttcctgaagacgagagcaaggaatattttcaccagtcagatgtgcaaagatcagatttgtctagtaagaagaggatagtgaagaaatgggaggagagtcagtacaatccagtagctcaggtaagcaaaggagctatcaaggaaacctatagggatcagaacttaaaggaagcaaagttgatgtcattgaattctgaagaactgttttctatgacgagctccaaaccaccgaaagctcaacatgctgatcaggttttgttttatgatggggggcgtacgaacagcgagttagttgaggataacacacactttagtggcaaaacaggtctccctgagcaagaaaatagtctttctgataaggctttagacttgggcaaacctgctagtgatgtggcctatattcagacttcagctgtaacttcaagttcttcaaaggcttcagtctcacaaaaaaagaagcagaccactcaagctatgaagacatcgtcaattgagtctctttctttgtcaccacagagaaactctaacattgacaatgtctctgcctctcatagtagagtttcaggtaaggatggatctctgaatgctaactcaagcactgtgccggccatggcaaaacaactaaatactcaagttggtgtagcagtcaatgatcaatggtctagtgaacctattttggttggttcttcccgaagaaaatctgatagagataatggacaggttcagttaactcaaggtcatgcctctgatggtattcatcctgaaaggggtttgaatgaggacctgcagcctgaatctgggagaaaggattccaatataaaaaactcccatattcctaaaagttctaaccatttgcattctggtgaaaaaaataactataatacagatggctctcctatgcaaccaggaaagcatcttgttgatccaaagacaccagtcttggataaaggtgattcaagtatgcatgaaaataagaaaagtgcaaattctcttcaagatagaaatggatcaactcattgcccaccagatggaaatcctctgctcggtttaccatctggaaaagagaaatcatatctcaaaaacaacaggcaagattcacagaagcctaaaccccagatctcacctctgaaagaaagcaaattggattcccattccactccattaaaacctaatgggtcaaaattgactccacaatcaagacaatacaatgctgaaaatggagggcgacatggcactgcaaaacaagcaattcgtagtcctgctgatacttttagtccagctaggaaggacaatacttcaactgcgtatgctctcaaagaagcccgtgatttaaagcataaggctaatcgtttgaaggaagaaggaaaagagcttgaaagtacaagactctactttgactccgccttaaaatttttgcatgttgcatcacttttggaacctcctagctttgatggtttgaaacaaggcgatgcagcccagagcatgtattcagatactgcaaaactttgcaactttgttggtcacgcgtatgaaaaatgcaagaagatggctgctgctgctttagcatacaagtgtgttgaagttgcttatctgaaggctgcatactgcaagcacccaactgcaagcaaggatagacaagtgttacaggcagttgtacagactgctccagacaaatgatgtcaatagtgcctttgaggctactcggaagtctcacatggcaattgcttctgcttctggcaatcacgaaaatggagttgatggtctttcttcagtaaaaacagtgctggattttaacttccgaagtgtgaatgatctactaagcatgaagctgaatataatccaacagtgcaaaagcataggtctttcatttgagcttgctggtcaacttgtacagagagtgatcatatttcttctttttttacgttgattacacccaattagtatatatagttgcatacccacttggatgatttagttagtgaggaacacaagtgaagatgagctttgcactgttcaatgcttctgcttggaagaaggatgctcttgtggccgcagttcgttgttatctggaaagtggcttgctactgagcattctcttactacatgatgtaaattgtgaatctccatcaaggctggcttatggctgaagagtcagtatcatagtttcctttgatgggagaggacagcaaagccagctaatctcgctatccaagaaatcggctagtagttttttcccttttgaaccttgtcacgatgccttgtcttctggataaagttcacgcaggtttcaaataagaaatcacatggactatcagacttgtatggaatatggatgctgtacaaagatttctaatgtacattagtctaactttttttttcgtgatccccgaaatgccgactatcaccagcgcatgtacatgtatatatacatacaataaaggttggggcatttttaccacgtgctggtctctatgtatgacgcctttggttccgtccaacttttagtctttcacatttttgaaattttgtgacattctagttttttgttaggatagcgtctagtactgggaatttgttgcagaatgcaaaataaattccgtgctgtacaacttgtagccgagtttcaggtcgtcgagtgaagtgatggtaactgctcgccgaatttgcactatgcggtctgtggatagctacttgaatgaaaagtttgtttccacatatcaagt

SEQ ID NO: 32886 - DNA, 1290 bp, Zea Mays
tttcgattagcgaatcgctttctccacgaactcacgaatgcgttggccgctgggagaaggagcagttccgctctctcgtttgggtggacgacgaggaagaggaggccaacgcccacagcaacaggcgaccagcccgcgaagacgtggcaccaggataggtgctcctgtcctgagcttcaaatccgcaccccgcggccaagctgttacttgcgctgcggccttagcatgaggtggccgctggcgatctcgactcgccgccgccccctcctccttttcatccttctcgtcgtcctctacacgattcctgtcacactcgatactgttgagatattttctactcatgaatggtttggcaaaccaacagtcgttttcgggtgcaatggagagaataaaacagatttgccagatgtgagggaggtgcacacgctatatacctttaagggtgaagaatcatggcagcccttaacagagcttccagaaaagaaatgcaagcgatgtggtttgtatgaggaggacacaattacacctgatgatgtctttgatgaatgggagatgtgttcgagtgatttcaagggtgggaaatacacccggtttaaggaaggccagttcaatgcaacattcctatgtccaaactgcactgcctcaactggacatggaaaccgtgaacctagtgaagatttggaaactaagaagacatctgttgtggtcatcataatagttagtgttcttgcatcagtccttctcaccattgccttgttcgggggctacaagtactggcagaagaagaagcgggagcaagaccaggcgcgattcctcaaactctttgaagagggagatgaccttgaagatgaactgggccttaccaatgaactctaaaacagtgctacagtcttacttcctatgttttcagatgtagtttccacgtatgatgtataggatgtttggttttcactgattttattgtgtatagcatccagtagtttatagagaaatgattccaacaaaactatgattcggttgaatatctgcacggaccgttcggtcgtgcagggctttgcctacgagacttgtggcaggcttagtgcgattccggactgttcggcgtaaggtgccggacgggccgttggaggacggttcggccgtgtccagagccgatgtaccatacagtgaggatggtgatatcattttccccggatatgagtttatcgacataccataatatggttgggactgagaagtcctatttgttgccgatgtttttaacgcaattattttagtgcccaatttatg

SEQ ID NO: 32887 - DNA, 549 bp, Zea Mays
gcttgacagaaaggtacgaaatcaaatacgacgtgcgagtgaatacaaatccgcgtgaacagtactgtggtactattcatctatttattagcacgggacgcaggcccagacgaaattacttttgtgtccttgataactaatgataaccaaaacacaaattatcatggactaaacgatcttttactctttaagtcggtgctgcccttcgtctcaaggcgtcgtcataccgaagctccctggattgtagctttggcttataccttcgtattgtgtttgctcgcatatcaccctgccgaaggtgtttctgcttggaggatcttcggcgaagaaggcccgcaacaacaacatatataataacagagtgtatagagataaatgtcacaataacatcagagtatttattacatagtagaagtcttattacaaaataaaagataaatataaaacgaactaaggatcatccttggcgcaagtcatctgagaaacgccacctagatccgatcaaactcctcgctttgtggctcctcctaaaccacccgttcttctcct

SEQ ID NO: 32888 - DNA, 1910 bp, Zea Mays
  misc_feature (1910)..(1910): n is a, c, g, or t
gcgatttccagtttcctacacagcagtcccggactcccggttcccccactcgcgcaagtcgcaagctctcctctgcggctctgcctgtctttcgtttgctttgccattgcctgactagtgcttactgcctagccgcctagggacgcgatggtgttcaaggggcgcttcttctcgtcgcgacacaagtcatcggaatcctcgtcaagcccagacggcagcaacagcccgcgcacgcctacctcggcgccggcctcggtatccgcggcgtcgccggcgtcgtcatcgtcttctaaatccgacaagaagaagactaaattggagactcccaaaaagcgcgacaagctctttggttccgcggctaccgcccccaagagcgccgcgtcgtcggccccgtcaagcctggcgggtgacgggaggaaggggcccgtgctgcatcatagggacgcgggcggcggaggcgggggtggcgcatcggcggccgcgctgtcgccgatcctggcgtcctcactggggctcaaccggatcaagacgagatcccggccgctgccgcaggagggccaacgcatggctgccgcgctcgccagcagcaacctctcgcacgggcagggccaagcggaaccgtcggctggctcagccggagacggcgggagaaagggcgtcagctcctcggcggacacgagtagtagcagccgcgggatagtgaaaacgaccgagctggcgatgcgaagtgcacctgggacgaacttcggagcaggagggaagaacgctgtaaaagttaaacctagtgcacagcggaaccattctggagatttgaggacacctactcacataccagaggctgcgtgtgtatatgatccgtgtgagacaccaaaggaatccgagtctccgcgctttaaagcaattatgcaggctactagtgcaccaaggaagagactccctgcagatataaaaagtttttcacatgagctgaactctaaaggggtgtgcccatttcctttttggaaacctcggggcatttacaacttaaaggaggtaataaaagttatccagatgagatttgagaaggcaaaggaagaggtaaattcagatttggcagtttttgcaggagacttggttagcgtaatggaaaagtatgcagactctcatcctgagtggaaagaaaccttggaggacatgctaatacttgcacgtacctgctgtgtgatgacacctggggaattctggcttcagtgtgaagttatagtgcaagatttggatgaccatcgtcaggagctctcaatgggtgttctgaagaaactatatactcggatgctttttatccttacaagatgcacaaggttgcttcagttccacaaagaaagtgggtttgctgaggatgaagttgttatccatcagcgtgataagattatacagtctgcagataggcaggttttaactcaaccaggtgcagatggtacaatatccagagccagtaaaagtgaggcaagaaaatcatacagtcaggagcagcataatttgaaatggaagcgcagccaggagataaagcctgttaagcttcttccaccacttgacacagatgttaagaaagatgctgtttctccaagcaaagaacggatatcttcttggaaaccttttccatcgcctaatacaaaggtcccaaaggaatctattcctactaaatcggaatcacctaataagaaaactgatgcacactctacagttagtagccatgttgaattaagcagtcaagttgaatctttaccacaacaacagcttcctgacaagcatcaacataaaacttcatggggacactggtctgaccagccaaatatttctgaagagggttcaataatgtgccgcatatgtgaagaatatgttccgacacactatgtagaagaccattcaaaggn

SEQ ID NO: 32889 - DNA, 1397 bp, Zea Mays
catatttcgcaatccccttctcgtccccttcgcgaagaagcatcatcctccatacatcccctcgtccgcggtctcacatggcagtggcatgagctgcttctccccgaaaaaaacgtttaaataaaaaacaaaacataattataaaccaacacgcctgccaccgaccgatcagacgaccccttccaagaggaaatccaccaccgcggccggggcctcccaggagatctcgccggaggccgcggcagcggcggcggtggggggcgatggcgctcaacatgaagaccctgacgcaggcgctggcgaaggcgtcggctgtgatagagaagacggtgtccacgacggtgcaagaggtgacgggcccgcgcccgttgcaggactacgagctgctggatcaggccgggtccggcgggccggggctcgcgtggcggatctacacggcgcgaccgcgggatggcgccccctcggcgccctaccccgtcgtctccgtctgggtgctggacaagcgcgccctcgctgaggcgcgggcgcgggcggggatgtcgaaggcggccgaggacgcgttcctcgacctcgtccgcgccgacgcggcgcggctcgtgcgcctgcgccacccgggcgtgctgcacgtcgtgcaggcgctcgacgagaccaaggccgccatggccatggccactgagcccgtcttcgcctccgtagctaacgcgctcgggtgccttgacaatgttggcaaggtgcccaaggaggtcaagggcatggaaatggggctacttgagattaaacatgggctgctacaagttgcagagacgttggattttcttcataacaatgctcatcttgcccatcgagctatatcgcctgagacggtatttataacttctaacgggtcttggaagcttggtgggtttggttttgctctttcggttgatcaagcagcagttggtttgagtttgacttcatcacaactatttcattattcggactatgatgtcgaggatacagctttacctcttcaaccatcgttgaactatactgcaccagaattggtccaaagtagagattctaaagttggctctgcttgtgatatgtttagctttggatgtttggcttacaatctggttgctcgtagaccacttctggactgccataacaatgttaaaatgtacatgaatgccttgacatatttaacaagtgaagccttttctaatattccttctgatttggtattggatttgcaaaggatgctatcgatggatgcactatcacgtcctagtgctatggcctttacaggttcttctttcttccgggatgatacgaggttgcgcgctcttcgtttccttgaccatttgcttgagagagataatatgcagaagacagagtttttgaaggcattatcagat

SEQ ID NO: 32890 - DNA, 971 bp, Zea Mays
tctcacgctctctcctccatcccaacgtctccagtctcgcgctctctccccccaaaaacctcgtcttcctccgctcgtctgcgttctcggccatcggtactctccaccggcgctccagagttcatcggtactctctagcggcgctccagagttccagcatgccatagcgtacgccgagggcgataaataatatggtgcaaaatccagcattaatgtttgggagcccaagattcagcaggctaacaaatttggcttgtcctagctctggatctttgggggttcatttaaggaggatgtcaacagtatagaggctggttgatagaaatagaataatgcgtaccaggccacagggtgctagatgttgtgctctggttttattcagataaacaccaagatggctatcgcgactagcattctcaacatctcaaactacgcaggctcccaatgtgatatcagcatcttgatctagaagggcagcggatttctcgagggactacgacgggatgcctctagatgtacaaccccgactcccacttcttcctcttcctcatgtactggaccgattgcagcctagctggcgcgcttgggctactcaagatcctaatctacaaggtttatgtagatgggagtaccaccgtgacttgggagctaacttggataatgatctcttagttctcaagatcagttccaataacatgtggcactactccagtgatatgaccctccttattataactgccaacatataagttacctttcttacaatatattttagtccgctacagcgcccgatagggtgctattttttctagtttaattaaggctcccttggaacaatggatataaaagtactgtgtccatcctatgatataaggcactgtaaccaatttttagttttgttccatgatataagggcatgtacaagctagatgttataatggtgtttgggatagctccaggttctagctcca

SEQ ID NO: 32891 - DNA, 411 bp, Zea Mays
cctccgacccctgcttgccgcgttcctgcgcgctgtcgccttgctgcgtgcgtcgtggttttcttcctctgcgcgccaggctgttccggagcttcctttgctccattccttggttgcgtgacgagcccctcgcgcaggcgcgagctgtctgttcggcgtagtcgagccgttctcagttgctcgctgtaacaccctgaatctggggtataaaatttctttgctcatattcacaaattcaggtgttacttcccttttctcatcctttctcattcttttctttctcatttctataggagaaaagtgcttattttatttgtaattatagtttaatatggttaaaccctaagggagtatgagttgttgcatcatgttgaaccctagatttcacttttgcttggtgcataattcttg

SEQ ID NO: 32892 - DNA, 570 bp, Zea Mays
gaatcctgcggatagcctgacggctcgtttgaccttcgtctgtcgtctcgtctcgtccacctccccagcggcgcgtgaagcttgaggcaatccccgccctctctagccctgcgcaaccagttcggttccatggccaacagcaatctcccgcgccgaatcatcaaggagacgcagcggcttctcagcgaaccaggtgtctgactagttccgcgcgagctctctcggaattttgccattttgcaccggggattagcgcgtcgccgtcggaggagaatatgcggtacttcaatgtcatgatccttggccccgcgcagtcaccctatgaaggtggagttttcaagcttgaactattcttgcctgaggaatatccaatggctgccccaaaagttagatttctcacaaaaatttaccatcctaatattgacaagcttggtaggatatgcctcgacattcttaaggacaaatggagtccagctcttcagatacgtacagttctactgagtatccagttttcggcttgcatatgtagttctcgagtgtctacctacctctacggttatagcatatcag

SEQ ID NO: 32893 - DNA, 3697 bp, Zea Mays
aaaaaacaaacaacaacgacaccaatatataatctcagacctatcaatcgctctcaggaaccgaaccaagaacaggccgtcctgaagatcagccctagttgtcagcatgaaaccaaggaagaaggaaaggacgctggtgcgagagaagctccaaatttttattctcttgaaagctacagagaagacacaggcacaaaggaaagcctcaagcgaaacatccctttccctattgaatggagacaaaacgccaagattgaaaagaaacggaacggctcagcgctggtagtccgtttcctctacatgcatccttatatggatggaataaatattgcatttaagaagcgtatggaaggtttctcctttttctgcatttatttatattttcctctacgcatttctagtggtttggcttgtggaggagaagaaaaaaaaaagcaaggggatgggaaatgcagcgaccagacatcatgtaaaaggtccccggagcaccaagacgaggtgcactcgagttcgagtggggcaatggggattgcagttgtggccatctctgtccctctccgcccccctgcaatcatcctagattccactgtcttggccccgagggctgaggcccttgaccttggttgctttgccctcactcctatctgaattgctttctgggctgtggttgggactcgcaaggaatgcactcatctagcgccatctgcttgatctttgagggatgtgaaatgatggggtttcttggtggagcggcggtggtggtggtgcccatctcattcccactaaccagtaactgcagccacaggttcacattgtgtacttgggccacaacaacgacctcgatccttctctaactacagattcccacctgcaacttctgtcgacagtctttacagagccgaatgaagcgagagaagctattctgtacagctacagctgtgggttctctggttttgctgccttgctcaattcaacacaagctactaccttgtctggaacagacggggttgtatcagtattcaggagccggatgctggaggtccatacaacaaggagctgggatttcatgggcctccgcctgcacatgcatacggaacaatcatcgcagaggcatttgaaattcggagatgatgtgatcgtcggcgtccttgatactggagtgtggcctgaatccaagagcttcagggacgacccacactacggccccgtcccgtcttcatggaagggcacgtgcgtggtaggcgacgagttcgacccggccgccgcgtgcaaccgcaagctcatcggcgcgcgctactacctggccggcttcgagagcgagctcggcccgctgaacaccagcgacgggtcggagtaccggtcgccgcgcgaccgcgtcgggcacggcacgcacacggcgtccacggccgtggggagcgtggcgcccaacgccagctacttcggcggcctgggcggcggcgccgcccgcgggggcgcgcccagggcgcgcctcgcggtgtacaaggtgtgctggtacagggacctgacgggccggtgcagcgacgccgacatcctggccgcgttcgacgacgcgctgtgcgacggcgtgcacgtggtgtcggcgtccctcgggtcgcccccgccgctcatgccgctgctgtccacgagcaccgagatcggggcgttccacgccatgcagcgcggcgtcgtggcggttttctcggccgggaacgacgggccggacgcttccatggtgcagaacgtctcgccctgggggctcaccgtcgccgccagcagcatcgacaggaggttcccgacggtgatcacgctcgggaacaatgcctccatcgtgggagagagcttccttgtgaaagccatgaagaatggtctggtagatagcagcagcgtcttcaccgatgggacgtgcacattcgagcagctgatcaaccgcacggcggcgtgggggaagatcgtgctgtgcttcgccacgatgggaggggtgtccagcgacggcgcggcgctggcggtgtacgccggcaacggcgccggcgtgatcttcgccgacaccataagccggaaatcgagccaggacagcttctggcccaccgtccacgtggacctgtaccagggcacccagatcctcaactacatccgcgactcgagaaagccgacggtgcgcatatctccgagcaagacggttgtcggcgaaacgccggcgccggccgtggcgtacttctcttccagagggccgagctccgtctctccaaagatcctcaagcccgacgtgaccgcccccggagtgaacatcctggcagcatggccgcccaagtcgtcgccgacggtgatccccttggacaagcgcttgacagagtggaacatggactccggcacgtccatgtcgtgcccgcacgtctccggcatcgccgcggtcatcaagtccgtgcacccgacctggtccccggcggccgtcaagtccgccctcatgaccacagcgtacatgtacgacggcacgtcggacgtgatgcaggccggcgggacggtgaaggcggcggacgcgttcgacgtgggcgcggggcacgtggacccgctgcgcgcgctggacccggggctggtgtacgacgcgggcgcgcgcgaccacgtggtgttcctctgcagcctgggctacacggaggccgcgatccggaacatggtgctcccccagccggcgctggacacgagctgcccccgcggcggcggcggcggcggcggcccggaggcggacctgaactacccggccatcgtgctcccggacctgggcggcacggtgacggtgaagcggacggtgacgaacgtgggcgcgaaccgggacgccgtgtaccgcgccgccgtggccagcccgcagggcgcgcgcgccgaggtgtggccgcgggagctggccttctccgcgcgccccggcggcgagcaggcctcgtactacttgaccgtcacccccgcgaagctgtcccgcggccgcttcgacttcggcgaggtggtctggtcggacggcttccaccgcgtccgcacgccgctcgtcgtcagggtgaccaacctgccggacgacggcgtcaaggtggtccaggccgccaacgccacgggcgacggttcccaggccgccgcgtagcctccctagctgcctccggttctaggcaggcggcgcacggtctgagtgagcctgtcactgtcagaagatttcgcgcgtaggtttgctgtgtcagactacgcttcgtaccgagacttttttgcgtccgtttcttgggattggtattgtgctgtagtactggttggtggttatgtattggtcggtcccaccactagtatttgggagtatttgtgtcttgattgcacaagatggttgtgtcttgatgatacaagatggttgcgtattggtcccaccactagtagcgagggtggcagtgatgaaaacagaaagaagtactagcacggaattccacggcgttgctgtcagtggaccgatacttgtccagcgtgtgattggtagcagcaggaggaggaagggaatttgtacaaggcacgtgccaagccgagcaactggaagagtgcaacttctacagtgtgttttcagcacggaacatgtacacactcctacttgaatactactactagtggtagcagtagtgttaggtaagatcttaaattgactaaaaaatccctgtatttggggggccaattttgagcagcg

SEQ ID NO: 32894 - DNA, 626 bp, Zea Mays
aatccgaacggcctagcccactccaacgcgcactcttctaggcccatctcacggtctcacctcctatgttccttagcgatcgcaacaaaaccgcacgccctctctctagcccgcgcagtcttcagcacgcacaccaatcgcccacaagcgctcgcaggagaggtcgaaaccctagcttttgcggcggcggcgagagaagatgatctacgacgtgaactcccccctcttccgttccttcctcagccagaagggcggcgccgacaagaggaaaatggaggagcataaaccaaaggagcagaggcccaaggctaacgagaacaagcctgtgatgaacgaatgaatatctccagaagctttgttcaatgtgcaaccaagtccgatgtccgtttgctctgctctcctgttacagccgtcgtggttggtacagaattgtgggatgcgtcatgttttcatgcttgcttgcttcacattcttgccctattgtaatgattgagcaagcagtatctactgtaggtcataggacggatcttcggccgttgcatagcatcgaaatccgtagctctgtttgttgcatggagtcatcgtcatggtctaatttgttttggctccccaaatttttgcgctgt

SEQ ID NO: 32895 - DNA, 3086 bp, Zea Mays
ctgtaaggcctcatttgcacaggtcgagccccagatgtggaaccatgccaggtgcatcttcagcaagaagaaccagataaaatccgttgacgatgttgaagggatagatgcacttagatgggatgatcaagagaagatacgaaactacgttgggagtgcctcagctggtacaagttctacagctgctcctcctgagaaatgtacaattgagattgctccatctgcccgtacttcatgtagacgatgcagtgaaaagattacaaaaggatcggtccgtctttcagctaagcttgagagtgaaggtcccaagggtataccatggtatcatgccaactgtttctttgaggtatccccgtctgcaactgttgagaagttctcaggctgggatactttgtccgatgaggataagagaaccatgctcgatcttgttaaaaaagatgttggcaacaatgaacaaaataagggttccaagcgcaagaaaagtgaaaatgatattgatagctacaaatccgccaggttagatgaaagtacatctgaaggtacagtgcgaaacaaagggcaacttgtagacccacgtggttccaatactagttcagctgatatccaactaaagcttaaggagcaaagtgacacactttggaagttaaaggatggacttaagactcatgtatcggctgctgaattaagggatatgcttgaggctaatgggcaggatacatcaggaccagaaaggcacctattggatcgctgtgcggatggaatgctatttggagcgctgggtccttgcccagtctgtgctaatggcatgtactattataatggtcagtaccaatgcagtggtaatgtgtcagagtggtccaagtgtacatactctgccacagaacctgtccgcgttaagaagaagtggcaaattccacatggaacaaagaatgattaccttatgaagtggttcaaatctcaaaaggttaagaaaccagagagggttcttccaccaatgtcacctgagaaatctggaagtaaagcaactcagagaacatcattgctgtcttctaaagggttggataaattaaggttttctgttgtaggacaatcaaaagaagcagcaaatgagtggattgagaagctcaaacttgctggtgccaacttctatgccagggttgtcaaagatattgattgtttaattgcatgtggtgagctcgacaatgaaaatgctgaagtcaggaaagcaaggaggctgaagataccaattgtaagggagggttacattggagaatgtgttaaaaagaacaaaatgctgccatttgatttgtataaactagagaatgccttagagtcctcaaaaggcagtactgtcactgttaaagttaagggccgaagtgctgttcatgagtcctctggtttgcaagatactgctcacattcttgaagatgggaaaagcatatacaatgcaaccttaaacatgtctgacctggcactaggtgtgaacagctactatgtactccagatcattgaacaggatgatgggtctgagtgctacgtatttcgtaagtggggacgggttgggagtgagaaaattggagggcaaaaactggaggagatgtcaaaaactgaggcaatcaaggaattcaaaagattatttcttgagaagactggaaactcatgggaagcttgggaatgtaaaaccaattttcggaagcagcctgggagattttacccacttgatgttgattatggtgttaagaaagcaccaaaacggaaagatatcagtgaaatgaaaagttctcttgctcctcaattgctagaactcatgaagatgcttttcaatgtggagacatatagagctgctatgatggaatttgaaattaatatgtcagaaatgcctcttgggaagctaagcaaggaaaatattgagaaaggatttgaagcattaactgagatacagaatttattgaaggacaccgctgatcaagcactggctgttagagaaagcttaattgttgctgcgagcaatcgctttttcactcttatcccttctattcatcctcatattatacgggatgaggatgatttgatgatcaaagcgaaaatgcttgaagctctgcaggatattgaaattgcttcaaagatagttggcttcgatagcgacagtgatgaatctcttgatgataaatatatgaaacttcactgtgacatcaccccgctggctcacgatagtgaagattacaagttaattgagcagtatctcctcaacacacatgctcctactcacaaggactggtcgctggaactggaggaagttttttcacttgatcgagatggagaacttaataagtactcaagatataaaaataatctgcataacaagatgctattatggcacggttcaaggttgacgaattttgtgggaattcttagtcaagggctaagaattgcacctcctgaggcacctgttactggctatatgttcggcaaaggcctctactttgcagatctagtaagcaagagcgcacaatactgttatgtggataggaataatcctgtaggtttgatgcttctttctgaggttgctttaggagacatgtatgaactaaagaaagccacgtccatggacaaacctccaagagggaagcattcgaccaagggattaggcaaaaccgtgccactggagtcagagtttgtgaagtggagggatgatgtcgtagttccctgcggcaagccggtgccatcatcaattaggagctctgaactcatgtacaatgagtacatcgtctacaacacatcccaggtgaagatgcagttcttgctgaaggtgcgtttccatcacaagaggtagctgggagactaggcaagtagagttggaaggtagagaagcagagttaggcgatgcctcttttggtattattagtaagcctggcatgtatttatgggtgctcgcgcttgatccattttggtaagtgttgcttgggcatcagcgcgaatagcaccaatcacacacttttacctaatgacgttttactgtataaatctaccaggagtgagtaatttatatattagcgggactggacctcttggtcgcgtgctatttt

SEQ ID NO: 32896 - DNA, 3477 bp, Zea Mays
gagagaaacggagcaaagtcgaaaggggaaaaatgagttaaacccaaatcgacaccaaacccactccaggaacacccgcctccgccgccgccgccgccatcgccggcggccactacaagcgcggcgtccggagacagtactgcgctaccaacccctagagcctggattctgatgagccctccatggcctgtcatatctgtcccctcttcaatctccgactcttgctgctgctcggcgcggttctcgggaacggcggcctcggccggggcggcggagcggaggcttcagatcgggcggacccggacccgtactcgatcctgatgtggcacgactactcgccgccgtcgcccccgctcccgcccccggacccgccgtcgccgacggcgacatgtgagggggacctccacgggaagggtgacttccacacgcgctgcgaggtctccgaggaagtggagctggacggcgacgtctacatcacggggaacggcagcctcgtgctcctctctggcgcctccctgacctgcgagaagtacgggtgcgttatatccgccaatttctcaggcgaggtgcgcctcagccgcggcgtccgcgtcacagccggcagggtctcgctggttgccaccaacatcacggtcgccgacacggtcgtcgtgaataccaccgcgctcgctggtgatccgccagaccggaccagtggcgttcccacggggacgcacggcgacggtggcgggcacggtggtcgtggcgccagctgcttcgtcaaggaagggcagacgcaggaggattcatggggcggcgatgcctatgcatggtctgacctcgaacacccctggagctacgggagcaaagggggctcgaccagcgttgagaaggactatggtggtgacggtggtggcatcgtgtggctgtttgctgaggacctggtcatgaatggcacagttctcgccaacggtggggatagcaatgagaagggtggtggtggttctggagggagcatctttataagggctgcatcgatgcatggtggtggcaagatcagtgcctctgggggtgatggtttggctgggggaggtggagggcgagtttctattaacgtttttagtagacatgatgacacccagatttttgttcacgggggaaggagttcaggctgtccagataatgcaggagctgctggaactctttatgaagcagtaccaaaaagtcttattgtcagtaacaacaatctgagtacacaaacagacactcttcttttggagtttccaaatcaaccactgtggacaaatgtttttgtaagaaatcgtgccaaagttgctgtccccttgctctggagtcgcgttcaggtcgaagggcaacttagccttctttctggtgctattctaacttttggtctcactcgttatccatactcggagtttgaactgatggctgaggagcttcttatgagtgactcaacaatcaaggtgttcggtgctttgagaatgtctgtaaagatgctccttatgtggaactccagaatggaaattgatggcggtggagattcgatagttgcaacatctttgttggatgctagcaacctgatagttctgaaggaatcatctgtgatacactctaatgctaatcttggagttcggggccaaggtctcctaaatttgtctggggacggagacacaattgaggcgcaacaccttattctttcgctgttctacagcatacaagttggacctggttctgttttacggggcccacttgtaaacagaagtagcgatgatgtggccccaaagctgaattgtgaagctgatagctgccctgtggaaataattcatccaccagaagattgcaatctaaattcttcattgtcatttacccttcaggtctgtcgtgttgaagatattgatgtctggggtctcgtacaaggaactgtaattcatttcaatagggcaagaagtgtcactgtgcatacatctggaaccatcagcgcatcaggcttgggctgtcgaactggagtagggcaagggaaaatgttaagcagaggtatatgtggtggtggtggacatggtggaaaaggcggggatggtttttataagggaaaccttgctgagggtggagctatctatggcaatgctgatctaccttgtgaacttggcagtggcagtgggaatgactctaccgagttgtccacagctggtgggggtataatagcgatgggctcatgggagtattctttgccaagtcttgccctctatggctcagtagaatcaaatggtggtagctatactaatggctctgttggaggacctggtggtggttctgggggcacaattcttctatttgtgcatactttgtccttagctgaaagctctgtcctctcaagtgttggtggcttcggaaatgctggtagtggtggaggtggagggggaaggattcatttccattggtctaacattcctactggagatgagtatgtgcctgttgcagctgttaagggatcaatacttgcaagtggaggagtcagcaaagggctgggatattctggtggcaatggaacggtcacaggaaaagcttgcccaaagggtctttatggaacattttgcaaggaatgccctttgggaacatacaaaaatgttactggatcttctaaatctttatgctttccatgccctcctggtgaactccctcaccgtgctatatacataaatgtcagagttcttagtggagggtctgttcttttttttggtggtcatgggtgtcatgagctcgcgtccgtgctgggcacgctgagcaacgtggaagggttcgcgttccagcgcgacgtgtcctacacggcgttccttgaccgggtgcacggcgaggaggtggcgctcaacaagctggggctgtggcgggtgccgcacccgtggctcaacatgttcgtgccgcgctcgcgcatcgccgacttcgaccgcggcgtcttcaagggcatcttgcagggcaccgacatcgtcggcccgctcatcgtctaccccctcaacaaatccatgtgggacgacggcatgtcggcggcgacgccgtcggaggacgtgttctacgcggtgtcgctgctcttctcgtcggtggcgcccaacgacctggcgaggctgcaggagcagaacaggaggatcctgcgcttctgcgacctcgccgggatccagtacaagacctacctggcgcggcacacggaccgcagtgactgggtccgccacttcggcgccgccaagtggaatcgcttcgtggagatgaagaacaagtacgaccccaagaggctgctctcccccggccaggacatcttcaactgatgatagcccatgcatgcatgcatgttttagtttcttgggacaataatgtgaataactcccagctagcggctattaattaatctgtatatagattgatcactgcactgattgtatgtcaaggtcattatttacgttatggtaaaaaaaataccctcgtcgtata

SEQ ID NO: 32897 - DNA, 2819 bp, Zea Mays
gcccgtcgcccatcgtcttctccaccgagtcgccaaaagaaaaagggtaaaagcgtgcgtggcggagaggtggaggaggagcagcgaagcaaaagctcaccgagtgaagaagtgttgtccgaaggtgtggataaggccgacgcggttggaggctccggcgtcgcagaaagcgggacgcttgtcgccggcgtagctccaggcggcggaggaggactgctggtggacttgctcggctgcctagggtttcgggctgccagcctgccgtctcggaggccgcaagtgtaatggctactgagagtgctgtcagattaattggtggaacgggagctagggactggagtaagggatttggtgcattcgactcttcagtgggtgccctttcaggggaagacttgggatttgtagataatgatgctggggtttatgggggctggagcaaatctgttccaaatcgcagtggaagcgcgccacctagcatggaaggatctcttgctgctcttggccatctcattggccagcagagtgggagctttgaagctagtttggcaaccttggataacataactgacagttccaagtctgaggagcaagtacttgctgatccagcatattttgagtattatggctccaaggtgaatctgaatccaaggctccctcccccacttatttcaagggagagccgccgattaatgaaccgtgttggcaaggccaaagagtggagggtggtctctcaagataacagcaacaaagactctatatacattcctcgatccacattgtcaactcacaaagaagaacctgaggatgataaatctccaagattggatttaagttcagtggaggatgcccagattatctccagtgcatccaactttcagagccaggattttatgctgtatactggtggaaatcaatacaatacaatgggtccaagatttactgttgtgaatccaactgaaagctttgatccacaaaagatgatacatcaagctgcatatccatctgatcagaggcttccacttccaagaactggctttcctaattctcctacatccagaagaggagggactgttccaaattatcaaggcatatcatcctatgttggagggccgatgacttatcctacaagtccagtgtttcagggacaaaccttgcctggagtattgcctcctgataggagaaatgaccctgttggatttcagtccccctcaagaaacatcaccgatagtcctgggattcaaaggcagcgagacagacagaagtttgatgaatcaaaaacttgctctttcttagaagagttgaagtccaacagagcccgcagggttgaactatctgacatcacaggtcgtataattgaatacagtgctgaccaacatggtagccgattcattcaacagaagttggaaaattgcactgccgaagagaaggcatatgtgtttgcagaggttcttcctcatgcttcatcactaatgactgacgttttcgggaattatgtgatccagaagttttttgaacatggaactcgtgagcaaaggagggatcttgctaccaagctcgttggtcatgttttgcctctgagtcttcagatgtatggctgccgtgtaatccagaaggctcttgaagttatggaacttgaccagaaaatagatctagttcatgagcttgatggacatgttatgagatgtgttcgtgatcaaaatggaaatcacgttatacaaaagtgcattgagtgtgtccctacagaacatattggttttgtagtatctgcttttcagggacaagttgctagcctttcaatgcacccatatggctgccgtgtaattcagagagttttggagcactgcggtggtacctcacaaagccagtgcatagtagatgagatattgcagtcggcgtgcgtccttgcgcaagatcagtatggcaactatgttacacagcatgttctagaaagaggaaatgctcatgagaggagccaaattattattaaattggctgggcaggttgttaccatgagccaaaataaatttgcatcaaatgtgatagagaagtgttttcaacatggtgatatggcggagcgggatctcttgatcaggcagattgtggagcagacagagggcaatgacaatttgctggcaatgatgaaggaccagtatgcgaattacgtggtccagaagatactcgaaacatgcaatgagaaccagcgggaactcctggtcagccgtgtcaagggccacatgcaagcattgaggaagtacacatacggcaagcacattgtaagccgagttgagcagctctgcggcgacggaaccgccgagccggattcttgaaatgaacccgcctaattcttcccaggccaggggtgtgagggtgtcttgttcttttgctcagtccatcagtggagaaagcagaacagatcaagtccacctctggtgcttccaaacagactaacaaaactgtcatcgaagattgtataggtgtgactcgcttcaggatagtcttgaggttctagaacaggaacttagtggtgtgcatcagtgtatctatgttagggtgtgcctatttacagaataacagtggttggctagctgtgtgcagaagggagtttagcgttatggtttgtatgtgatacatattatgcctggtaatgtatttgctttcttgcatcgccagttgtggggtaaatgcaatgttcacgcattgtcctgatatctcgttcagttcaagttgcgttttctacatggcaatggaggccagctgcatcattttttttggtttggtgaaaaaagaaaggttgtaccttcgcaccagttaggcatgac

SEQ ID NO: 32898 - DNA, 2088 bp, Zea Mays
gtggcctcagactgtgaacaacagttcacgctccccgcactccacgctatctgtggcggcaacagtaccccctccaagcgttcaccggtgcacgctccctcctcctcaaccgcgcgtgtagcttctctctcacactacatggagagtgagtgccgggagacgctaccattggcaggcgccgctctccctctctccactcccgcgcgtgaagactccagaggtgccgagttgctcggtgcgactccttcgtcgccgtccacggaagcggaggccggcgaccaacctccccgcgcggcgaagggtacaggcggccggatccgttgggcctcacgcgaggagagccacgcgaacggattcgacgaccgaggagtccggatcgaagctcccactggccgacttcatcgccgccgccgccgttcaaccctgtccgccggcgattcaacgaggctccttccccggctgggtgtccgccgatccagaactcgagctcccgtccatcgatctgcttcttccgatctgcacatctaccgtgtaattccgtatgttcatttgaacgcgtggactactaagcattgagaatggctgagaacaatgataacatgcagtttccccctcatggtcctccacacacatcagctcctcaaggaatgcccccctatgtggaatccacagtactggcagcctaatccctacgactttcctagtggatctaatatccaatttagcagcagccaccttacaattcccagtttatcacaacaacaaaatgaagtaggaggttttgcaaataggggcccatggaatcatttcgttggtatgatgaatcctagttatccttgcccacctcccccgcttgctgctggccaaatgcaaccacctagccattttgtcacactgcctaacaactcttcgaaccctatggacccaatatttttggagtccgaggcagagcacagcgcacaggaggttaacagccccagcaaagaaggtggtacacctggtaaagggaagaaaatgaaagaacaaaactttacgccagaagaggatttgttgctatgcacaacttggctagaaattagttgtgatccagtaattagcactggccagaggaaggaaggactttgggcaagaattgataaacggtataacgaaatgagaggtgagtatcctaagagagttatcagggctttaacaagtcgatgggacaaaattaaggctgattgtgggaagtatgcttcgttgtatgcaagagtcctcagggaaaatcaaagtggtttaactgattatgataagacttcaatggctaccacactgtttacaaccgaaaataagagagggttccccttcatgcattgttggactaaactcaagaacgaacccaaatggcaagctattgttcaaggcacttcactacgaggggcagcagggatgtcaccggttggcagtgccacaccaactgcaagtgtaaacgatttggatagcgattctctaggtttaactgggaaaaggccattaggccgagactccacaaaggcatcaaggaagaaggccatgtccacgtcgtcccagtccatgaagtatttgaccagaattcatgacctgcaaatggcccggttgaaacaaagtgaagacaaagtggagaagaaagaagcacattatgaggttttcaaggatctcgaatataagaagctgcaagttcaacaagaacaaattgaagtggagaaaacaaaactgaagtttcaagaacgcaaagagaagaacgatgagttgaaggaagcaatggctgtggatttggaggacatagccgaagatttgaggcctgctttcatagcaaagaggaaagcacttgtggactggtttgtcaacaatccaaactgagttgttcgtttagtgaaaattgtggaccacggttttcactagttgagtttctgttttagtaatgcgtgctgtaataatcacattttttgaagtgtgactttggactgcgttagtgtcttcatttcagttgaagaactcaagattatgttatgtttgtaaacttattctcgtcacttatggttatgaattgtcagtttgaacttgtccact

SEQ ID NO: 32899 - DNA, 3674 bp, Zea Mays
taataactgtggtctgtggagtaagcaccgcgatacacagtagtcccactcccaccactaccacggcggaatggggttcggctgtccgcagagcagaacagagcgttgaagtgaagaaaaagaggcgcgcagcacagggcgaaaaagagagagacgatgccgtattgacattgcaacaagcaacgagaagggcggctttgtcaggcgcggaggccagagagcagcagacagagagaaagagagagagagagagagagttgggtgcagtgcagcagtgcagagagcagagacggagcggagcgaccgagagagagagagaggggaagtttaataatatatcccatcactcacacgccacggcatcattcgccgcctccttcctcctcccgctcgtcgccgttcctcctccgagcaccagcagcgcgccccctccgctctcccttagctcaccagccgcctcttcgtcggagcagcaacagcagctgtgcatgggagtgggagcacggctctgagaggaaaaagggaagaagaaaggtgaccaaagggaaacaaagggaaccaaaggactaggaggatgaagttcatgaagctgggctccaagcccgacgccttccagtccgacggcgccgacgtccgatatgtggtctctgaccttgcaacagatgttgtggtgcatgttggtgaagtaaaattttacttgcacaagtttcccctcctttccaagagcggcaagcttcaaagattagttctgaaggccgctgaggacgagactgatgaggttcgcatagatgaccttcctgggggagcaaaatcattcgaaatatgtgccaagttctgctatggaatggtggtcaccctcagtccacacaacgttgtagctgcaagatgtgcgtcacagtatcttgaaatgaccgaagatatggaaaaggggaacttgatatttaaaatcgaggtcttcataaattctagcatacttcgtagctggaaggactctatcattgttctccagagcacaaaggctctatcaccatggtctgaagagctgaaggttgtgggtagatgtatcgatgccatcgcttcgaagacgtctgcggatcctgccaatgtaacctggtcatacagtcatagtagcaagaaaggaggagcttgtgctgaaatagtcgagccagcaggaaagccatcaatagctccaaaagattggtgggttgaggacttgtgtgaactggatgttgacctgtacaagagagtcatggttgctatcaaatccaaggggagaatgtcacctgaactgataggagaggcacttaaagcctatgcagttagatggctgccagactcctacgatgcattagttgccgaggattacatgaggaggaatcaatgtctggttgagacaataatatggttgctgccttctgacaagagctcgggatgttcttgcagatttctcctgaaactgttgaaagtggccatactagtcggaggcggggagcacgtgaaggaagagcttatcaggaggatcagcttccagttgcacaaagctactgttaaggatctcttattacctgccacttcgcctaatgatggtacctatgatgttcggctggtgcataatcttgtccagagatttgttgcaagaacagcgctgtctcataatggcggtttcattgagaagtccgacgaaaagatgattgagctcaacttcgagcaagaatccattttgtcggtaggagagcttgttgatggctacctgtctgaagtagcttcggatcaagacctttcgttgtctatgtttgttgaactggcgactgccgtgccagaggtggctaggcctgttcatgacaacctgtactatgcagtcgatgcatatctcaaggaacacccagacataaacaagtccgagaagaagaagatttgcagtctggtggatgtcaagaagctcagcgcagatgcatccgtgcacgccacacaaaacgaccgcctgcctctccggttggtggttcaggtcctcttcttccagcagctgagggccggcccaagcaaagaactcgccctgattgacaatggagaacacgcttgcacacggcctacgcaggatcaatgtgaccgtggtgaaaggcggataccgaagcatccaaactcactgaataagcaggtgacaagcctgagcgcgagagagagccagcagcaccggatcagcgagcacaggggcggcaggaacagctttaaagaccagcttgggggcctcctgctgcagtcgcgatccaggaggatctttgacaagctgtggagcagcaaagggcagggcgagcatggcgggaaaggctcggagacgtctggtagctcgcagagcccaccgttgtcagcaaagcctgcagaagtgaagccctcccctcttccccctcttaggggcaggaggtactctgtttcttagttttttttgggggtgggggctctcctagtttagggctctgggataggttgttgtacagaaggtatcatctgctgccaatccctttttgttttgtacgcagatcaatctgctgttctatgtgatgatccatgccgtagcttttactgtagcgtaatttcaactgggagcaaatatttaccagggcctgagttgttaaaaatgtttcaatggcaaaaggtgaaaagaaaaatcaacaaaaactcgtaccttgaagaacatgaatttcatgcgctacatcacgcaggactgccataaggaaccaatcttacaaaaaaaacgagagtatttcagtgcaaaagcaagtcaatttggaacaatgccgtcaaaaccaaactacagtataaaaaagaagacgcaaccacaccataagtatgaaaactgactaacatagcaaggttcaaatcaaataataataatgggtaaacgccgagacatgataatctggaacaattccatatcagacaataacttggaagacagccccttccactgggcaaaggcgcaaagctgataatttgttactatctccttgcaagttcaacatcaggcctgcacatttcgcagccaacacaacagtttatctgactgctagttcatcaggtttagactagtaaccacccctcagagcaaggacaagatggaggacagatccaccctcgatgttgtagtcctttgcggtcttgtcatcagcaagctgcttaccagcatagatgagcctgcaaaggcgaccaaagtagctttgctgcacgggaggaatgccttctttctcttcaacacgctccttgatcctgtcaatcgagtcagtgggttcaatgtcgatctcgatctctttcccagtgagagttttgaccttgatcatggttccacccctaagcctgaggaccaaatgaagagttgactccttttggatgttgtagtcagccagcgtgcgtccatcctccagctgcttgccagcgaatatcagtcgctgttgatctgggggaatcccttccttgtcctggattttggctttgacgttgtcgacggtgtcgctgctctccacctcgagggtgatggtcttccccgtcagggtcttcacgaagatctgcatcttctcctcgcctcttcctccctcgcacagtcgtactagacggtgacgaactcgaaccttgtgacaacgaagccgaagaacgcccaagaaaatttcctttttctttaattt

SEQ ID NO: 32900 - DNA, 1508 bp, Zea Mays
cgtggacgcgcgcttattttatcatcagtaaagtaagcactggacttgagtcagaaaagccgctcttcttccgttccgcccgcccgcccgcttctctctcccgccccaacccgcgagaccgccggcagctcagggcaggaggaggagcggcttcaattcgtccccgcgccgcgcgctcaggacccgcccccgctgcctctcccgagggttccaggttctcatcaggcagaggcagaggtcaccttctgctgctcaacgcaacactgcacatacatacatacagatgggttccgacttccgaggggccttctcccgtcaccaccaccgtccacgtcactgggttcaagaagttccacggagtcgccgacaaccccaccgagaagatcgtgcgcaacctcgcgtcgttcatggacaccagagggctgcccaagggcctggtgctcgggagctgcaccgtcctcgaggccgccgggcagggcgcgcttggcccactgtaccaactgctggagtccaccgtcgtctccggccggggacgtgggatgccggctcaggagcgagtgattctgctccattttggcgccaacagtggttcacataggtttgcgcttgagaatcgagctgtcaatgaagctactttccgttgccctgatgagctaggatggaaaccacagaggacgcctatcatatcatccgatggaaacatcttacacgcaagacaggtacattttaacaattgtttccaaaaaataattatgagcatttcatttggaaaactagcgtttcacattatgctgtttacttggtgtcctacatagtctctgttttaataaatctactgtccgtcgattgcattcttttcatttccaagagtgcaagcaaagtattgatttccctttgttaaacctagagctatcacttcaatgcaccactctcgttatccactaccacactgccactgaaggaaataagcaagtctctccagcaaatgggatatgatgtgatgccttcagatgacgctggtcgatttgtgtgcaactatgtctattaccactcgcttaagtttgcagagaagcatggcatcacgtctctcttcgttcatttccccctcttcctggcaattgatgaggaagttcagatgcaatttgttgcctcccttcttgaagtcctcgcttccttgaacttctagtagtaacctgatggtagatctatctcttccagcggtgtattgttcccaatttatttggaagggttcccaatttacatgtggagtgaataagaatgaggaatcattcatggagttatgtgtgcttcaaaatgtgtaaaaaaacagctcttctcaaagaacatgtccaggcagtacagatgtacaaatatccaaagtggtttatatgacaggtgctattgttctcagagatgtgtttcactctgttctttgacatttacagaaacatttttctgatcatcagatcatatgtaataaagtaacttacaaacatggtgcaacgatc

SEQ ID NO: 32901 - DNA, 279 bp, Zea Mays
cacatatatagcatccattcgtttcttcatcttcttgctagcctttaatttccttttaaaagaaacactagcaaagactataacatgtgctcgtctattttcaaaatgcatctggggatacgactacgacctcgagccataagaggtcgacaacaaaagagggtttttccatatatcaatcttcttgttgtgtttccatacatcaacctagcttcttgcgttttttctttcttctcaagaatatcgcaacaatacaaggggttcctgaatagtaaaaag

SEQ ID NO: 32902 - DNA, 4050 bp, Zea Mays
cactttgtagaaattcgctcaatagcccggctgacgtcactaattcaccctctctttccggccgccgccacgggctctccatggaacggctcaaatcggcggtgccgcccgacctccggcgggccgtcggcgagggcacggccgccgatctagctaacaccacctctcgcctgttcgccttcttcgacagccttcctctcttccaccaggttatgcaagaactgaccgaccccgagcttgcgttgtgtcgcaaagacaaggtgaaggctgtagagttgaagggccacggcaacgcgtgcttctctaggagggagttcgggaaagctctcaggttctattcgcaggcattgcgccatgtcccaattaattcgggtggcatggatgtgaacttggtatcttcattatatgtcaatcgagcctccaccatgcataaattaggtctgttcgaagaatctctaagggactgtgacagggccataaccatttctcctaattattctaaggcttggtacaggaagggaatggtaaaaacagcgctcaagaattattcatctgcaatacatgatttagaggtggcattgagccaggaagtgacttcttcggggaagagtaacatagaacaagagctgaagttgattttagagaagcatgaaagtgtcaatgaagctgggacatcaaactgtgatagcaaggatagagatttgcctcttgcaggacaacctcataaaattgttatagagagtatttcaacaccaaacaaaggtagaggaatgatttctacagatgatatccccccagcttcgttgattcatgttgaggaccctcttgctgcgttgaatgcagattatcatgaaatcttcccgtgaaacacactgccacttttgcttcagtgaaactccagccgatgttgtattctgtccttcatgtacaataccaatttattgttcaaaaaggtgccaggagcaatcagcaggtcatatttctcgtgatgaagatactaatcttggatattcaacgaatgttgcaaacctgagtataacttcgagttgcaagtctccaagatctaagctatttgctgaacataggcatgaatgtggaggtgcccactgggcagctgttttaccagctgatgtagttttagctggacgaataatagcacacagcatagtaaaaaggatgccgtctgggaagagctttgctttctctggcccaaatttggatctagttcaccattatgatcaacattctcctgccaacaagttggaatcacatatatatgcaattgtcctattgttatgcctccaaaatcattatagatcagaccttttgtggacagaagattctttatcacaggtatatatggcgtttatcttcagacattattgttctgatatacctggttaatgagtatgatctgaaattgatggcgatttcagctcaagattttttataaattttcacaatgctaattgttatcaaatgtcttggtccatactgttttggtggagataaccagtctccttggggattgccagtttcatgttccttagtaatcttaatctcatctctacaataccagtgtttgtcgaacttccttctgtatagtccctttgaacttccttctgtatagtcctctttacacacttttacttgttctgatacttagaaagccattttttaacatgcaagaatttgtatcattacatttaaaaaaggacacaataaaagctctttcacttgtaaattaggtgaacacatcaaaccaaacaaaataggcagaaaagcagaaccaacgaggattattgttatataatcaaatcttaaatgactaaatagcctctagatcaatagccatcctgcaatgcaagtctgcaactgtgtctaacatgttacctaaagcccactggttacactcatggtggtcagacaagaaatcagacaagcttggaactcaagcttcagtcagatatgcctaaggtacctgggttcaacgatgttcttatctataccatggttttgtttctcattactaagctttcctatatactgcaattcccccaaaacttttttctctgggggtatagagaaactatggggtatcacattcacattttgtttttgggaaagaagaaactcatgtgttgattatcctctacagctggttcttttgatatttcaaatcaaagtcaattcaattgctattgtctgtatgaggtcgatggacagaggcccagagcacacaataaatagaggtttttatgtagctgaaggtgcaaaaatgtgtagtgtggagcaggtctgtctttttatactttctgtatttttttctgggactgggagcaatatatcatccaactattaaagttgcaaaaggtcgattggttgttgtcaatcattgggctttatctcatgctgataaaacacaatttcaacccagaaggtcaaaactagattagattaaaaaataaaacggagaaagtattatttgaaaagttattggatcgattatcaagtaacaataatcacagtatatgaggcctttttattaaaaaggcatctcactctaaattgtggtattgtgtctgtaacctttgtcttatgttatgtttgctcactgttaggtcagggttgcacaagctctttatgtatctggtagcctgttcaatcactcatgtcagcccaatgtgcacgcatattttctttcacgtgcgttcgtgctgagaactactgaatttataaagtccgggagcccagttgaactgtcatatggtccacaggtttcactgaaccccagctccctccaggcctccatttctctctgaatcagatatgaatgtcttctgctttgaacttttcatgcttctgatttctaggttggcgagatgcatatttcagagagacagaagtcacttcaagagaattactacttcagttgtcaatgttcaagttgttcagagctaaacctatcagaccttgttatgaattcattctgttgtccacaaagcaactgccttggtgccatatcggaatcaacttactacaggtccaaagagaatttcgtgaatgtttcccttggaggatcttatgtctgcaaactatcattgcccgatgtatcgaaggttgatatggatatggagaatgtcgccaaatctctcttgcaaaatagtggtgtcagtctgaacatagatcatggatgttgcatgagttgtagatcctgtattgatctgtcgtctgctctggctacatcacacagggaagaatctaccatcgataggttgaagaaacatacattcctagacaagactctcatcacagaggcattacaatctctaaaacaactcaagaagttgaggcacccatatagcaaggctctcgcgcaggccgaagacacaatcgcagaggcctttgcgaaggtcggagaccaagaactagcacgaaagcactgtgaagcatcaattcagatcctcgagaagctgtaccacccaaaacacatcatcattgctcacgagcttattaagcttgtttcgattctgctgtccctgggagatggggcaagcgccgcagccacattcgctcaagcagaggcaatattctctctttactacggatctcatgtggagaaggttttgacatacatgggtgccctgaagaaagctgtcattgacgtgtagcgtgctgacaatcctcacgcgggaatggccaacacggttctgcagaatcatctcaccttttgcgcttcttcgaggagttaatgtaggggaaaacccaaaaaatatttacaaagcagtgtggtattgcttgtagtttagtttgttctagaaaacacaaactagctcaaccaaacttcctggctaatgagtttggtggatgttctgagtgcctatgttaatgacttgtttcataaatttttttcgtatatactcgttgccttacaaactcggtcggtagaggaaagatcgctcccacggtattatattaagaagaagctcaattgaagcctcaaccaagaaaggtcatgaaagctgtcttcctgcaacatgagggtccgtc

SEQ ID NO: 32903 - DNA, 9047 bp, Zea Mays
gtatcgggtcgtggatacccgttggcatctctatccagaagagacccaattgcccagggccgccgccgcgccgacctcgccgtcgcgcgctttgcttctcttgcccccctgcccgtggcctccgccccaattccagcgggacagcctcgatgagccgccaggatcgtcaccagtggcctcgccctaaccacggatacgaccctcgcgccgccgccgccgccgcgcaatggtatggcgccgcttcgatgctgtttcccgaccccggcgcggcggcgctgcacgggataaacccctacggcttcgcccctaaccctttcttcaataacttcctcccccagaactccgctgccctagctgcctaccaactgcagcagcagcaggctcatcacttcgcctcccatgcctaccaccaagcccctaccggtaacaccatgcaccgctctaccaaacccgccgccgctgccaaacctgcgccgccaccgggcaaccagcaggccgtgctggaccgggctcaagaggcggcgaggaaggctcgggaggagctcgtgaagggtggggacggcgtcacggcgtggaaggtggcgcaggcggtgctggtggcgctcaaggctgattcgtgggactccctcggcgtccagccccaggatgtgcctctcctgcgggatctcttcctaatcgagggcaaggtgaacgcattcatccattgctatgttgcagcaagaaaaattgtaacggtttatgatctggaggttgagatatgcaagaatgagggggttgtgcaatttgaagagctgggattgggacctttccttcagcacccgcttgttgcacattattttttagtgccagctgatttgtctgtggtgcctaagctttgtagcgaggaaattatcaataccctgctgaaatttgtggacaaatctaagaaaaaaatcacaattgaagattttttgaaccatcttgcagagaaaaaatcagtctctgggaaggaaaaacttggtgtgcgggtacaaagcttggggttgcatatttccttactacgacaggccaagcaaacagaagtgtctgctgcgaagcttcgagcaaatatgagtggatctggtaatagtagtcaggagaaggatttgttgaaaaatgcaagtttccatactcacaagaaggctttggacaagaggttcatttctttaactaatcgtataaaagagttaccaggcatcaataagcatatccattttgattcgaccgatgatgaaactaatagttgtactggttctgaggatggtaaatctgatggcaatgagaatgagaatgaatgttctattcttgacaaaaaggatggtgataagcgtgtgaatagctgcccatatccgtcaaaaactgaagaactggaaaggcttggtttgaaatctgaaattaataaaaggcaatctttagagaatagcaagccaagagacagtgggaaaaaggggaaagtaagtgaaaaaagaaaatatgaagaaatcgggagtcctagctgttcgttcaagcagcctaagaagcagcaaaagttgcaaaaacatgaagcatcaccgaaatgtttcctaagtataggtaagctggaaaattttgtaacaacatggaaggaaacatgtcgtgaacatccagttcaacaggttttggaaatgttagcaaattactatgggagaacgatatcagggaagaggagaattagaaatttcttctcacagtacccaggcattggccttctcaatgttgctgttaaatcaatgggatgtggtctgctggatagcatttacgatgtgatacagcttgctgatgagaatgatgtagcttcaagccctcctcctaacaccaccactgaagttatggaaattgagcctccaagtaaagaaaatacaggtagcactaatggagcccatgagaagagtgaagacaacatgactgcacatggtgttgctattgatgatgtcatcaggaggatttcagaatatattgaatccaacagtaaaatctctggtgatgtggctttgcaagtgagggcacttaatgattgtgaaacatgggtaactactcaattttcagcaaatcaattcagtgctcttggccatgggacattccttgagtttttggacaaacattgtcaccagttccgaactgctttgagtagtttctttaaggagggtccttctaattcttcatctctggaagtttctgtactgcagcagcaaattgaatttttactctgtcaagctgagagtaattggctggaagatagtgacttttcagaggatagttttgttatgcttcttaaaaagcaatttccaacaataagctttaatattgtgcaagacaaatctgatggtggagtttctggctttattgaggggcagaagaaagacatacggacatatagtttaaaattttccatctctttgttggagaaacgatggtctggaactttgccaagtagacatgggaatgttgatgaactggggaacattgtcgctgaacaatcttgttaccataccacagtttgctcacgagaggcaattaattgtttactgagggctcctatgctgtctgatctgcatctttggtcccattgggattcgctatttgctcctacactgggctcctttgtacattggttgctgaatactggtccaattcaagagctcgcatgcattgcgaccacagatggtaggtttattagagtagattcatcagccacagttgaccagtttctggaagctattatccatcgatcaccacttcaagtggcagtgaaactgctttcacttctatacatttacaatggttctatgaacaccccaatgtcattgctaaaatgttatgcacagcgagcaataaagctcatagtagataacaacaatgatttgatgaatgctaaatctgaaaacaaaatatttatgcctgatgagccccaaaacctaagtagtgaaagctctacttgttttgctgatcagtgtcaagaaagctctcaggcgtctcctggaaggttgatcaggtctgatagcttgccaaacattaataacactgttcatttgatcacaaaatttgtacttgattgtcttgatcatctaccttcagaattccgtagtcttgcagcagacatactattggcaggatttcgggttgttactaagaactggcatgcagttatgttgcatgaagccactgaaaacgggcagctttgcatgcttcatgatattggtttgtcacttggagttgtagaatgggttgaagattgccataggttgtgtttaactgatgaagttcatgtgcagacagaaatgcattcttctgccaagcttgcaacacctgcctctgtgggagccacccatgaagattctaacatgcatatttctagtgatgttaatatgatggataagagaaaacaattgtttcctgtcataaatgatcgggctggtatagataaggaagacaataagatgttaaatcctgctggaactgaggcagatgttgcagaactacatactaccagcagatcttctatgatggaagaaacaagtcttgaggaagcatctcttgttattgagactatacgccgtgaagagtttggtctggatcaggcactaagtgacactgagaatagcttgttaaagaagcagcatgctcgacttggcagagcattgcattgcctttcacaagaattatattcccaggattctcatctacttcttgagctggtacagaatgctgacgacaatacatatcctgaggatgttgaagcaacattagcattcattctccaagaggatggtattgctgttctaaacaatgagaggggcttctctgctgagaacattagagcactctgtgatattggtaactcgacaaagaaaggatcaaaccagggttatattggaaataaaggcattggatttaaatcagttttccgggtaactgatgctccggagatccattcaaatggtttccatgtgaaatttgatatcacagatggccagattggttttgtgttgccaactgcagttccaccttacagtaccacttcttttagtagaatgttatccgttgaagatgacaaggatgcccattcattgtggaacacttgcattttacttcccttcagatcaaaatttagggagtgcactgggagattcttggtgatggtattgtgagaatctcgcatgggattgagacaatgagttggttggtggtcagtaagaggctacaaggtaccattgtgcggcatgatgtgtgcaccacagagatagctgtggcgtttactttgcagcagactgaggaaggagattatgaaccttatttgaagcagcaacctgtgtttgcttttcttcctctaaggaattacggtcttaaattcattcttcaaggagattttgttttaccatcttccagagaggaagtggatgcggatagtgcatggaatcagtggttgttgtctgaattcccttctttgtttgtaagtgcccaagaatctttttgtgctcttccctgttttcagaggtgccctggaaaagctgtcacagccttcttgagttttattcctctagcaggagaggttcatggattcttcagccagcttccacacttgatcctttccaagttgcgtctgacccgctgcatgtttttggatggctctactgtgcaatgggtctatccatgcaacacacttaggggttgggatgaacaaactaaaatgttattttcagaaggcttacttcatgaacatcttggtcttggttacctctcaaaaaatattgttatatctgataagttatcaagagccctaggtattcatgactatggaccaaacattttgctagatgccatctcatctatttgccgaattgatggttgtattgagtcattgggcctggaatggctttgtgcttggtttgttaacctttatctgacattgctgtctcattcttctcaaaatgtttcctcagcaagaaacctcgaagacattcttttggataaagttaggaaaataccatgcatcccactttcagatggttcatttacctctatttcagatggtcgtatatggttgccatatgatgttgccagttccattcctgaatgcagtagcattccgaattttccagctctatatggtaatcttcgaactgtaagtccaaaccttctctctgcatgctgcaaaaataaatacctcatggaggaagtcagaataaatgatctggcagacatgctccaaaggatcggggtgcggaagttgtctgggcatgacattgttaaaaatcacatcatggtgtccttgcgtaacggtttagatgctaatgtggctgatatagtgattagagagtatgtgagctttattatggttcatcttcagtcttcttgcaccagctgtaactttgaaagaggagagatagtgtcagaactacggaagagtcctatcttccttacaaaccatggatacaagagcccagctgatgaaccaattcacttcagtaaagattatggaaattccgtggatgttactagactgcttcagaatgtagaaataagttggattgaacttgatagtagctatttgcagcatcatggttcacagtcgtcatcatttgcacgggaaaaatggaggcaattttttgaagaaatgggtgtgactgattttgtgcaggtagtgaaagttgaaaaaactttatcccaagttgattctattctagcaggaggactttctctagctgatgtatctacaaaacaatgtacagtgtatgactgggagtcaccagaattatctagaattttatcaatattttcttcaaaaagatgcaaggaaaattgtgtatatcttctggaagttcttgatagattctgggatgatcattatagtgcaaaatctaggatcttcacagatgctacacattgtggtgaaaacagagcagttgaatcatcatttatgaagtgcattcaaagcttcaaatggatagcatcaagaatggatgaggatcttcattatgcaacagatttattctatgattgtgaaaatgtccgctctctttttggtagtgtggctccatatgctgtaccgcaggtatctagcagttcacttaagaaggccattggattcaaaacagaggtatcttactgtgatgcattgatggtcctgaagtcttggataacgtcaaaggttccctttagagcaagtatgagccagatgtgcaaattctataccttcttgtctgaaggcgtggcagacgcaaagattgacattaaacgggagttcatgtcgtctccttctatatttacaccactacagcgtcctcgggcaagtgaggttattcctggaaggtttttggcgccagaagacctctattggcatgacccaacaggatgttctgaaataacagaggatttcgttgcaacgaaaaacagaagtatgttcccaagaaaaatgctgtctgcagcctatccaaacctttatgaattatttactctgacatgcggtgtaccaaaggccccaacaacatcaaattatgttgagatgctgctacggttgtcaaccattgcattgccttcacaggcaggaaaccatgtcttttgtgtatttgtgagatgggccaagtgtatgcattctgaaagtgacaagatgaatgatatattgtacttgaaagaatcccttcagaaattagaaacaacaatattgcccacctcagccgataaatgggtctctctacatccttcttttggccttgtttgctgggtagatgatgatgagctaaagcaacagtttgttaactctaatgatgtttacttcatacaatttggcgacctttcttctgaggataagcaaatgttgtatggaagagttgctgctttaatgaaaagcttaggcatccaagcactttcaaaggttgtgtatcgtgaagcaatattttatggtacatcagagaacagagaaaaggtttccttgatttgttggctgttgccatacatgcaacgttacatctataagatgcatagagatacttatatcaacttccagaaaaacgacatcatgaagattagcaacctgcaagtagtagttgttgacaagttattccacaagtatgtactgaggggactcgagagttcttctaagaaaagattccaatgtcattgtcttttgcagggagatactctatatgcaacacaagaggctgactcacattcagtatttttggagctttctagaattttctttgatggatcccatgatcttcattttgcaaattttctacacatgatcaaaaccatggccgaatctggcactcatgctgagcaaatagagacttttatcgttaataatcagaatgtgcctgagttacctgagcatgaagctatctggtccttctcttccttgtctgcagccaaacatggttcagcgaaccaaggtggtgctgatacccagggggttgatttccaacctgtccatgaatttagtattcccaatcatcagaaggcacaggtgatggtttctagttggcctctaaactattggagaacagcacccgtcttcagaacacctctcataaaccagcatgcaagcatgcaagaggcaaaggtgaatgatgctggaccttcatcaaacttaaacatgcctgctatgtatggacacaccgaagatagtttgctttctgctgatcttgaaagggattggattatagaagagaatccaagaactgaaactacattgtttggagatagttcatcggaaatccttgatgagcctcagatggtgatgtctgctgaacctttccatgcacctgcttatttgaacttggaggctggaaattcaagcccaacggttcatgtcgagctaacaaattccgatgagaaactggccaatcttgcagaagacaagaatcagcgactttcagatgcaaaccagttaagaacagggaggcttggtgaagaactggtcgagaaatatttggccaaacagctaggttccaacaatgttaggtgggtgaacaacagaattgaaaccggactgccttatgatattgttataacacacccagagggtttcacagagtatgtggaggttaaaacaactgtatcttcaagaaaagattggtttgacgtctcagcaagggaatggcagtttgccttggagaaaggggattcatttagcattgctcgtgtcatcttaggtacaaagaaagcaagtatagaaatgttgaaaaacccacacaagctttgtaagcagaaagcattgcggcttgctctcctgatatccagatcggcagcaacctagactaaaatgtcggttttgttgaggctagcaccgatcatccttctgcagattgttatgattactctgactaataatcaacatgaactggagtgagcatctgcatcttgataggtatttgctgatccaagttagcagattcttctttttggagagagatggggtaccgggtacggcatgagtgcaagacaacatacagttgagccgctctatagtaggctcctctttctattattctaactcgggtaatcttctccaatggcggctctctaccatgtctcttgttacatacaacttacgctctgcctttgtaacccattctggtattttgttgcataatgtatgtgattttgtcattagatttgtttttcaatttctgccctagacatcgtcccataggttgattgtgtaactaaacatgaaactgtacataaatggatggaatttgattttaccatgtacatgaaatttgattttgcgtgcggcggctgcctggtctgtgcgttctggtctctgtgcgcagggcgcggcatctgcccggcagcctgctcgccggctgctcggtgagaaaattggctagttgggtactggttttttttttcaattgataaaaaaacaggatctgatggagccttttcatttttgttttactttccgtctcttttatcagcagttgaaaggcgatcacttattctcaatttggtggaatctcctttatcagtaattgatagttgaaaggtggtgacttgttttcaat

SEQ ID NO: 32904 - DNA, 3059 bp, Zea Mays
atgtgggctcgggacatgcggggtctacgtgtcagcgtcccggtcacagaatcacatcttcctggccgccatccgccggacggagcaccggacccgccgtacgcctccgtgctctcgctcgccgaggcctctccgcgggccgcagcgcggttccgcctcggtggccgccggagctgctgcctggccacaagaagccgtcgctctcccagctttgaaccggttccgatccgcaccacggagaagcccccgcctcgggagtctcgcgtcgccccgatgaaggtggagctcgccgcgcagacctcccagacgagcacgcccctgccgccgtcccctgaagccgcttctgcgtcgcccccggcggaggatgcgccgctcctccccgacgcgggcgtgcggcgccgggcggcgtgcgggcggttcgcgcagcgcagcggctccttccgccgcgaagtcggccgggccgccgccgagaccttcctcctcacgaggctcaccctgatcctcctccgctacctcgggctacagatggattcggcagttcctagccctctgctgttataccctcttgctgatgccaggttttattcaagttgtatattattatttcttctctagccaagttcatagaagtgttgtatatggagatcagccaagaaacagattggacctgtatatgcccactagtacaacagggttaaagccggtcgttgcgtttgtgactggtggagcgtggatcataggttacaaagggtggggagcccttttaggcagacgcttagcagaaaggggcatcatagttgcatgcattgattacagaaactttcctcaagggactattggtgacatggtagaagatgcttctcaaggaatagcttttgtctgcaagaatataacaagttatggaggtgatcctagcaggatatatcttgttggacaatcagctggtgcacatattgctgcttgtgctctcttaaatcaggccattagagaatccggtgaaggagatacttcctcttggagtgtatcacagctaaaagcttactttggtatttctggcgggtacaacctccttaacttggttgatcattttcatagacgtggcctttaccggtctatctttctcagtatcatggaaggtgaagtatcactccagaaattctctccacaaatgatgattatggagtcatctgctaggtctgcagtttctttattgcctcgcatcatccttttccacggaacaagtgattattcaatacctccagctgaaagccaagcatttgctgatgctttacaacagcaaggcgcaagggcagatctatttctgtacgaagggaagacgcatactgatttgttccttcaggatcctcttcggggcggcagagataaaatgctggaagagatcgcccgtgtgatacacagtgaggatccagacgctgctgcccagcacctcgtcgttgtgcctgttgcaaggcgccttgtacccgagttcatgctgaagcttgctgggagagtaagccctttctgaaggtgcttctaagtttgattgcgaccacgactgactagtatttgtgaattttctttttttatcttaagacaaacatggatgtacatgtacttgtgatcggagaaagtactcataattttctagacaggcaaaatgtgtactgacaacgatatcctcctcctcgtacactgctgacacttcgtacggcacaagccgttgtagaactcaaacataccctagactccattggaagaaaacacctcatggtcgacaggctgaccacacttcatcgtccattctgcttcctccatggacgaactagtgctacatcttagttgaactagctgtgggtgtacacaagatccaaacagtgtgtcgtcggcattacagtgcaccagacagaaatcttgtgtcgagattgctgtcgccatggacagtcctgccttaggagtgcatcctggagaccttttcagacaatccatcgacggtgccttccatctcctcaggtattccatcatcctagcagagaaaccaaacatgagtgacagatgcactacctaatctctaaataaggtgaacaaaggaaaaggtacaacttgcatgcaacagatcaatcttagatgtcctttggcacatcctttttcttgatgttgacagtgtgcatgccatcaaaaaaaaacaagaagacaacgacgacgacattggtagtgcacaagttgtgccaccctgcctacttgccacgagttgaattcaggcagttcagcattacctctggctctgggtgtttatttctgacaacgacgcacttggaagcgcttatgcttgcactcttcaggtagctccgagagcttaagcttgtgggtttcacatcatccatgtcagcatcctctgaccttggagggctcacggtagtgcgggcaacagaatctgcgcttctctcctggtcattaatttgttgttcagtattgccatccttggatacaaccactctttcccttggtaaggaagcatgctttctttgcagtggggaacctctttctcctttgctgtaatgctcctcaagatgagcgaactgcagtttgaagcggtcgactccgcttggatagaggaagctaatctgttctccgcctttcatgtactcctccagcatctgtggatgatactccaaaatctgctcgcgtattatagacaaataataataattctcaagcacggtgactacacttgtttacacaaacaggaaaatagattagaagctattgctcattacctctcgatagatcagttctctaacatcatctttggccagcttctttctttcaaattcaaactcaagtttagaaatcgggtgtcttgatggctcacgttccacattagcaagggatgcaaagtatggatcagctagagcctgaagccggtctttaggatcaaatgcaagcaaacgctctagaagacgaagagccaaaggatcagcatgtcgaaatttatgagtaaagggcacgggatattttttccgcatgcagctcaaatatctcctggccttctcatttcgaat

SEQ ID NO: 32905 - DNA, 4346 bp, Zea Mays
ccacgagaaaccaaaggaaaagaaaagaaactgtctggtgggaactgaaggacggcataatttctttacccaatcgcaatcggcccaccgagcatgagggggggcgacttcctcgaattttccttctcttctctgaccgactgatcttagcgatcttctccctcgaatcttagcgtagcggtagcgccgatcctgttcctgtgccgtgccggcttggattggaaaataggagggagaagatcaacgccgccgcggtgcggcctgtggagtattaaacaaagatgcgcagagcccggctgcgccggcagctagcagccaacgcgaaacttcagcttccgctccgccgtccccctcccggacccaaacaaacaaaccatcgtcacccaatagccaccggccaactgtcaagcactccttcggtgcttccccatctgcgccccccgatccctccggacccgcgagcgaggccgtcgccggcgcgcgcgagatttgagctgaggccatggagtcaccgttccgggccgacgtggtcaaggacaaggcggcgctggtcaccggcgggggatccggcatctgctttgagatcgccgcccagctcgcgcgccacggcgcgcaggtcgccatcatgggccgccgccgggaggtcctcgacaaggccgtcgccgcgctccggtcccagggcctccgggctgttggtttcgatggagatgtccgcaaccaggaggacgcggccagagtgcttgctgcaacagttgcacattttggcaagctcgacattcttgtgaacggtgcagctggcaacttccttgcttccccggaggatttgacgcccaagggattcagaactgttcttgagatcgacactttgggtacatacacaatgtgctatgaagccctcaagtatctgaaaaagggtgggccaggaaaaggcccgtccactggtggactaatcattaacataagtgcaacactgcattacagtgcttcttggtaccaaatccatgtctctgctgctaaggctggggttgatagcatcacaagatcactggctctggagtggggaacagattatgacattagagtcaacgggattgcacctggaccaattcaagacaccccggggctgaggaagcttgcacctgaagaaatgagcaaggggcttcgagaaatgatgccattgttcaaatttggggagaagcgggacatagcaatggctgcgctctaccttgcttctgatgcaggcaaatatgtaaatgggacaacactggtggtcgatggaggtctttggttaagtcaccctcgccatattcccaaggaggaagttagggagctgtcgaaggtggttgagaagaaggtgtgaacacaatggagatggagatcttcaagagaaagaaaacaagacgctgacaggcaagcaaagctgtgcgattctcctcctgtgtctcaactgccgcgtgagaaggagagaatcatttctttgccttataagtcactatgacggtgccgtgaactctttcggaggtatccagtttaagaaaaagctcttgtaccatctcgttctgctggtctttgatcatgactcgtggatgacgatctgaactctgacggtaccagttcacaagtttctttctgaaaaaaaaaattctcccattcgaactgtcttgtaaggctgagcaaaccatagtttctggactaactatgattgttacatgaattttattgccttcatgttagaacttagaatgcagcgtctatgaaacgactggtaatatgtggcctatcccatttcagaaacatttatgtaagttagtatgtgtcactttgaattaggagggtgaaatctgccatgataaccgaaaactgtaacccaagacaagagctttagtttgaagccagcaacaaaatcatagtaggatatgtgagatgtcatgcatttgactatgcctgacatctagctgctagtaggtgtgtagtgtggacccgaagcctgtctacctatggaaactggaaagcattattgggcctacttatcccatgtcttggtcaattcaagacttgccatcttgtagatggagcctagatgcaatgcaaagctcatcaggtcagttaccagtccacagcatggttctttgtgcctctttccagcattgccgttttcagtcatccggttgctggtgccatcttctgatacacacacacacacacacatgctgcgcaacatgacatgcgttgcttgcaagtagttgagccacaagcacatactgttgttggatgtgatagtttgcctgatagagatctgtagcgtacatgctaggccaagagcctgctccgtacgtactaatcgataaatgaacagacagtagaaagttaagtgctataaacttctccatttacttaatttcttaatttgcagtttgatattttccttgtatgtggtatctagtgggacagcaggataggtgatgatgtgaataatgactttctgaaataaaaaataaataaataaactctgagtctgagctgaggaactctgtcgaccatgtataaaggtgagcaaaccccattggcttccctctacctcagaagaagcagatacaggtgataccactcctccatgaaatctctctctctcacacacacacacacacatattctcattctgcaacttagcacaagaacattttgcgcaaatgttgtttgtttgattttatagacctgctcatgctttaatacatctgatcttcataaaagtttgattttttccgaaatacagtataagaactgcacagttctactagcatttgcttctgtatagataactttctgttgtatcctgcatatgtacctatttgtttccatctcttgtgactttattggcttgaagccatttgctatcatctcttggtcatacatataaaatcttttcgtcttctcgtgcttatgaaatattttcatcttctcaaccttttaaattcatttgatcttcatggaacttgaagcctgaagtcatttgcttctacctcctctcacacatatgaaatatttatttgtttcttatcatggttgtgctttggtgtcctgaatcatgactgtcaatgttcgcagcatatgttcttgtaggttgaatagaagagtggaagcaccaagctgtaccaatggggcgtggaaaagtagagctgaagaagattgagaatccaacaaaccgccaagttaccttctccaagaggcggatggggttgttcaagaaggcaaatgagctagccattctttgtgatgcgcaaatcggagtcatcatattctctggcagtggcaggatgtacgagtactccagccctccatggagaatagcaagcgtctttgacaggtacctgaaagcccctagcacccgtttcgaggagatggacatccagcagaaaatcgtccaggagatgactaggatgaaggatgagaggaacagactgaggatgatcatggcgcagtacatggcggaggacctggcatcgttctccgcgcaggatctgagcaaccttgagcagcaaatcgagttctcgctgtacaaagttcgcctcaggaagcaagagctactcgaccagcagctgctcgagatccaccaaagggagatgcatatgccagcagagcagggcggctacctgtgcctcatgaacccggctgcggctattgctagcgggcagcaccagcaggctggcgagatggtgggaattaacccgaggccgttcccgtggtgggacgtgggagccagtggcagtggcagtggcagccagagccagcagcagctgctgcacggccgggacgccgcggagtcgtcgatgacggcgctcgggctgtcgccgcagctgcatgggtacaggctccagccgcggcagcccaacctgcagcaggacgccgacatccatggctggctgtgatttgctttggtcgtgggtgtgcgtcctcaacgagacgagacgacgctgaacgtgcagctcctctgcttgcgacctgttcattctagagtctttgatcatgacctgcccccgtaatgaaaccgccagtagtcgtcaatatctccttctctaacctaagattggacctaagagggacataatgtggtcgcaaatccatataatagagtctatccgtcgcctcagccaacgtgccctgctgaaaataaactttactggagctggcttgttagtgctgggagctgggttgtcatcgcgttgcgcgtcgtttgtgttgaggtgtcgtgaacgagcagaagcagcagttactagcagtagaagcaacggtaggagccggacggcatagcacctttgccctgttgcttttgtgctgccaaactgtcg

SEQ ID NO: 32906 - DNA, 1527 bp, Zea Mays
caggaaccagcagcggcaggaacaaggcaggcgatccggagaaaccaaccttgctatcatcgccggcctaatatcaatcccctgttttacccctgggccacggcagtcgtccagctggtttgcctcccacacaagggtaaaagcggaacgctaaaacctcaccccctccgcttggaagttccatcgccgccgcctccatcgctacacaccacgacgcagcgcccgattccgccggccagcaacgatgcagagctccctcgcccggccgccggtactggccggatgcggcgagagacggggcctggcagccgtggcacggtgccgcgctgaggcggcggcgcccgtgtggacggcgtccagggcgtctgcggggccgtacaccgggagggacccggaggtgaagaagcccgcgtggctgcggcagcgcgctgcgcagggggagaagtacgctcgcctgcgggagtccatcggcgagctcaagctcaacaccgtctgcgtcgaggcacagtgccccaacatcggcgagattatgttgtgctaaccagtgtcgatagagatgacttacctgatggtggaagtagccattttgctcagacagtgaaagctttaaaggagctcaaacctggaatactggtagagtgcttaacctcggattttcgaggtgacctggaggctatctcatctttggcaaactctggcctagatgtttatgcacacaacattgaaactgtgaggagtctacagagggttgtgagggatccccgggcagggtatgatcagagcttagcagttctcaagcatgcaaaaggttccagggaggacatgattacaaagtcttctatcatgcttggtcttggagagactgatgaagaggtgaaacaagccatgatggatctacgggcaattggtgttgacatccttactttgggacagtacttgcagccatcagaaagacatctaacagtaagagagtatgtgactccccaaaagttccaattttggaaggagtatggagaatcggtgggtttccgatatgttgctagcggacccttggttcggtcttcctaccgtgcaggagagctatttatccaaaatttagtcagaaataacaaaactgagtcgtccatggatccgtacgcagaaataacaaaatctaactaaatatcttgtgccagagcaatccatgggatcagtacacactgtttgttaagagcagcaaacaagagtagaacagcataatcatctggttcttccgaaagctgaggcccagctccttgtcccttttcttttcagatagtatgcgcatctttgctctctgcgactctgccgttgttgcccctgttgaatagagaaaaaacgaggatgccgattctttttctgtatacacgataacacgaaaagctgttcaagtgtagtagcatgtacgaaactgtctccatgttttggacgattacacattgctttgttcatcatgataaagagagaaagaaaacgaagaaagctggagaaaggggatatcgcacttta

SEQ ID NO: 32907 - DNA, 2075 bp, Zea Mays
cttaaggagaacatggcagcttctttggaagctgaaagacaagaaaatgaagcaatcaagaggtcccttgttgaagctcaggagagaaacgatgcattatttaagaaagttagggatagcgaatacagggcccaccagcttcaagatactgtccaaaagcttcaagtagatgccatatctagactgtctagctttgtaatggagagacaagatggtgatggtgtcaagaatgcacatactgaggttcatggaacaaatgaagatctaatgaggagaaatgaaaacctcctaaaaaggaatgatgacttggtgaagaagattgaagattctgctatacttgttactgagcttagagggaacttggaaaggttagaagggaaagctgctaatttagaggctgaaaatcaattgcttcgtcaacaagcaattgcaactcctccatcaacagcaaagtcttctcaagctgcatgctctaaaatcagtatgatccatagatgtcaagaaagtggtcatattttaaatggcaacgtagcatatgctgaaatgaagtcctcaaccggtcaaacagaaatgagaccctcgatgggcagttcccttgatttgattaaccacaaggtttatgaaaatgggcaaagcttgtttaatgatgtatatcagcaccagcaaccccagaatcatcaacagttattgctgaaatatattacccaatatcttggattctctgggagaaaacctattgctgcgtctcttatatactactgtcttcttcattggagatcttttgaagaagcaaagacaactgtctttgacagtattatacaaattgtaaactcagcaactgaggctcaacatgatacgagaagcttggcctactggctgtccaacttatccacattgtcagttctcctgcaacgttcatttaaagccaccagggcaactgcctcaactccacatagacgaagaatttcctgtgaaaggatttttcaagccaatcaaacttcaagcagtggacttgcttgtctcagtgctcaatcagtggatggaggtaccgtgtttcaccaaattgaagcaaggtatccggcttcgctcttcaagcagcagctagtggatcaggttgaaaaggtgtatggagtgataagcgataaaataaaaaaggagctaaacccattacttgagttgtgcatacaggatccaagaacttactcaaatcaagcaaaggccttgatgtctccttctagtggcttgggccaacaggatcaactcatgcattggctgagcatcgtgaaaatcttcaacagctatttgcatgtcctcagagccaatcatgttccctcaattttggtccacaaattgcttacccaaatattttctgtggtcaatgtgcaattgtttaacaggctcctcttgaggcgtgaatgctgttcctttagcaatgggcaatacatcaaagatgggctaactcaactaagatattggtgcaatgacgtcagtcaagagtttgcagactcagcatgggtagcactgaggcatataagacaagctgttgactttgtggtaatttctctgaagccgataaggacatgggaagagatatgcaatgatatttgcccgtttgcagcagctagagcggatagtcggtatgtattgggatgatttaaagggaacaaatgtaacttcagccgagttcatgtcaagcatgagagctatgctgcgcgaagaatcaaatagcgtctccagcttttcggtcctgctggatgatgattccagcatacccttttcgcttgaagatatttcgaagtcaatgccaaacattgaggagacgtcagttaatgacctgctgcctttcatccgcgagaaccaaagctttgcgtttttattgtagtggagaggacacgaatccttagatttgttgtatgagattgcaggccagtctgtgtggagttactatccgtctgatgggtatgcgttgactttacacgtgctactgtttgattacctagcttacctgcatccacaggaactctcaaaactgacgtatccattcggccaccctcacgggagcctgcaggtatcca

SEQ ID NO: 32908 - DNA, 2072 bp, Zea Mays
cggttgcgcccttgcccttctctctctctctctccaagaacagtactcccatcccatgcctacagctacaggtcgagcagtggccaggggcccggaagagcacgggccaactagagaagtagagattggcattacacacataaagtatatatatatattggcacgatgcccgctcctctgcatcagggcgatcacgctattctccgcgcgaatgggtttgccgcggacccatataggctcatcgggagaaggcgagctgacgggccgagcggccgccacgccgaccgtcgccgaccagtcgtccaccggcaatcaccgaggccgtcgcgcccgccggccattcattcatagtctctcggtctctcttcctgctactttcttctcctgacggtacttactcgcggccgagatgatgaccccggtcagaacttcttctgcctcgcgttttggggtcgtggggttcttgcttctgcggctctgcctggcttctgcctcgcttcgcttgttcgcctacttggatcgggtgccctgcccatgcgctctgcattttctcgtcacatcgattccgctcgaaacgaagctggtggttcgttttacttcaatccaatgtcgcattccccctcctcctcctcctatccgattggtgtggtgctaacatgtcctttctcttgcgctttgcgaaagcactctcataaggaaaaaaaaaccaaccttgcagtgcagaattctctccgttagtctcaaatctcgctactagagcgctatcaaactctactttctttccaaaagatttcagataaatctttataaatgggggtactttactactctgattctgctgtacaagtagaaggcactaaacatgacctaacagtcaagctggtcgcgttgttttccggcttcaaggaatatgtggcgttaatcatggtgtaatccaaaaaaatccacgtgcaaaatgactgacagcctcttcacgccaccagtcttgctcacgagcctagtccatgctacagtcgagagctggtagaacggatatgcctcgtaattatcggcgtcaccatcgctgttgtcgctgtcccactgctgctagtgctagctactcctacgtacagcaggaagacagggcggggacagccgcgggccccacctagcaacaaagccgggccccacgccctgccagtggtgcatgagaatccaggcccaggcccaggcgggcccctctcgccgtggaggcgtggaggcgttagcgtccgtaattctcgcaggctgtccctgtcgacgggagatgtgtcacgtgtcgaacccctccgccgacgctccagtcgacctgtgtgtgcaatgttggtgtaggtggacggtggtggcggcggcggtacaggccgtggagcgagatcgtcggtgataggactcggtccaaaatgcaatgttgacgtaaaaattggacctaaaactacacgagtcagttttaattgttgcgccaactgctgctgcgtcgtgtacctccacgcggagcagtcggaggcgaagaacggcgcggaccacggaggagagcacttagccatgaacggcggcgcgtcgctagacggcacggaccacggaagcgagcactcagcgacgagcggtggctcagtacacggcggctggcggagacgcggcgctagatgccggcggagacgcgtaaaagtagacggcggctctcagacgagacgagtgaaccccaagccgcgactcgacgagctatggaaagtgtgggctgtagttgggccggaccagcaggcccgaatcgcgttaaaactgctggcggatgcgccgacgcgtccgattgtgagctcacggcacatatggcgtgactgttttgtaactgcatttgcacgtgaaattacacaacctacctagttccggtaggggcagagggtgtcttgaggccacggtccacgactgtgagtgctgcacgcctgcacacactacagcctgtgaaccggtcttgccacccctttcagctgtcagctctgatgaaaatatccaataatgaaacctatgaataccaggcctgagaagtaggtcgggccaag

SEQ ID NO: 32909 - DNA, 1577 bp, Zea Mays
gttaccgtccaagccgcttcccaagcggccaagccccccacccctcgtcccaacagccagaaggcgccgtcgcctgcggcgacacgcgcacgcaggcatccctctcgtgagcgcgcactgctaccgtgccgcagtgtggttacagctcgtcgctcgaggcgaactccggcgtgcggaaccctagcgcaggcgtggagctcaccggcctcggcgccggcgccggtactaggatggctccacccgttacgccatggtgagggccttgcggctcggtggccgcgcggccgccgcagcgaggtggtgcacctgccggcgcgccgccgtcgccctctgcgtggccaacctcgtcgccgcgctgctcgtggcccgcgcgctctacgctcccggctccttcgcatttgcacccaaacgcggggagctgaagtattccagggagcagatgaggtgggtggaggagtcgatccggattcgccgcgcagctgagcccgtcgagctcattgaggcgaagctgcgcaaggcattcacgagggaagagaagacacgaaaagggctgccgctggagctgaagcagaaagtttcgcttgagattctgcagagactgcacgatttgggcgaaggttctaataccacggaacaacaagaagctgtagaagcatggcgtgttgggaagctcaaggacatgagaagtgcatcttctaagaatttatcaaattttggcctctccagtgaagattcaaggatgttaaagcgagccttggagtttaactggcaaaggatattggaggacattggtctttggatacctcccactatatatcatatcgaacatgatgacaaacctgagaatgaaccagaagatgaagagataatacccggtccacctttgccccctgaatgcaatactgaactgcatactgattatggtggcacggctgttagatggggcttaacacatcacaaagaaagtgccgcagattgctgtcaagcctgtatagatcaggctaagagggccagaccaggagccttaaagtgtaatatttgggtttactgtccgtctgagtatggatgctactcgccagacaaatatgaacacaaacatcaagaatgctggttgaagcaggctgaccaccctagattaaacttcaaagaccggtaccctgagccatacagagattctcatccgactgcccctgttgttgtgccatggatgtcgggtgtcattactgcatgagctgcttgcccacaggagcgcaatgccaatgtgcagcttccagactgaactctacatttttgttttgcaaactcagaaaaccatttttcattttcattctttagtacttaggctttaggttagtctacttggtagctgaagtttaggctgcgctggggcctttgtcaaactgtgccctagggcgtggcaaacaaactgatagggcatgttttggcagagatgtgctgtaatgtatgtacatcaaccaatcatgctcgcagctatatattgtacttcaaactgaaaactaactaacacagaagcaatcatgcccatggctatattctacctcaagctcgagagatac

SEQ ID NO: 32910 - DNA, 1338 bp, Zea Mays
ccagtcgctccccataccagaccaagattggcatgagccactgcaaccaggcttcacccacggcaccacatcctcctgttcctggtggtggtgattggtgacgacgaaagagcttgcttctaagcaccggcattgcggcgacacaatgccgacggcgccagcggcggtgctgccgcgcacttgcatggactccctcatcgccttcctccaccaccacctgcgcgcgctcctcgccgaccccgccgcgctccacgccacgcgccgccgctgtctcgctctgctcacgcccccacggcggcaccattgtcgtaaaaacctctccggagcgcaggaggaggaggagaacgaagacgacgccgtcctcgccgcgctccacggctccatcgacgcgctcctcccgtcccccgtcgacggcgcggcggccgtctgcctggcgggcgtcgaggaggcgctgcaggcccccgcgctgctgccggagcacggcgagacggcggggctggacaaccgccgcgtcgccgcgtgcgcctacttctacctcgcgctcgtgcggtgcgcccagggggacgcgtggcagatgtccatggacctcctgcaggccgtcgccgtgtgcccagccgcggtggccgctggccgcgaggacggcgcccgccgcgccgggctcgcgccacgcgcgctctgggaggggctgttcgacgacggcgtgctcgccagggccggcggcgccggcgaagaggacgcggcgcggcgcgcggccaggcgttacaaggactggctcatgtactacaaggtggtggccgccgcgccggagcaaaatggcgggtatcttcaggcaggaagatctggaagctctgtcatttcgagatggttgagttcttcggaggtaagtgccatatgatgtatacattgtcttcacacgttgttgtatgtgcatacaagagttgatctggcctccatttgagaactgaaggtgaatctggcatcgttgcaggatagaacgaaccattcggttgatcctgaaggaattaccacggtctctgcatcagaatttggtgcccatgacggtttcaccgagctgaaggatttcctcagcatcgcagatcaagatttccaggaagataccaaggggagctctgacagcaggtgcctccatgagatgctcgaggagtcgcagtctgattcgcctgtttccttttactcgcatcttgattcattttcagtagacgaactttacttcaccttttctagtaccacatttatcagcagtacagttttacaccattcatccttgtgaattatcgtcaccaaagttgaacatctgaatgattggagatacatgcc

SEQ ID NO: 32911 - DNA, 1404 bp, Zea Mays
cgaagagaatccatcccaatagtctgcccggtccattctatcttcgtcgatatcgccgtctgcccgtctctactgggaagggaagggagcacctgcctgctcctgcgcggcggcggttgagcggcgtggaggaggcactacccgttcttctgggctgtcaggccttccgtaccgccgccgccgtcgccactcccactcccacagccgcgcacgcgcttctcctcctcctcctcactgcgctccaccaagagatccgccgcaaagacgtcaatggactcgtcttcagtcggtgaacccttctacgtcgtccgcaagggggacgtcatcggcatctacaaaaccctcagcgaatgccaagctcaagtcagcaattcggttcgcgacccttctgtcaccgtcttcaaaggctactcgctgcgtaaagacaccgaggaatacctcgccgcgcgcgggttaaggaacgctctctacgccattgatgcaacagatgcacgagatgaattgttcgacgatctagttccctgccctttccagcaacctgatggagctgcatcgtctactctgaaaagatcacaggagattgaaatcggaccatcaaagaagcatcccaaagttgatgagcaggaaatccagggaaagccggtgctggagcaataataaggcaggtagatggttccgtgattgctcaactacgtgagggtctgggcattgcaaccaacaatgctgctgaatatcgtgcattgatcctagggctaacatatgcagccaagaaagggttcaagtatattcgtgctcaaggcgactctaagcttgtttgtaaccaggtccaagatatctggcgtgttaagaatgataatatggctagcttctgcaagaaagtgaaggagctaaagggaacatttcatttatttcaaatcagacatgttttgagggaatataattcggctgctgatgctcaagctaactttgcagtagaacttcctgttggtgaagttcaagagcagtcgaacttcccatgctagcagttgtgttgtggtcaagtgtggtttgtgcatcgctaaggttctgggactgaagctatgtcacatttgttcagttctcattgacacaaaaggaagagacgaaacaacagttgtattggaagtggtagtgggtctgatatatctgcggagtattgaacagacagatgcaatattgagtagattcttaggaaatttaatcgtctcaaacttctagatagtgcgagttgatttgtccaggaccagtgtttgctgatatacgatgtttgtattcagaacagtattagtaccggaaactttaattgctcctttctctatgttggttacttggttaaggttgagtgttgcttttaataaattggtcaaaattttattatcacttaat

SEQ ID NO: 32912 - DNA, 2111 bp, Zea Mays
atttataaacactgccaattagtccgcgccggacctccaacccgcccccacggcccacgccatcctccgcaccccccacgccggacaaccggggctcgccgcgccgctacgctcccaagccggaactccgaactcgccgcgccgttctcactgtggcaccagagctgctcgatctgccccgccctcgcccctcgcccctcgcccccttgccggaggggcgcgaactcgcaaaaattattgggtgtgcatttatacacccatgttctttgctgaccctgtctggtagcagattaaggtttggttgcggaaaatattggtgggttgtccaccatgacgagtccgccaagggtgagcatggagatcaccgacgacatgctcaagagcatggaggtcggcctagctttccgggactataatggtagaattagttctatggattttcacagcaaggctaccaactatcttgtgacagctagcgacgatgaatcaatccgcctatacgacactcaaaatgcagtgtgagtgcaaaacgttattctgtcttcagaagtatttattataagtaaatagggtctctagttggttttttttttgtcttaaaagaagcaatctgttccattctagtagtttgctaggtttcactgttgtcctgtagaatttactcttcattttccagttcctaacattaatactgcactgatacaaattctcgtgtatgtttattagtttgttttagtgtctaatataacttatattcgactttggtattgcacacaacaagatttagtttatgacaacagtttagtaccttttgtagcgatttattttttttcctctaaactgtttctgtcttcgtgatatgtattggttgctcactcattcaagttttcagatgtttgaagactattaatagcaaaaaatatggggtcgaactagtgtgcttcactgataacccaaatattgtcttatattcatcaaaaaatggctgggatgaatctctgcgtctactctcactgaatgataatcggtttcttagatattttaaaggtcaccttgacagggttgtctgcatctcattttgctctgagaaagaaaattttctctctggttcacttgaccgtactgttctcttatgggatcaacgggctgaaaaatcacagggcttactgcgtgtgcaagggaggcctgcagtttcatatgacgatcagggcatggtatttgcagttgcctatggtggtcacataaggatgtttgatgctcgaaaatttgaaaaggggccttttgagatcttctctgttggtaataacgattcagaggcccatgtcataaagttcagcagtgatggcaggcggattctgttaaccactaaagctggacgtgtccatgtgctagattcattccatggcaatagcattgcgtcgtgcaatgtgaagccagtggtaaccaactcaacactggaggcgtcgttcagccctgatggaaaccatatcatatctggctccggtgacggtagtgtttatgcttggaatgttaggagtggaaaggtcgcgcgctggggaagcacagacgacgaaccgccgctggtaaggtgggctccaggatccttgatgttcgtgacaggatcatcagaactgtcatgctgggttccggacctgtctaagctgggatcctttaccattagcaagtaggtgaaaatgatgagaggtggactgcccttgcaaaccctgttcgtccctgtatggtatgtcgtgtggctggttgaagcgactcatcctttagccaggtggccgtggtaaacttgcaacctgttacaattgaatgacttgtatagagcatcggctgtggcgatctggcttctgaagccagcggctagacaatgaagatggatccatgctttagttctgtaaaccggagattgtagctgagtattgctgtatctctttgtttctggaaggcgtcttggctcgtaaagattctgcaactcagagcagatggctaatatatagagagagcaaagaaacaatggatagctgggctggttgttctgttttcagttggattccttgtactgacgtgtgattccgttgtgcatgcaccgattcatatttcag

SEQ ID NO: 32913 - DNA, 1134 bp, Zea Mays
ggaggaagcttcccttcggtgaggtaatcaagagacatgccagtgaggagcagtttagccggttcttgcattatgaagtggatgcaattagaaaggcgtgtgccagcttggaagagggctaccttcctctagttacattcatagtggtgcaaaagcgccatcacacactgttttgtcctgaagatcatcgttcacacagacaaccagatcgacgtggaaatattttgcaaggtgagccgatgatagatgttgcgattctccagaaagaaaacaaattctcgtctcaacacatatggttttaatcattttgcacttttggcaagggacgagccggtcatcacattaccatggtggacatttgagatttgcaaccttgttgtgcatagttttacacactaagcacccattgcaccgaaaaaacttacaggatgaactagatgcaaaacctgaagagctggaaggagaagagttggaatctaagcttctagagcctgttgcagctctttcggtgcatccagtgcatgtcccaggaaacaagcaactagcttgccctacttcacagaaagttatagctaaatacgatgagctggctgcactacaagctgaaatggcattgtgatcaggacactttggagacaatagttcttatggcgcagtcaggctagcaggctgccatctgagtttgaaattaccgattgctgccatccttgtgatccagacaaggaaaatgttcttgctatttaagttatgaggtggagtgatggctcttatcttgaagatcaggatcactggcggttgggttactccttgattcttacatggattaacgcatggaccgaggaagcgcaatgacaagcctaatagcctgcaactgatgaaaggaatggtctctactacatgtattattgtccatcccatctttgtttaatggtcgtagctgctttatacaattattcctacctatgctagactgtgagccattgtatatcaatgtattttatcatattgatttcgtagcaacgtacgagcatatacctagtatatttataaacaatgtgtagcacttgccacatttaaacagctaatcttaaaaagacacgacatgcgaggattgttaatcaatatcgtttgtat

SEQ ID NO: 32914 - DNA, 1223 bp, Zea Mays
ctcccacgcggacgcgctcgcagagtcgcaagagaagagccgcatcgcgtccattaggtccatagcatctggaggggacccgtctggcgtctgtctgggaccgggctgcccagccgctcgatcgacgtttggcgaggacgctgctccggtactccggttggttggaccggaggcgcggcgatgggggcgctgtcgcggccggaggaggtgctggcgctggtgaaattgcgggtggcagcggggcagatcaagcgtcagatcccgcccgaggaacactgggccttcgcctactccatgctccagaaggtctcccgcagcttcgccctcgtcatccagcagctcgggcccgaactccgcaatgccgtgtgcatcttctacctcgtgctccgtgccctcgacaccgttgaggatgacactagcatcccgaccgaggtgaaggtgcccatcctccaggaattttatcggcacgtctacaaccgcgactggcattattcatgtggaacaaatcactacaaagtgctgatggataagtttcacctcgtatccactgccttcctggagcttggtcaaggctatcaaaaggcaatcgaagaaatcactaggcgaatgggagcaggaatggcaaaatttatatgcaaggaggttgaaactgttgatgactatgacgagtattgtcactatgtagccgggctagttggttatggactttccaggctcttttatgctgctgggacggaagatctggctccagattcactatcaaattcaatgggtctctttttacagaaaactaatataattagggattatttggaggacataaatgagataccaaagtcccgcatgttctggcctcgagagatatggagtaaatatgcagataaactcgaggatttcaaatatgaggaaaataccgaaaaggcagtacaatgcttgaacgatatagtgacgaatgcactgattcatgctgaagagtgccttcagtacatgtcagccttgaagaaccatgccatcttccatttttgcgcaattccccagataatggcaattggaacatgtgctctttgctacaataacgtgcatgtctttagaggagttgtaaagatgagacgtggtctcacggcacgaataattgacgagacaaattcaatgtcagacgtctataccgctttctatgagttttcttcattgatagagtcaaagctgcttcatgcactatcgtc

SEQ ID NO: 32915 - DNA, 2560 bp, Zea Mays
ctccaacctcgtattgggagagatccgctcgccgcctcccccgcggcttcctcttcctccgcgcaaactcgccgtggcagagttatctcgcgccggtaccgcacgcatcgggggaaaaacaaggtttttgggatgccgggggccggtgtggagccgccgtcgccgccagccgaggccgcggcatggctaccgccgcgcaggttgagacctgggagggtctccgccaagcggtgctggccgcccgggtgcggtcggttcccttcgcccccgccagcgccggcctctgcggccgaggcaggtcctgaggtgaagggcgtggatggcgcctccaccatcgtcgtcggcagagccgatgagaagcccgcccccgccgtcatttcgccttcggctcagaatggatgcccagataaggtggaggcccccgcccccgtttcacctgcgcctgagagcggcgccccgcctgctgataaggtggaggaggtggctgaccccgccgccgtttcacctgcgtgtcagaactgcgccccgcctcagcaagaggaaaataaggtggaagttgtcgctgctattttgcctgcagcgcacagcagcgccctcccacatgccctgactgagaaggatcagcagaatgtagtcatccgggagaatggagaggcacaattgctgggcgatgcaggcaagctgtcattggatggtcagcaagggaacaatgtggtgcaggtagcagtactgggtagttcgagcaccgttggtgctagttatttgcagaacggtgacaaggggggtggattgttggtggctgaggagaagggacgtggtggcagcagtgatgtggggcaggaggttgctgttaatggggatgtctcagagattgcaaacaaaacgggcactggtgagttacagagaaaggaaaatggaactgcaggaagcagaacaaaacggtggtttgtatcctctctgaatcctccacccaagaggagggaagtctcagccgtacgtagatttccacctggctgtgggaggactgctgttaccaccacagacagcggtgttttggaggtctcacctataagcacatttgctcctggtcatgggagatctggtgttaataccacaggcagtggaaatgaggggttgccttcagaagccacccctgtcaacaataatgatgccttggtggcaagttcggttttaggagagttggcttctccaacttcagcactagaggcctccaataagaaattggaaagcaagagaatagtgggtgaaggacatagcaaggctcacaataaggtccaagttcaagatgattttgccggtaccaaacaagatggtggccagcgaaatgttgttccaaaagctacgccgaggagtgtttctgatgggaagatgaaggggaaactcccagcacataaagcgaatcaggtagcacaagaagtgatggttggtaagatgaaaaataaacttgatggaagctttcaaagaagtaatcttaggacgcctttgagcaatcccattgatgcaaagacaaaagtaaagaggtcggatagtgacaagatgaatgctggagtgcatggtaatgcaggggcctctgcaggtgggaagatggaaaataagactttgagtgctaaaaaggaagtggggttcccaaatatgaacacaaagcaaaagaaggttgctcctaagttgaagggtgatgtcataggcaaggataatatgcatttgtccgccagggagctcaagcttggaaaatatgttgcaactgatcatactgaagagcctaagaagcaaataattgttcaagcattgatggctcctgacaattgcccttgggcacgaggaagaaagtcaattgctagtgctttcaagtctcttggtcctatgaacaaggcaaaggggaaggatgctagtgcttccaaacaatgttcaagaaaatgttaggcgctagccaggtgttaggctactgaccagcgtctaggaagtttaaacgtagattaagcatgcttaatcattcttttgtagattttgtgctgctgagagcaagcagctgatcatctatgagggatatctcaatattgtacatgcacagccaagcttccaaacaacagggcagcatcacaaggcaaaggatcacaagaaaatatacacaaaaaaacactcacagttcatcacatgccttaatgatttaagttattccaaagaataggtctatagatccttgtcccttgtattggagaagagttatttgatgattggtgggagaagattatttttgtttaactacaggaaggcctcaactcgcttgtgattcttaggatctggaccattttagatcaccgcaatatatttgtttttgatagtatacatccctgtttggctagaaccttgttattgcttgttagcaaggaaattcagttgtgggtttgttgggactaaatgtatcttttacctttttgcccagtcgcctgagtatgtttgttcttaggttacatacccttctgtttcttgtcgcgaaagtgatttgtagctttttttttgtatatgtggtgttgtgtaagga

SEQ ID NO: 32916 - DNA, 2181 bp, Zea Mays
acgacacgcgccgtaaaagaaagcgttagtccctttccagctcgtaggcgaatcccactcgccgtcgccgcaacggctagtgttgaaaccggctcctcccgactgttgcgatacgaactctttctgagtcccgaccgttggaaccgctcctctcgcctcctcgacccactccgccttgcctggcagcagcagcgctcgcccgcgcgctcgtttatattatatctgtgcgactgtgcctcccctccccgagccatagcctcctcgtcccctcgagaactgtaccatcacgcgccgcctttgattgagcagggactgggagagaggagaagagagggtgaaagggggcaagaaaacgcttcttgttgcctttgtgcttcagcggatccgcggtggctgcgcacgccggcggggaagaggagtcgcgggcggcgcgcctccagtcttttttcgcctccgtgctctccgggctcttcggccaggccgaggccgaggacgaggacgaggacgaagagatgcccacgcgcaaccacaacgctgccgcggctgccgctccgcagcatcaccatcacaaccgaggtggtgctcccgctcttggaaagagcaaggccgtgcccggccgagctgatgccatgaaccggcgagcccccctcggcgatattggcaacctcgtcagcgtccgcccagccgaagggaaacctcagctgcaggagcagatcaatcgccccatcacgcgaagcttcggcgctcagctcgtgaagaacgtgcaggcgaatgccgcaatcaagaatgccgcaatcctacccgcgaggcatgcgccgaggcaggaaaggaaggctcctgccaagcagccgcctcctgaggatgtcatagtactcagctccgactctgaacagagcaggacgcagttggagagcagcgctagctccgtccggtcgaggaagaaggtcatcaacaccctttcttctgtgctctcggctcgctcaaaggctgcctgtggaatcactgataagagacggcaagtagcagtgatcgaagacatcgacaagttggacgtcaacaatgagctcgcagttgtggaatacattgaggacatctacacgttctacaagattgctcagcatgacagacggccatgtgattatatagacacccaagtcgagatcaaccctaagatgagggctatcctggctggttggataattgaagtacaccacaagttcgagctgatgccggaaactctctacttgaccatgtacatcatcgatcagtacctctcgctgcaaccagtcctgcgaagggagctgcagctggtcggtgtttcagctatgctgatcgcctgcaagtacgaggagatttgggccccagaggtgaacgatttcattcttatatcagacagtgcatacagcagggagcagatcctttcgatggagaagggaatcctgaatagcctggagtggaacctcactgtccctacagtatacatgttccttgttcgttttctgaaggcggcagccttgggcaacaaagttgagaaagagaatatggtcttcttcttcgctgaactggcgctgatgcagtacggcttggtgacgcggctgccttcgctggtcgctgcttcggttgtctacgcagccaggctcactctcaagagggctcccctctggaccgacaccctcaagcaccacacgggcttcagagagtcagagacagagctaatcgagtgcacgaagttgctggtcagcgcacactcgtccgccgctgacagcaagctgaggtctgtatacaagaagtattccagtgagcagttcggaggtgtcgcgcttcgcccacccgcagccgcagtggagatcaagtaaacgaagataacttcgtgctagtgtttgttagtataatgtaatggaaggcgagcctgacattcgctagggtctatccgtctatgtttgcttgtcggggtagtcaagaaagtttgaatgcttgaggcagccgtttgtttggtaggctgttctcagagtccaggtgttatctgacttgtgatggcatgttgtgtttcatgtgatggatatcattagaatcctaatctagtacgatatctattcatgaatataaatggtatttattcatttgttcataaatctgaattgaaaatggccctacacttttgaaaactaaaatagaataaaa

SEQ ID NO: 32917 - DNA, 1281 bp, Zea Mays
aacaattatcgttccacccacaaaagcgaaaacaaatccgtaaatcattctagtatgaaaatcactgaagtagtgaatagtgatcgtgtttatttttagaattataaaatcctacgcatattaaaagtgttgtcgcggggttcaactttggctacacgtaaacatcgcatctctagaaatcatacgcgtgaatcgccaaatcgcatcaatattacaacaataattcataagatcaataaagtaattcaaacacgatttagaaaatatattaacgggttggggttgttttcaaccttgagatgaacggacacggtcgtcggtgagtgttcggatggcgaggtacgacggcgagcggcgtggatgaactccggcgagtctccacggatggcaggcgattgtcgaacggcgtggtcacagccacgggatgctgcgcgaacggcgaagctccggtggggaacgtggacggtaactacggccgaaggcgagtgacagtaacagagaacatcacacaaggcaggggaccgggcaggaaacaatttgggcgagattgacgcggtgccagagaatagagcagcaaggcacgatgacgccgccgagcagagatgaggggcgagggaggagaggctcagcgcgggctccatttataggcgatggaggagagggaatcactgtagaattggtgccgattgaattcgtcgacgactaaaaacataccattaatggtgattgaatgggaagggagaaacggcagccgttaatggctcggcatcaatgggcggaaacggtcgagttaacgaaggatgaacggactgagcgcgacgtttcggtttcctggcagcgggtcgcgcgggtcctggccgagtgcgcggggtcggaccttggccggtcagggtcgcgcttggtcgcgggacacggcgcgcgggatcttcgtcggggcggcctcgcttgggcgcgcggggtctggcgctgcttggcgagtcggcggctcggcttcctgggttgcgcgcctgggcgcgggatggcgcggggtcgcgcggctgcgggcgtcgcgcctgcttcgcgccgtctcctggcgtgggcgctcgacgcgcggtgctccgcggggctgctcggcgccggttgagcgatcggctgcggccaggctgggcgcgcggccggctggaggcggacgtcgggcggcctggcgtcgcgcggggtggccggagcggcactgggtcagggaagagagcaggggaggcgagagaaacgggagaggagagggagagagaagtagaggcggcg

SEQ ID NO: 32918 - DNA, 770 bp, Zea Mays
gaacgggcttacgcgcccaaaatgtgaaactggcccgtttgcgaaattggcagtcgcgcagcgcagcttttatatagccaaatctttctttcttttttcatcgtcttggcccctcctccctttcgccttcatcttccctaaaccctaggcagtgtcctaaatacgctctcccccggtggggtcgctacagcgatctgatctttcgccagtcaccggcgccggaggctccgcgctctatactcatggttgtcccgcgcgctcccgagcagacacagcaggaccaggatgaggagatgctggttccgcatcaggatgccattgagggtctgcagaaggatgttcttgagggtccgcagccgatggaagaatttgcatctgctgttgagaaccaaattataccagatacctccacatctagatttacatggtatattgaaaatttctccaaacgaaatgttagaaagcactactctgacgattttactgttggggggtacaaatggcgagtgctcgtcttccccagaggaaataacgtggactacctttcaatgtacctggatgttgctgattcgaacttgatgcctcccggttggagtaggaatgcacaattcagccttgctgtggtaaaccaattagacagcaaagcatcgttaagaaaaggatgagagtcttcaaggcagataagaactaaggaagataaagctttgagtcaacaaaataaaaaggagaaagaaatggtcctgttatgtggaaatggaataactagcatc

SEQ ID NO: 32919 - DNA, 247 bp, Zea Mays
ggaagactggaggagcagcagaactatggcgtcgctgaccctggtgggcggcggctggggaagacaggaagagccgaagaggacaaacggacaggcggtgacggcagacctggtcgactggggaagagggcctgaccggcggcagcagcagcttccacaagctctttctttcccaccgtttccctcctctcccacacggcagctctcgccctgtttccttctctcacatgcagcagcatgccagcag

SEQ ID NO: 32920 - DNA, 960 bp, Zea Mays
atatatatttagtgacccatatagaagcccattagttcagcacagcacatcttcctcgcagcgccggcgctccatcttccgctccctcccccaccttcgatcggcacgcaggctcggcgtcgtcgtcagcggttcctcctcccgcctctcgccagtagcctcgcgccctcgccgactggcgaccctgccttgaaggggctggcaagatgatcggcgtagggaaggcgaagcagtacgccaacgtccttgacaagcccctcagccgtggcaggcaggaggtcagtttgagtgcatttgcattcttgttctctgagttggttcagtacaaccagactcaagttgacaacattactgagctggaacggaggctggaggatgctggttatgctgttggtgcaagggtgcttgaactactctgtcacagggagaagggaaatagacgagagacacgacttctgggcattttatcattcatccacagtactgtttggaaagtgttgtttggaaaggtggctgactcacttgaaaagggaacagaacacgaggatgaatacatgatcagtgaaaaggagcttcttgttaaccgtttcatttctgtgccaaaagacatgggagcattcaactgtggagcttttgttgcgggcattgtaaagggtgtattagataatgccggctttcctgccgtagttactgcacattttgtgccaattgaaggccagcaaaggccaagaacgacaatcctgataaagtttgctgaagaggtattacacagagaagcaagactgggctgagtttttatgtatgtacacaaaacctttgactagcctatttgtgagatcgcaggtgcttcatcagtcttattgaaatccgaccgaaactgctgtattaatgcttttccttgcattcaccttgtattaaaggaatccttcatcttttgatttttcgtattttgtagcctgg

SEQ ID NO: 32921 - DNA, 1660 bp, Zea Mays
ctggtgcattggagatcatttgaagaagagaggagcgtggtctttgaccggattatccagaagattactgctgcgcttgaggcgcgagacaacaacgatgcactagcatactggctgtccaattcatgcgcgctcctggttcttcttcaaaggacactgaaaatcaacggggtagctgccttggctcgtcagaggcgaagaacgtcgtcacctctcaaggaaaaccaagatccagctcccgacggacagttgatctgtggactagcccaagtctaccaggttgaggccaagtacccagctatcgcgttcaagcagcagctcaccgcactgctggagaaggtctatgggatgatccggcacaacctgaagaaggaactgtcgccgcttctgggcctctgcattcaggtacgtagtagtgtctgccaggatgcggttctcaaacaagtgtatttgccaaaaataaaaaaataaaaaaaagtcatgacccaacaagggtttcaatcttctcctgcaggcgccacgcacattcgtcgtcagtcccagaggatcgtgttcccaaggaacagatctggcgcaacaagcctccatggcgcattggcagagcatcatcaagatcttgacaaattctctcgatgttctgaaatcaaattacctttttaacagccttctgctgcggcgtgagtgctgctcgttcagtaacggagagtacgtgaaggctgggctggatgagctagagcattggtgcttttggctgactgaagagtacgcaggatctgcatgggacgagctgaagcatatcaggcaggcagttaccctcttgatacttgacgacaagcatagccggagtctcgcggagatcacagacgacttctgcccagtgctgagcatgcagcaactgtaccggatcagcacgatgtactgcgacgacaagtttgggaccctgggcattccatcagaagtcgtctccagcatgcggaccaagatgatcgagggctcgtcgagcagcccgtcggcgcacgacgacatcaactcgttcctgctagacgatgacttcagcataccgttctccgtggatgacttcacgaagctgatagtgcacgtcgacgtagcggacatggatttgccaccgctcattcaggagagcagcggcggcggctccaaaatgggacattgaggagtgacaatatgcacgccttttttgtgtgtgttgcggtgatgtgcatagtgcgtgacatattgctctgagaccagggttttgtttttttcttcgtcgactggtcttccatttttctcccatatgactactacctgagtgagtagtgcctgtttgggtttgcgcgtgtgtatgattgtacagaactgagctgtggcatataaggtaaggaaagaaagcctgtgtgattcaattttttttatcaaaagagtgagtgatgcttgcaagtcaagctttcctttgccaagtgtgatctcagattctaactgctgtgacacctgtacttttgttgtttgtttgttttttttttttttttgaaagaagcctggcgctgatggcctccatttaactgttgagcatctgtcactcgctcaatagttaatggtctagagaaacattgtcgaccatctgtgtcactagaattgatgacttgttgtctatccttat

SEQ ID NO: 32922 - DNA, 583 bp, Zea Mays
cgcccaaatgctgccacccgatgaaacccaaggcgtataggtaaaacaaggtgtggtgaattcaattacttgtttcttacctcgaattggtgctcgggcgatgctgcccacggagttagatggattcgcggcacgcagagactccggggagcaattgagccgacaccggtgacgctccaagcccaataccgccaccccaacttcccatgaaccacggcgaagctctgggcggacacgtcggagatgcttcaccagcacagcggagattccccgcggcggcggcaacgagtggccaaagaggagcgctcggatttgagggaggatagaggggaggaacaggtcttgggaggcgcgacacgagagcctttatgggcggatagtcgcccgcggaggagatcccgggacgtgcgcggctgaagcggagctccgttgtgcggtgcgattttaacggaggtccaggatgacaggtgggacccacgtggaagcgaaagcatgcgcgcagtatcaccagcagcgaccgacagatgggccccgggcgtcggcaccactgcgcgaatccaacgcggccgacgactgggcccgg

SEQ ID NO: 32923 - DNA, 1993 bp, Zea Mays
tcgccacgtaacaactcccccaatccgtcccgtcggccggacgagcagggcccaagggcccaccttaccatggcgaccgccactgccgcccccgtccccgccggcggccacccgtaccgccgcgcccgcactcgctgcggcccaccgcgcctgcaccgcctgcgcttcccggccgcagcagcagccgcttcgtcttccctgcccgccccgtcgtccatgctgccaccgctgccagatggaggcgggcggctggtggcggagctggtgtgcgcgttcaacgagctcacggagcggatgggggaggacctggcgacgtcctcctcgtcgagcctgctcttccgtgtgctgaagctggcgctccccgccctccgcgacgtggagggcggccgggcactcgcacgcgcgctcgccgtcgccgcgaccctcgctgacctccagatggatgctgaagtcatatcagccggcatactaagagaagcattagatgcaggagctgtaagaatgagggatgtaaaaacacagattgggatcagcacagctcatttgctgcatgacagcttaaggattaagcatgctccttcgaagcttgacgtattggatgatgaaggtgcaagcacattgagaaggtttattctttcatactatgatatcagggcagtcatattggagcttggaatgaagcttgatatgatgagacaccttgattacctccctaagtatttgcagcagataaaatctctcgaagtcatgaagatatatgccccacttgcacatgctgttggagcggtggttgagaagccaagaaggtgactgcaaggctataataaatttgtacaaggagcagttgcttcaagcactgcaggctgataatgagttgaggaggattgcacaggacatctcaattcaagggaggtataaaagccgtttcagtactatgaagaagctagtaaaagatggacggaagccagaagaagttaaagacattctaggtttgagggtaatcttggagcctcggtgtggtggcaattcatctgattggggccctagggcttgccacaggacacatgaaattattcaagctatgtggaaggaaatcccgggtagaacaaaagattatataactcacccaaaacgaaatggttaccagagcttgcatgtggccatcgatgtcagtgaacctgggaaggtgaggccattaatggaggtacagatacgcaccaaggagatgcataggtttgctgttggtggagaggcatctcactctctctacaagggtggtcttactgatcctggagaggctaaaaggctcaagactattatgttggcggcagcggagttagcagctctgcgcctacgagacctaccaggcagtgaccacgtagttgggaactgcaagaacccggctttctgtcagcttgacaaaaatggggatgggagaatcagcatcgaggagctcactgaggtgatggaggatctaggtgctggaggcgaagacgcaacagagctcatgcatcttcttgatgcaaacagtgacggctccttgagctctgacgaattcgagtcattccagagacagatcgaagtgatgagaaacttggaggacgatgataaccactataggaagatcttgaaggagaagctgcacacgatcgacagtgcaggtctcatccatgtgtaccgcaaggagctcagtgacaaattgcttgtgggctgacctggcagccatcttattgttgttttgtatgtataccacactgagaggtgactccagcactgatctgtaaatagtcgttgaacgtacgtggtatccagcaatattacggtagtgaatttatagggtggattgcgagatcaagaaatgaaggtaaatatataagagattcaaagatttagaggtaaatatataagaggttcgaagatttagacaggttcgaaccatataacaccctatgtccttttagtgttcattgtctatatacaatgtgatcagatg

SEQ ID NO: 32924 - DNA, 198 bp, Zea Mays
atacctcaccgccgccgggcaatgccgtccgtctcgacgccgccgccttgtttcgccggggaagaacgaactgctgtggatgaaagaggaagaggaagagagagagagagagcgagagatggatgcagcgagatcgatggattgattattctgatttccggcagacgacccaagcaagacatgtgatgatcagttcat

SEQ ID NO: 32925 - DNA, 254 bp, Zea Mays
accagatcgagctaattcgggcacaaacccgtcgaggagagagagagtgagtgagtgagtcatgcgtcgccgggagtgccctagaccgtgtattggttgttcaagcgggggagccgcacaggaactcccacgtcgcattggacaagctattcgtggcatcatcagtcgagggacggtgatcgagcggtgggatttctcgccgggcagtggtggttggcgcggggttcccctcattggaggcagtagagtctacg

SEQ ID NO: 32926 - DNA, 283 bp, Zea Mays
gaacagcgtcagagctcgtaaacgcgaaccaggacgaggacgtacctcagcaaccgcgcttgagacgacgacgtccaactgggagaaggggagcgctccctccctctcccgctcttctgataggaattgcgttgacaagggcccgcgagacagtggtggggatacggaagctggtggcggcggcggcggcctggctggttccgtggccgcctttgcctccgtgtcgatcgtcaggctccctgcgtcaccgcgtgctcttgtgctctgaattttcttgctcctg

SEQ ID NO: 32927 - DNA, 2839 bp, Zea Mays
cctgggcaggtagctgaacggctgaaccagtggtggatgctgggtctgtggttggggaatttgtgttgtgtggatgggaggattttgaggtgcaccagctcacagtcgtcggtctgtcaggtgtttgtaggatctcctaggtgagcccctgctgcttggagacagccatggccaccggcgtggctccagctcctctcccacatgtcagagtgcatcatgggggcgtcgggttcaccaggagcgtcgattttgcgaaggtcttgtctgctcccggtgccggcacgatgagggcaagctcctctagaggcagggcgctcgtggcgaagagctctagtactggctcggagaccatggagctcgagccatcttcagaaggaagcccacttttagtacccaggcagaagtactgtgaatcaacacaccagacaaggaggaggaaaactcgaactgtgatggtggggaatgtgccacttggcagtgatcatcccataaggattcaaaccatgacgacttcagataccaaggatgttgcaaaaacagtagaggaggtgatgaggatagcagataaaggagctgatcttgttagaataacagtccagggtaggaaggaagctgatgcctgctttgagatcaagaacactctggttcagaagaattacaacattccactagtggccgatattcattttgctcctacggtagccctaagggtggcagaatgttttgacaaaattcgtgtgaacccaggaaattttgctgatcgtcgtgctcaatttgaaaagctggaatatactgacgacgactaccaaaaagagctagagcatattgagaaggtgttttctccattagttgagaaatgcaagcagtatggaagagcaatgcgaataggaacaaatcatggtagtctttctgaccgcataatgagctactatggtgattctccacggggaatggttgagtctgctttggaatttgctagaatatgtcggaagttggacttccacaactttgtattttcgatgaaagctagtaaccctgttatcatggtccaagcatatcgcctgcttgtggcagaaatgtataacctaggatgggattatcccttgcacttgggtgttacagaagctggagagggtgaagatggaaggatgaaatctgctattggcattgggacactgctaatggatggtttgggtgatacaatccgtgtctccctcacagaaccaccagaagaagagattgatccttgccaaaggttggcaaatcttgggacgcaggccgcaaaccttcaaattggggccccatttgaagaaaagcacaggcgttattttgatttccagcgtaggagtggtcaattgcctttgcagaaggagggtgaggaagttgactacagaaatgtcctgcatcgtgatggttctgtactgatgtcagtttccctggatcagttgaaggctcctgatctcctttataggtctcttgcagcaaagcttgtggttggcatgcctttcaaggatctggctactgtagattccattcttttgagggagctcccccctgtagaagatgctgaagctaggcttgcactcaaaagattagttgacatcagcatgggcgtactggcccccttatcggagcagttgacaaagccactcccacatgcaattgtacttgtcaacctcgacgaattgtcaagtggtgcacacaaacttttgccagaaggcactagactagctgtcactcttcgtggtgatgaatcatacgagcagctagatattcttaaggatgttgatgatataacaatgttgttacataatgttccatatggtgaggagaagacaggcagggtgcatgctgctaggaggttatttgagtacttacaggccaatggcttgaacttccctgtaattcatcacataaatttccctgaaaccattgacagagatggtcttgtcattggtgctggggccaacgttggtgctctcttagtcgatggtcttggtgatggtgtattccttgaagctgctgaccaggaatttgagtttctgagggacacatctttcaacttgctccaaggttgcaggatgcgcaacacaaaaactgaatatgtgtcttgtccttcctgcggccgaacactctttgaccttcaggaaatcagcgctgagattagagaaaagacctctcatctgccaggtgtctcgatcgctatcatgggctgtattgtcaatggaccaggagagatggctgatgccgattttgggtacgttggaggcgctcccggaaagatcgacctttacgtcggcaagaccgttgtgcagcgcgccatcgccatggaaggtgccactgacgccttgatccagctgatcaaggaccatggccgatgggtggatcctcctgccgaggagtagggctgtaggctgtagccaagtctgtagtttatatattctgtaaagcgaaacacgcaatgcagtaactgagcatacgatgtacatccctacacattttgtacatttattgagatctgagaaataaactagaaaccgtcggtgacggcatgtctgcagcaccccaaatgaagcacatacgatttacatattagtagtagcccatgtgagcaagacataatcctatacaatcttgaagtctgcattatatattttttccaacagaggtagcttagaaagtttttcgagcaatgcaattttgttcgttactttccgtttactttttcttttttttagcgttgagggttatataaatagatttataatacaaagagaaaaacggtcgtgattacacaacaccaaaatttttattgtggtcttgagagtttgtgatgatc

SEQ ID NO: 32928 - DNA, 1601 bp, Zea Mays
gtgataactcattatcactttcatgatggaaaaacataccgtttccgtgtccacaatgttggtgtctccacaagcttgaacttacggattcagaatcacaacatggcccttgttgaaacagaaggttcatacacgatgaagcagaattttactaatctcgacatccacgtgggccagtcttactcatttctggtcactatggatcagaacgcaagcagtgattattacatcgtggccagtgctaggtttgtgaacgaatcgctttggaccagagtcaccggtgttgcaattttgcaatattcaaattcaaagggaaaagcatctggtcctcttcctgatccaccaaatgatgagtatgacaaaactttttcaatgaaccaggcacgttccatcaggatgaacgtgagcactggtgctgctcgtccgaatcctcaaggatcatttcactatgggtctatcaatgtgagccaagtttacaagctgaggaatgaaccacctgttatcatcaatgggaagaaacggactacactgagtggtatctcttattccccacccgacactcctctaaggttggcagatctgtacgacaagaaggatgtctacacacttgacttccctacaatgccaattgatggaccgccagtgatcagaacatctgtcattaactccacatacaagaactttttggaaattgtatttcagaacaatgactcaactgtccagacctaccacattgatggatatgcattctgggttgtaggaatggactatggcgagtggactgagaatagccgtgggacttacaacaagtgggatggtgtttctcgttgcacgactcaggtgtttccgggagcatggactgctgtgatgctgtcacttgacagcccaggattttggaatgtacggacagaaaacctggacacgtggtatctgggtcaggagacttacatcagggtggtggatccaaatggaggctataatgttactgagatggtggctccagacaacatgctctactgtggcctcctcaaggataaacagaaggctcagaagcctcatggttcgaggtcatcagcctctgcagcaaaactgaactatcatgtgctcgcggctttggtctctttggtggtagccttggtgttgggccattgacaagaactgcctccagcttgtggtcagctgctgtttgcaggttgattaggcgtttgacagaaatactgttgagtaggtcagtcgaattcgtaggttccattcatgatttgtctggcaattgagaaaaaaaaatgctgtgccattgcgcatcttcgtccatcggaattgattaacatgctgaagaactgtgcagtagcttgagattgagcacaaatttgaagttgtcggcagctggcacccacaagcaaggcgtgtgctgtgctgcctgagtgtgttttcttgatcagtgaatttgtcgagagttggatattgttggttgtatcccatgcatcccattgcaattaccaaaccatggacaatcaaaggcactactgtacacaacagttggtgttactgtgtatctcatcagtttgagcctgttggattcaaaagccaattgttagctggct

SEQ ID NO: 32929 - DNA, 628 bp, Zea Mays
ccggaatgctactgaactacacttctgacatccgtatataaaatttcgacagcatctcctttgcaaaatagcataaaggagggggcaacagtgtataaacatgtatcatgacaaaaaaaacatactaagtattattaaacggctagcaaaggaaagttaaacatacgacatgaactgaattaaccaatgcgcatgactagtaaaaaaacaaacttcctttgacatcaagtttctaattaaatcatggatgcgcttgggcagccttaatatgagagtgaaagtggacgtgctgctactcccctcattcccaacatatatcaagtacctgcattgagtaatgcaagagtgagatgacacatctcagcaagtaaaataataacaaaccgtttaaccacataagaacattgttttaccaccatttggtttcgcaaccttcttattacaaaggtgcagcacgaatacaacgtacaacacacctagttaccacacctcgcaggtagaaaccacaatagtaacatagtaatgtcacacttcatatatacctcatgagtgcaaatgtctgcaaatgcaaggatgacttctgccttcatacctctaaggatatgaagccgcatcgtacccctcctcg

SEQ ID NO: 32930 - DNA, 3860 bp, Zea Mays
atgtgttctgctactccctgttttagtgctcaataacactaggacaggattgtgaattactaaaccttggtgataggccagagaaacttattgtgacagagattgcagtgccacctgttcctatacggccttctgttgttgttggtaatagtagaacaagcaacgaagacagcattacagttattttgaagagcattgttaatacaaactccatccttaaggagacccttcatactgggggtccattcaccaagtgctttgattgctggcaataccttcaacttcaagttgttgaatatgtgaatagtgatgccccttctcttcctgagtcacaacatcggggccttgttcaacgactcaaagggaagactggacgatttcgtggcaatttgtccggaaaacgtactgagtacacaggaagaaccgtcatatctcctgatccaaatttgaaaataacagaggtggctattcctgtgttgatggctcgagtcttgacttatcctgaaagggtttcaaactataacattgagaagctgagacaatgtatacgaaatggaccattcaaatatccaggggctaattttgttacacaacctgatggcatgaagcagagcttaaagtatggtgatagaaggattactgctcgggatttaaagtgtggatgtatagttgaaagacatttagaagatggagatgttgtcctctttaatagacagccgagcctgcatagaatgtcaattatgtgtcacagggcaaggataatgccatggagaacactcagatttaatgagtctgtttgcaacccttacaatgctgattttgacggagatgaaatgaatttgcatgtccctcagacagaggaagctcgcactgaagcgcttatgctcatgggggttcagaataatttatgtactcctaagaatgatcttcctttactcttttgtgctcataccttggtgatggaatggagaacattgatttgccaacaccagccttgattaaacctgttgagctttggactggtaaacaactatttagtgtgttagtccgacctaatgcgcacacaaaggtgtttctgaatcttgctgttcaagaaaaaatttattcaaagaaaaagggaaaaaaagaggggggagaggaggtaaaggaaacaatgtgtggaagggaaacaatgtgtcccaatgatggttatgtttatttccgaaatagtgaactgttatctggacaagtagggaaggccactttaggtaatgggaacaaggatggcctttactctgttcttttaagagattataattctcatgctgcagcaagctgtatgaatcgtttggcaaaatttagtgcaagatttatagggaaccatggtttttccattggtgtggacgatgtccaaccaggagaacatctaaatcggcaaaagaaaaaggaaatagacggagggtacaaaaaatgccatgatcttatttctttgtttgcgaaaggcgcgctcgcattgcatcctggttgcaacgcagcccaaacgctggagcataacatcactggtgtgttaaatgaaatcagatcaattgctggaaatgtgtgcatggatacgcttcactggaggaacagcccattgattatgtctcagtgtggttccaaaggttctccaatcaatatcagtcagatggttgcatgtgttggacagcaatcagttggagggcgtcgtgccccagatggttttctaaacagaactcttcctcactttcctataaattcaaagacccctgcagctaaaggttttgttgctaattcattctatactggtttgactgctactgagtttttcttccacacaatgggtggacgagaaggtcttgttgacacggcggtcaaaacagcagaaactggatatatgtcccgcagattgatgaaaggcttggaagatctctcagttttctatgatcagacagttcgaaatgctagcggtggtatagttcaatttttgtatggagatgatggcatggatcctgcaaagatggaaggaaaagatggcatgcccttaaatttggatcaattgtttatgaaagtcatggccacatgtcctcaaaggggatcagatacattatctccagtgggcatcaaacagatgttagaggataagttcttgcagcatgacacctcatctgatggtggctgtagtgcagagttcaagaaaaacttaactgaattccttgataaacgtatagaattaatgaaatgcacaagaagggcactccatctacatgaggatcatgtagaaaagaaagattcttgcctagaagaatctattgctgctattatatctggtatatctgcaaaacaacttcaggttttcttggacacttgcttatctcgttatcagtcaaagaagattgaagcaggagcatctattggagcaattggagctcaaagtattggggagccagggactcagatgacactgaaaacatttcattttgcgggagtagctagcatgaatgttactcttggtgttcctcgaatcaaggaaattatcaatgctgctaaaaagataagcacacctattatcaccgctcagcttttgtcaaggaaagatgtgctttctgcgcgcattgtgaaaggatctatggagaaagcagtgcttggcgaggttgcagcaaccattcagactgtcctgaaatcaagtctgccaaacttggttgtcaaacttgatatgcaacttatagaaactctccacatgggaatatctgctgattctgtgaagctgtcaattttgaatcatccaaagcttaagttaaaatctgagcatgtccgagtcattgatagagccaagttgcgaatatatccagctggaactgacaagctcaaacttcagcttgaactgcataacctcaaatccatccttccaaaagtgattgtgaagggcattccaactgttgaaagggttgttattgatgaagttaaagtcaacaacgcgacagaaagataccaattgttggttgaaggaacaaacctcctggcagtcatgggtaccccaggagttgatgctaggaagacgaaaagtaatcacatcatggaaacgaaccaaacacttggaattgaagctgctaggagatctattattgatgagattcaatacacaatgaaaagtcatggcatgaacattgatcggagacatatgatgctcttggcagatttaatgacatacaagggtgaaattctcggcattactagatacggcattgcaaagatgaaaagcagtgtgctgatgcttgcttcatttgagaaaaccgcagaacatctattcaatgcctcatacagtggtcgtcaggatcagatagagggagttagtgaatgcattatcatgggcattcccatgcagctcggtaccggtattctcaaagtcaggcaaaggctcgaccatgtgcctgaattcaagtaccaaccggacccgatactgtcgtgatacatacatgtggactgaagctggaactctgtacatatatatagctgggtcatacatgcatagcgtagcgtagcctagggcaaccctggcggcttgtcatttctccggtgaacatctaactagtctcgttccatctccatgaggcagactctaggtcaacaactccctcttcggctgcatcggcaaatgcgagagtaaaattgtggcaaacacttgctacatcttctaggcagtggtacatgatcgtgttacatatctctgcaggctaatgaagcctgggaagaatcattgtttttttcttgactagataaatatctgtgttgtaaaggaaaaataataatacaatgagaattaagaattacacgcgtgtttgccaaaccacgatacttcagtgaga

SEQ ID NO: 32931 - DNA, 882 bp, Zea Mays
gaaagtctccttggaaacacatgctagctaatattgttatattctttctgttttctatacatagcttttgctgtaggcactgaccctctggtacttatttcacagatgttacttgatgttgtgtctatatacaataaggtcactgatcttactgaaaggaagcaggctgttaagattagcatcagtggagtgcagagagtactacccctctatgaatgatgcatgtacagttctggagtgtgtatggataaaagataaattcgttttgcatgaaaaggttaaagatatctctcaggagacccaagttgagaatcagaagtgccgcgatcctgaatctacagtccagtatgaaacgcttgcactgattagtgaaggttaaaatgctttatcttctatttgtcacaataaatgcatgatgatccattgatcttgaatttttttttgttgcctttgtcagaattagctgacatgcccatgaatcatgagaatccttggtgctttgttgctgatttggtttgaaaaacaagcactttgtagtgtattgcattgttaagagcatagctcaaattaaatattaagatattttgaattgtttttctatacccatggttcccaagctagctacgaactaccaaggcgagagtatcacttttgacgttagtccatcaatctttggaagtatgtcacattagagtgtatattaaacagttacagttcacacattatggcatgatttatggtgatttggcagacgcgtgttctaatgctaacctcacaacctacttgaatgataagctaacatggttctgactgacacgcaccaggttttgcatgttactacaggtatatatggagcaacatttgattagttatttatataac

SEQ ID NO: 32932 - DNA, 3724 bp, Zea Mays
gccatttccattctcctttcatccattgcgagtttgcgactgcgaacacgcgcgcaaaaaatattgacgaaaactggaggggtaaaggggaaaaggcgacggccgcctgggccctggaggagcgagaaggcggaagaaggggagcggcagtcgcaggccgcagctcgttgatggtggttagggtttcgccgcccgcacgctcgacctgctgaagaatcgcccccctgttgaagaggtctgcgcctcgccctataaggctccggggaagaggagatagacatcagtggaccccggcgcgcggctgatggcggagcaggagcggagggacgcggaggctgggggcgatgccgcgggcgcagcggtggcgtctcacaccagcagcatgcagcgtgtcaaagtataccgtttggctgatggtgggaagtgggacgatcaaggaacaggtcatgtttctattgattacattgagggttcgaaagaactcggtttgactgttttagatgaagatgacaatgagacgctacttatgcacaacatcacatctgatgatatttacagaaaacaagaagaaacaatcatttcatggagagatcgtgaagcagcgacagacttagcactaagctttcaggaagctgcaggatgctcctacatatgggaacatatatgtgaaattcagagaaaccttcagttcagtaaccttggtgctccggaagttggtcgtcgtcaatcatcagaatctctagaagcctctagaataatgcattcaaatgatgattcattccgctctgctaacggtgaattcagggaacttcctcctgttgagctgtctaatcttccttttattttgaagactgtattggagggtggcattacagatcagatccacatggcagagttgataacacaagatcgggactttttcccaaagctagtggacattttcagaatgtgcgaggatttagagaacatagatgatcttcacatgattttcaaattggtcaagggaataatattgttgaacagtccgtcaatctttgacaagattttctctgatgagtttatccttgacataataggtgcccttgaatatgatccagaggttccaagagtgcaaaagcaccgtgcttttctaaaagatcatgtagttttcaaagaggccatacatattgaaaatgtttctgttatttcgaagattcatcaaacatacagaataggctatcttaaggatgttattctgccacgaatattggatgatgccactctaggaagttttaacacaatgatacattcaaataatgcttctgttatttccatgctaaaggatgacacaccctttataagacaactatttgctaggatgaggtcatcagatatttctatggaatcaaaacgagaattggttctgttcttgcatgaattttgcacacttagcaagagtctaccagttgttcagcaactgcgactgtttcgggatctttcaggtgaaggcgttttcgaaataatttctgatgtgttgcagagtcaagatagaaaaatcgtttcagctgggacagatatgctgatactttttcttaatcaggaccctaacctattgaggtcatatattgttcagcaagaaggaaattctcttctaggacttctggttaaaggcatggtaactgacttcggtgaggaaatgcactgccagtttctagaaatcttgcgcatattgatggattctttcactatgtctggagcacatcatcctcttgtcccccgaggagcttgtctcgaccaagatctaactctgtacgtgttggtggaaacgctgaaggacatcatatcaagcctgagattttgttaaatgtttgtgaactactgtgcttttgtgtagttcatcatccctacagaattaagtgcaattttcttatgaataatgctatcgagaaaatccttacattgactcaacggagggagaagtttttggttgtagcagctgttaggtttatgcgtactattatatccagaaatgatgagcatctcattcgccatgttgtgaagttcaacttgttgaaaccaataattgatatctttgttgacaatggggagaggtacaacatgctacattcaggagtacttgaattgttggaatacatacgaaaggaaaatataaaagctctcactatctatgttattgagtctttctggtatgaacttgtcaagtttgaacacttcgggagtattcaggccttcaaactcaagtatcaacagtacgtggagagtgctgaaccaatgttaaatgcgagtgtgcctaacatgagaaagaaggcagaacaaagaggtctagagaaggaagaggaagactacttcaataaggatagtgatgaagaagattcaggctccggccggcgggataaacatgcacagaaccagcatagcaagcctaagcccaaggtccctaatggaagtgaagctgatgacactgatggcgcctctagacctaaatctgctggacttgtggactatgacgatgatgacgatgaagacttcaatccaccaccaatggagccttctacgcctgcagaggatgatgtgcccttaaacatatccccggtgaagcggaagccagtggatgtgaaacatgcagatggggagggtcgcaggaggcaaaaaatagaaaccagaattagttgtgctaaaattgctgctgttactagtaccattattaagcacacagatctacaaaacaagcatgcttgctacttgcctacatcagccgcgccaagtactgaacccaatggtgtttttagggagcgtggcactaactctgaggagcatcaacattctgtagagaacacagaaacttcacgacaagctggtggtgattgtataaaagacgggggcagtatgtctcccgagaaggctgtaaatacgacaacgacaagtgattcggagccttattcagtaagatgactgactactacacagctggtttgtccctgtacccaacctgttctcttgccaacaggaaggaatcggaatgtgtttggctccaaaaattcattgatatcaagctggaagcatgattggaggtgacatagattgcagctacctttacatctcaagtaaaattccagttacccctttttgagcctgtaaagttaattttccacaaggaaagatctgacgaacatcagaattgggatggctgtagattggaacattgaatgggccttgctcctgctgctatgctcgctattgtatctcttttatgagctaatggagtagcagtgaatgtgtgccttcaacttcactgttttctctccagtcattgactctgatgttactgctgtaaaacaagtaggactaaggcatagtttcagttgaatagcgtttttgccggattctgctgactcacttatacgactgtaatttgatggttcatagttttggctggacatgctgtcttggataattattcaagccttgtggtagaatagttctttaggccaaagatgtgctaggtagaatttcgaaagtgaataatgttggatgtattgggttaaggatggcaggtgtacatgatatcctactccagaacaggttcgctaaatactgtggtacaatcaaaaaacattcttgctcttgttaggattgtaatatctttcactaaattacacatgtctgcaaaacagattcatgagatgtgaaaacaatacacaggtcatggctactcaatctacga

SEQ ID NO: 32933 - DNA, 2602 bp, Zea Mays
ttaccattatgccttagctctagatgttgttcttgttacccatggtggcagcatcaactgaacgcatctctcacccccctgttgctgaacccagagagtgtgactggtataatcttgagaaatctaaacgtgtgaagtcatttcggtgtggagaatatgatgaatgtatagaaaaagccaaggctctagctcgccagcaaaagaggacacatgctgaagggagatatgttcgcagagaggatgccattttgcatgcccttgaaattgaaaggtcccatttttcaaataactgtgatgattttgaagaggagaccggcaatgatttgtgtgcatcccagaatatgtgttctgcaaaatctataaatataaatgggctcagcaaaaaatctcgtggtgcaaggagtttgtatgatacagaagaaaattcagctcaagagtcatgtcaaacattgacactttataaaaagccacaaaatttatcctcttcgagcactaggtatgcatcgtcaaaaaggaagaagcggaagggacataaaaatcatgaggatgatacagttcaaggattccagcgtatgagagatcttagggagattggaacaaacaatgttcccaagcagaagtctggtgcaggaattgtttcagatgtacctcttcttgaaagtggaccaagctttgactatgatttgtccagtgccaatgggataaaaaagggtaagcagtctcagacatccataaaaaagaaacggtccaatatcgggcaatcctgtgatagtttgagtaagaaagataggcatcaccctctatcaatgttatgtgaagattcagaagtgtctggaacttattatcattgggaccgttcaggccagtcttctagtgagtacctaggaggacagatacccaatttgtttgaatcaagtagggcaaaaactagtctttcaactgatgtaaataattgttcgtatagctcaggcacttcaagtttggagatattattagatacatcacacatcaaacataaaggttcggtaaatgctgttactctcaaggttgctgacccatgcacgactagaattctcaatgatgactgccctgattgtgatgagtttcttgctgccgatactttggagggtgatgttctggaggaaggccatttggatacttatggatcttgtgcatccataaaggatcaaatttcaaaactgggtaatcaaagtactggctgtgccataggtggcacaccctcaacttggcataatagaaattccgagaagaaaagcataacgtctgtcaacttgattcctaaagagagccacaagagggataaaaattcactgttgcaatgtgaagggattataaaatcggaaggtactatccttcggcctgctgaacttgaggataatacaaaacataccactcctgagcatgacgagtcctctgaaactataagcaaccattcaaactctgagaagggcacaaaatcattacccaattactttccacttcaagtactaccaccacctggacagcaacctgatctgaaacttccaagatgccctgtaacgagtccaaccaagagaacgagtccgaccaagagagcacacgcaggttatagattatatgatgttgagctgactgtccaaagaagctacaagggtcatcatgtgccccttgtttccctcatcagtaaatggacaggtaaaccaattgtggggtatcctgtcactgtggaggttttggaggatagtcgtcccacaacaagtagaaatgagcatcgcccgccgatgggtagtctcggctccttaccaaagagcagagttgcagaaccaaggcaagcaagatcttcacccgcatcacgatcaaaatcaaaacccagtggacgtaaaaaggcctcagaacatgatttggacaagtcttggcggccccatatcaagaaaccagcatcttcgccgaggaaaatgcggaggctgtcatctttcgccggcagccggagagagagtgcagaccagaagcctgtagttgtgaaggctggcggaccagcagtcgcgtgtgtcccgcttcgacttgttttgagtaggatcaatgaagcactaagcttcccgttgagacaagaaaaccccacctgaggctgtggcagttttgcattgctgagatagaatgtgggcaggcatatacatttgctaggttttctttgtacattagttaccatattatctgaaagcgtattgcctggcatatttatatcagtatattatgatgtaatctgtagccacactaggcaattacgacttacccaccgtgagatatgggccgaacatccaatggtgggaggaaataaaggggcatcagttgctgtgggctgtggcttcatctgacagtggaagcaaaaatggcagcagacctgttcaccataccatacatcatacaaaattttccccgtatttgctggcaacttttagttgatccaggcaagttgctgtatgtaatcagtgattgcaaggattgcagggcttcgtgcaactacttgcagctttgatttttttgtcacatcgcataaggtcgaggtatccaaactttggcatgggagagcacttgtgcatttgca

SEQ ID NO: 32934 - DNA, 2542 bp, Zea Mays
ttcgtagctgctctgttccggtcaaactcggcggcctccgaaatgggatcgaacccaacacggcaacacgccgaagcaacgcatgaaccaccagtcaccggcgacgcgggagggaaagtctccatttcgagaaccttcctgtacactctagaatccccaccctcacgaatggatccaagttccccacgacgtgcccgtgtcgacggccgtgacgtgccggaacattctagaacccctcccggccacacaaacctttaaatccagtcccacatcgtctccttcctcctcgtccacccattcctcgttcttccttaattcctcatttcctccacgtacgcgtgcatactctgcgagtccaggaggtattttcccccttcttcacgatactctcgacgagagcgtctccatggccggaaaaggagacgggccggcgatcggcatcgacctcggtacgacctactcgtgcgtcggggtgtggcagcatgaccgagtcgagatcatcgccaacgaccagggcaaccgtacaacgccgtcttatgtcgcgttcaccgattcggagaggctcgtcggcgacgccgccaagaaccaggtcgccatgaaccccatcaacaccgtcttcgacgcgaagcggctcatcggccggcgcttctctgacgcgtcggtgcagagtgacgccaagctatggcctttcaaggtgatcccgggctccggcgacaagcccatgatcggggtgcagttcaggggcgaggagaaacagttctcggccgaggagatcagctccatgatcctgaacaagatgaaggagacggccgaggcttacctcggcaccaccatcaagaacgctgtcgtcaccgtcccggcctacttcaacgactcccagcgccaggccaccaaggacgccggcgtcatctccggcctcaacgtcatgcgcatcatcaacgagcccaccgccgcggccatcgcatacgggctcgacaagaagtcgagcagcgacggcgagaagaacgtcctcatcttcgacctcggcggcggtacctttgacgtctcgctcctcaccatcgaggagggcatctttgaggtcaaggccaccgccggcgatacccacctgggaggcgaggacttcgacaaccggctcgtgaaccacttcgtccaggagttcaagaggaagaacaagaaggacatcactggcaaccccagggcgctccggcggctgaggaccgcctgcgagagggctaagaggacgctctcctccaccgcccaaaccaccatcgagatcgactcgctctatgagggcatcgacttctacacgaccatcacccgtgcccggttcgaggagctcaacatggacctcttccgcaagtgcatggagcccgtggagaagtgcctccgcgacgccaagatggacaagagcagcgtgcacgacgtcgttctcgtgggcggctccactcgcatcccccgcgtgcagcagctgctccaggacttcttcaacggcaaggagctgtgcaagagcatcaacccagacgaggctgtcgcgtacggcgcggccgtccaggccgccatcctcactggcgagggcaacgagaaggaacaccaccatcccgacaaagaaggagcaggtcttctccacttactccgacaaccagcccggcgtgctcatccaggtgtacgaaggtgagagggccaggaccaaagacaacaatctgctcggcaagttcgagctctctggcatccctccggcgcccaggggcgtcccccagatcaccgtgtgtttcgacatggacgcgaacggcatcctcaacgtgtcagctgaggacaagacaaccggccagaagaataagatcacgatcaccaacgataagggccggctaagtaaggaggagatcgagaagatggtgcaggaggcagagaagtacaaggccgaggacgaggaacaccagaagaaggtgaacgccaagaacacgctcgagaactacgcctacaatatgcgcaacaccatcagagacgacaagatcgcctccaagctaccggaggacgacaagaaaaagatcgatgacgccgtcgagggggccatcaattggctcgacaacaaccagctcgccgaggttgatgagtttgaggacaagatgaaggagctggagggcatctgcaaccccatcatcgcgaagatgtatcagggcgccgctggtcctgacatggccggtggcatggatcaggatgcttcgccggctggtggcagcggtgctggacccaagatcgaagaagtcgactaaatgaggaaattctgatatatgtattttttgcttaaataattgcgtcaattacaaagtggatcttattattatttttatgcagtttttttggccatacacagggccccaagttcatgtttaagttcatttttgctagtacgctggatataaacagtgattagccctgcatgtattggcggtattatatcttcgaaagctattttagatggctaaaaccctttattaacctatatgcaatacaatgaataactaggatttcagaaaaaaaaaaa

SEQ ID NO: 32935 - DNA, 1758 bp, Zea Mays
tgcgagcgcgaggcaagaggagggggagaaggcgacgcggcgcgatcatgcgagcgacggcgggcgtttgagctaacccgcgccaccccccttcctcggagtcggagcgagtcgaggaacggctcgtctgcctctcccgttctccttcctctcctccccagaagatccgatccatcatcgaggactcgccgggaagaatcaaggatatatagataatatacaaacaaaggttcctccagagcccagaggagggaagtcaccggccgtcggcggggaggagatgtcggacggcgcgggctcccggacgggcgtcgctggcgcgctgggcctctcggtcacctcgtcggtggccatcgtcatctgcaacaagtacctcatcagcactctaggcttcttcttcgcgacgacgctgacgagctggcacctcatggtgaccttcttcacgctgtacgttgcgcagcggctgcgcttcttcgagccaaagccgatcgacgcgcgcaccgtcatctccttcggcctgctcaacggcatctccattggcctcctcaacctctgcctcgggttcaactctgttggcttctaccagatgaccaagctggccatcatacccttcaccatagtcttggaaaccctctttctgagcaagaagttcagagcatcaaggcctccctcatggttctgctgctgggagtcgggatcgcgtcggtcacggatctccagctcaacctcctcggctcgatcatcgccgtgctcaccatcgctgcgacatgcgtcgggcagattctgaccaaccaaatccagaggaggctgaaggtttcgtcgacgcagctgctgtaccagtcgtcgccgtaccagtccgcggtgctgctcgtcaccgggcctttcgtggacaagctcctcaccaagcgtgacgtcttcgcgttcagctacaccacccaagtcgtggtgttcatcctgctgtcgtgctcgatcgcggtgtgcgtaaacttcagcacgttcctggtgatcggcacgacgtcgcccgtgacgtaccaggtgctgggccacctcaagacgtgtttggtgctctccttcggctacatcatcctcaaagaccccttcagcgcgcgcaacgtggtgggcatcctcatcgccatcttcggcatgggcctctactcctactactccgtcgtcgagagcaggaagaagaccgaggacgctagctcgctgccggtcgccgcgcagatgagcgagaaggactcggcgccactcctcggcgccaagagctcgccgcggacagagaacaaggccgaggaaaccttcgactacatgccgaggacggccaagagcgcgttcaccggccggtgagcgcgtagcttgtaaggagtacgtatctttctagagttgtgggtagacgacgagcaacaaggcgggaatgtgttagtgaaagatgtaacggcggcaagtgacattccaattatcatttttgcgatttctcctctagggtggtctgcgtggtcatggtttaccagagcataaacagcagaatgtgtggtctactggtcttgaccgagcttgaaatagtagattggattggtgataatacaactatacaagacgtgcgaaatgtgtaaggtttgtgcccgttaggccatgttcgggtggggattagaggaaattaaaattccttctgttcaattttaaataaaaaataatttaatctcctccaatcccctcaatttattcctagttgaacaacccctaaagtcttgttttgtt

SEQ ID NO: 32936 - DNA, 2409 bp, Zea Mays
gcatccgcggcccgcccccacctccgctctccgccagcgatatatatatggccagtggcctcgacctgccacctcgggacggatagctaatcatcttcagccgtagcagcagcaggagcagccgagcagagtcaaccacgcaccaaccaaccaggttcacaagcacctgccgcgggatcggggagggtcatcgtcatcgcgatgggcgtgctcttctcatgccccgtggaggaggaggaggacgtgccggcaggagctgcagctgcccttccggcgccgtgcaatgccgccgtggagccgccggccctcaagccgtcgctgcagggctccgggaagctccggttcgagcgctcgctcggcagcctgatccggcgggagcagcagagccccagcgcgcgcctgcacgtggacgtcgacgtcgacgtcgacgccgccgccaagcaggtccccgccacgtccaccgtagcgcccgtgccgccggtcatgcccagggagctcgcgcggaccaggttcgccgacgccgcgcccgcgcccgcgccggagagccccaagcacgaggcggcggccgtcacggtgcagaaggtgtacaagagcttccgcacgcgccgccgcctcgccgactgcgccgtcgtcgtcgagcagagctggtgggagctgctggacttcgcgctgctcaggcggagctccgtctccttcttcgacatcgagaggcaggagtcggcggtgtccaagtgggcgagggcaagaaccagagctgccaaggttggcaaagggctgtccaaggatgacaaggcccagaagcttgcgctgcagcactggctcgaagctattgacccgcgccaccggtacggacataacctccactactactacgactgctggctgcggtgcgagagcaaggagcccttcttctactggctggacgttggagaaggcaaggaaatcaatctcgagcggtgtccgcggttgaagcttctaagccagtgcatcaagtaccttggtccgaaagaaagagaagagtatgaggttgtgatcgaggatggcaagttcatgttcaagaaaagcaggcaaatcctagacacgtccgatggaccaagagattccaagtggatctttgttctaagtacatccaagaatctgtacgttggacagaagaaaaagggcacatttcagcattcgagcttcctcgctggaggagctacatctgctgctggtcgactagttgtggaagatgggatcctcaaggctatttggccacacagcgggcactaccgcccaacggaagagaacttccaggaattccagagcttcctcaaagacaacaatgtcgacctcactgatgtcaagatgagcccagatgaagacgacgaggagttttggagcaggctcagaagcatctcttccgactgctgcgccgtcgctgacaaacccgaagaagatcaacaggccgcagctcaagaaaccagcaacagttgccaggcacctcaagtcactgaatcgaccacacctgacgaagtctctccctccccgtcccagcaggaagaaaccagcaagagtctcagtcccactgcaactgtcacgaggcaagattcatcagaggacgccgagacctcaacgacaagccaccgtgccctgttcgaagatggtcaggaggaggaccacgctgccgcggccaccgccgccgacgacaatacagccgtgccgagggagaagatcctgcagaggatcagctccaagaaggagaccaagtcgtaccagctggggaagcaggtgtcgttcaagtggaccacgggcgcggggccccggatcgtgtgcgtccgtgactacccgtcggagctccagctccgggcactggagcaggtgcacctgtctccgcggagcggcggcgccgccgcagccgcaggggccggtagggcggcctcgtcccggttcgcctcgccgcagcggtgcggcagcccggttgcggcgagagggcgccgcgagcctctggcgtcggcggggtgcggcagggcggcctcgtcacggttcgcgtcgccgcagcggtccagcagcccgatggcgagagcgcgctgcgagcagctgacgccgagggaggcgttccggacgcacctgatggccagaggttaaccggatcggatcagccattcagcaaagcagccgatggatggagtcatggagagacactttctcttcttcctttatcccctcttgtgcataggagaaagaaaaagaataaagatgggagtgaaaaattgcttcccgtgttagatcttgtagagcgccacacacacacacacgtgaatacgtaatcaaatacagaattctttcattctttggtaccatgatgaaataatgcaggctctaattctacgcgaatacataatcaatacaaaattctctaatttttcg

SEQ ID NO: 32937 - DNA, 2523 bp, Zea Mays
ccgccactaccctgctccctcccccaagccgccgccactccttctccctccccctttctctctcttctctctctaccgcccacctctctccacctcctctccccaagccgcgccaccaggagtgcagcagccgctagaagctgccatccgcccgccaggagttcagtcaatctcctgtctcctgagagccgccgcccgccgagtcccgctcgccgctcggtcgctcccgtgaggcgctcgatctcctcagcgccgcgcccacccagccacggtggagccacccttcgtcccgtcgtccggcggccggccctcaatccctcacgccctagcttctctgccatttccggtcagcccctcacgccctagctttcctatcaggcgctcggtcgctccctttgccacgcgctcctagcttctctggtcggctcttcctccgccatttccggttggatcctcctatgtgcagtgctcgacaaacggcaccagcgccgctgggtactgtcaccgcttcggtcgccggagcccggagatgtaaatgcgctggagttttcatgctgtcgctggaggaattgaggaagaaagtttgcctcgtggccaatgcaattgatgccctggaactgccgaagggatctgcaattgctattgacatgcctatggatgttacctaatttcaggatgctaaggtaataatgcttggactggtacccagcatcgttcgtacttggaagaatacggactgtacagctggactagactggtcctccatccggtaattttttaattgctcaactatccagaccttttgtcttaactttgcaagttacacatatagtatggtatgcagtttctattgaccatattcattatatacagatgctttagctcctctagggaggcatccagtgtggattttgtgttaaaggataggttggaaaccacacgacagcaatatctgaatttcttatttgatgatgctcagatacataattttttgactgagccttgatattctcagaaggtgatgtcagtcttttcctaagagaagtaagtagtgttactccatccttactgctcggatgtcggatcattgactaccactgaggtcagcactggcattttttttaacgtagagctctgcagttcttacgctgacaccttataagtgaaagtgcaatatagaggccttgtgactatcttttcgtcagcaagagaacaacatcgatcttggtagttcttagttgcccctgtgtttcggaagtgttgtgtcagattattatatacccatttctagaaataaccaattgctcatattgcttacttagacaaataagcaatcttgaatctggaattttacagtgtacctgaactatcaactcccttcaacaaacttttttgtatggaacaggagcagcagcaccccccccccccccccgcctagtgaaaatattatgaacagaaaaagaacatcaaacagcaaagaaagaaaccaaaaagttcaacaaacattgcttatcatcaccagcaattattatccttattcctcctaatcagaaatcagctttaacgacctgtttggttgattgtctggtacttctctcaaaatatttatttgatttagctttaggagctatcttgtttccctatgcagggtcttcatttaaacttcctcaggattttatcagtatatattttacttttgcagtttaaacaatggaatgtagcatttatcggttccagctttcaatcttgcaaaatagaagcactgacagcgtgcttgttgcatgcattacctgtaataatgctccatttgtgttctttatttgtttagccactctaatcgacactgcccgtttatttacataggaacgtcaatcatatggatgcttcttcagtggaattatcatgtgaatccccatagtgcccaagctgtgaagcagtcatgattgatgcttgggctgttagctttatgtggtccagggggaggaaggataccttagaaactatgcagttgaagacccaagatttgaacgacactattgtcacaccgaaagtgtgttcgatgaaatgcctccaacatccggaggtttctatttgtgaaagtttgcaggctaagacaaatgatagctattcaaggagctagaggctgctcaacataaagcatcaacagcaacctctggaacagctgaaaatgctctactggaagctaagtcagtgactgatcttaaatctaaagatttggagaagaagaaaagtgagctttgttcactgatacaagaagttggagtgcttttgtgaaggcttttgcgaatcacttgaagtgttagtacttttgtgaatgattttgtaaagtgtttgcaaatatgtgcaaaacataataacatgtgtaggttttgtgaatgattttgttgtggtgcttgttgatggtttatgtgatgtggatctatcattgtgcaatactaattaaatttgtatatctatgtgattatctgtataaaaattggtgatttgtgatgcttttgtata

SEQ ID NO: 32938 - DNA, 2667 bp, Zea Mays
ccttagcatctatagttggtttagttggtgagagaagagaggacagctgcacaggaacagcaaagcagaccccaccaccgcacgcacatacatacgtacacgcactccttcaccagcagtgtacttccctcccttgtatgcctgcctctgccagcgcgttgtcggcgaggggactgcccccgccgccgccgctcgcgtcggctgccgtcagcccgtcacccacccacgcgacctccggtgatggcagaggccgacctcacgctgcacgacgccggcggcggcgccagggacaagccggaccggaaagccgacgtcttcgcggatcttggctcgccggtctcgccgctgcgcctgcgcccggcagcgacgccctccacctcgtcctcctcgtccggctccgccaagtcgccggcgcccggtaatgcggccgcggggaggggaggccgggggaaccactcgggcgagctggcgcaggagagcaccaacccgcctggccaccgtcgcgccggatctggcccgctcattttctccggtgccagcagcagcaccaccgccagctcgccgctcaccaatgcgctccccaccggcaacatctgccgcgtcgccggggcggcggcggcggcagcagccacgcagccgccgcgcgctcgcccggccgtgctcggatccggtaccggccactacggccacggcagcatcatgcgccgcggcgggggagcgactcccgcgaggaccagcggtgacgcggccccgctgctccacggccacggcagcaattcctcgaggtcgaggtccccggcgagctgccctgcgccagcgccgccggccaccagcggtggcctgcaggagattactcgcgcggggaacgagtggtacaagaagggccgccacgccgacgcgctgcgccactacgaccgtgccgtggcgctgtgccccgacagcgccgcgtgccgcggcaaccgcgccgccgcgctcatcgggctcgggcgcctagcagaagcgttccgcgagtgtgaggaggccgtccgcctcgatccggccagcggccgcgcgcacggccgcctcgccggcttatgcctcaggcttgggatggttgagaaggcaaagacgcacttcacactggctggaagtgcaaaccagtctgatccggctgagtggcagaagctgcatgaggtagagatccatcaaggcagatgcatggatgcaaggaaaattggagactggaagagtgcactcagggaagccgacgcagccatcgctgttggagcggactcctctcgattgcttcttgccttgaggtcagaagcgttgctttggttgcacaaattagaggaagctgatttgactattacaagcttgttgaaactggatgacgcgtcgttgccttcgacgccaaccagagtctcaggcatgtcagctgactcttatgtccatatcgtccaagccaaggtcaacgtgacatttggaaggttcgattcagctgtcgcactggctgagaaggctaagcttattgatggcgtgagctcagaggttgaagtgatcctaaacaacgtgagattagtcgcattggctcgagcccgggggaatgacctttttaaggcaggcaagtttgctgaggcgtcgctagcctatggtgaagggctgaaatatgagccttctaatccagtgctatactgcaaccgggcagcttgctggtcaaagctgggtcggtgggcaaaagctgttgaggactgcagcgaggccctaagagtccagcctaactacacaaaggctctgctaaggcgtgcggcgtcatatgcaaagcttgagcgctgggcggactgtgtgcgggactacgaggtgcttcgcaaggatcttcctggtgacactgaggttgcagagtccttgttccatgcccaagttgcattaaagacagcccgtggagaggtggtatctaatatgaagtttggaggggtagttgaagaaattatcagcttagagcaactccaagatgttatccgttcacctggtgtatccgttctttacttcatggctacaatgaacaagcaatgtgcacaaattaccccgtctgtggactccctttgctccgagtgccctgcattgaatttcctgaaggtaaacgttgacgagcgccctctggtagcaagcgcggagaacgtgcgagtagtcccaagcttcaagatttacaaggacggcacgagagtgaaggagatggtctgccctagcttgcaggtcttgcgctattccgtgaggcactatgctgtctccagctcttgaggtccggcactcagttcgctggccctgttagtgtcaccacatgccaacatttcaccaacaaatctgtccctctatagtatcacagcatttcccccttcccatcgcgtcacttaggctcctcctaccgcaacatctctagaaccatttgatccaagcttaagcaattctcatgcctcgctttccaaagtgatgacttcaactcctgaagaaaggctccctgtggtggtgttcagggaataggaacatggaacattgagacgtatgtcaacccaataaattggatattgaagaatggctggatatagatgaaccagctgatatttatgttcttagctgtttacgtgcatctgttcgatctatggcttctcggcgctctcccaggtaattttc

SEQ ID NO: 32939 - DNA, 2225 bp, Zea Mays
cttactttttgcagtccattgaggcttcaatgttaaacattgtcataggttctcatgtatgggtggaagataaagacttgtcctgggttgatggtgaggtattccgaattgatggtcaaaatgcccatgttcacacaaccaaggggaagacggtcattgcaaatatctcaaatattcatcctaaagacacagaagcaccacctgatggggtggatgacatgacaaggttatcatacttgcatgagcctggtgttttagataacctggctgtcagatatgcgaaaaatatcatttatacctacactggtaacattctgattgcaataaatccattccaaaggctacctagtctggttgatgcccttactatggaaaaatacaaaggtgcaaatcttggtgacctagatcctcatgtatttgcaatagctgacgccgcttacaggcaaatgataaatgaaggaaagagtaactccgttttggtcagtggtgaaagtggtgctggtaagactgaaactacgaaattgttgatgagatatcttgcatttctgggtgggcgatccggaacaggagagaggacagttgaacaacaagttttagaatctaatccagtccttgaagcctttgggaatgcaaaaactgttcggaacaacaactcaagtcgatttggtaaatttgttgaaatccagtttgacaagagtggtaagatatctggtgctgccattagaacttacttgcttgagagatctcgggtttgccaaattaatagtccagagaggaactaccattgcttttacttcctatgtgcagctccatcggaggatcttaagaagtataagctcggggacccatcgtcctttcactatctcaaccagtcagcttgcattcaagttgatggaatcaatgacgctgaggagtaccttgcaacaagaaatgcaatggatactgttggaatcactgatcaagaacaggaagctatattccgtgttgttgctgctgtgcttcatcttggaaacataaattttgcaaaagggagagaggtagattcatccataataaaggatgacaaatctagattccatcttaagacagcaggagagctcttgatgtgtgattgtgagaagttagagaatgccttgataaaaagggaaattaatacacccgaaggagtgattaccacaacagttggtccaaattctgctactattagccgggatggtttagcaaagcagatatactctcgattatttgagtggcttgtaaacagaataaatgcatcaataggacaagacccagactctaacaaactgattggagtacttgatatatatggttttgaaagttttaaaaccaacagttttgaacaactgtgcatcaattttaccaatgaaaaactccagcaacattttaatcagaatgtcttcaaaatggaacaagaggaatacacaagggagcaaattaattggagttacatagagtttgttgacaatcaagatgtacttgacctgattgaaaagaaaccaggtggcattattgcacttcttgatgaagcctgcatgtttccaaagtccacacacgagacattgtctcagaagctgtatgaaaagttcaagacccacaaaagatttaccaaaccaaagctttctcgtactgcatttacaattcaacattatgctggggatgtaacatatcaatctgatcaattcctggacaagaacaaggactacgtggttgcagagcatcaagaattacttaatggttctaagtgctcttttgtatcaggattatttccaccagcaacagaagagaacacaaaatcatcaaaatcatcaattgcaactcgctttaagatgcaacttcacgagctcatggagactttaagctctacagagccacattatattagatgtataaaaccaaatagtgtccttaagcctggcatttttgagaataccaatgttctacagcagcttcgatgctctggtgttcttgaagccattagaatcagctgtgctggttatcccacaaggaaacaatttcatgattttctacatcgcttttgtgttcttgctcctgaaattttgaaagagaaaaatgatgaaaaagtctcatgtcaaaagattttggacaaaatgggactacagggttatcaggtgaaaaacacttcacttaccaatctcctcaacatgtattggaagagagtatttagatttcctaattggtggtag

SEQ ID NO: 32940 - DNA, 2219 bp, Zea Mays
gggctgccacaacccacaaggaggccagggaccaatcacagacagtcatcttctcccgttcacgtaacgtgcactagggtttatggtttagggcgaccgccgccgtcctacgtccagcggccaggttttcttctggccctctgcgctgactacaacccaccacctccggttttggatttggagacatggcggaagtggtggacaagctcaaggactacgatatcaagaaggagggagaagcagagatcctcctgcacaagaagaactccgtcttctttaatcccgtgcaggttcacaacagagacatgtccattgctgttttaaggacctttgttgccaagcgtaaggaagaacatgaagcgctggtggacaagaggaatacatcacataaaaaaaataaacaaagtgaaacatccagtcaaaatggagaggatgcgtcaactggccagcaagatgaaatggatgttgtttgtgaaaaggagctgaataaagctgaagatcaaattgatgatctgtcgaaagaagcaacagaaccttcttggaaagtaaccagagagcttaagccaccacttgttcttgaggctttggctgctactgggttgcggtctctccggtatgcccgtgaagttgagggcttaggaaaggtagttgctctggacaatgataaagcttctattgaagattgcaaacgaaacataaagttcaatggtgcttccgctactagtaaggtggaagcttacttggttgatgctcgaattcacatgctgacgcatccaaaagaatttgatgtggttgatcttgacccttatggatcaccatctatatttctcgactcagctgtacaggctgttgctgatggtggtctattgatgtgcactgccactgatttggcagttctttgtggtaccaatggagaagtttgttacgcgaagtatggttcattcccaaccaagggcaagtattgccatgaaatggctttgagaattctccttgccagtattgagagccatgctaatcggtacaagcgatatattgtgcctgttctctctgttttcatggatttttatatccgtgtttttgttcgagtattcacttctgcaagtgaaataaagaatacacctcttaaactttcttacatatatcagtgtgttggctgtgattctttccatcttcaatgtcttgcaaggactgttcagaagaagaataatggtgtgaagcatgcacctgctattggacctgttgttcctcaggagtgcagtgactgtggaaagaaatttaatgtaggtggaccaatatggtcagctcctattcatgaccaagactgggtactttctactttgacaggtgttaagtcaatgaaggatagataccctgcatatgataaaataacttcagttctaaatactatgtcagaggagttacatgacgttccattgtttttcagtctccataacatagcaggcactgttaagtgcacatctccatctttggttatgtttcggtctgcagttctaaatgcagggtatcggatctcaagcacccatgttaacccacttgggattaaatctgatgccccttgggatgttatttgggacatcatgcggtgctgggtgaagaatcatcctattaaggaacagccacgtgactcacctggcacggtgatcctttcaaaatcgccaaagctagaagcaaatttttcaagagcagttgctgccctcagcaaggctcagacaaataagattaaacgattccttccaaaccccgaacggcactggggtccgaaggtcagagcagggcggaagatcacgagcaaacatgtctctctgttgggccctgacgctatcaagggtgctgtgaacggtggtgactgccagaaagaaggaaacggtgctgagccagatagtacagcctcagaacccgaggggatcaaagacgttgaggatgagccctcaaacaaacgccaaaaaaccagcgacggcgaaccagcaagcgaaccttgatttgtttgtcaatctttcgcgtctccattgtgttgtgcctgtgcttttcttgtttgtaggtggtcgatggttatttataccacctgttggattttgaacgaacaaattgtggcaggtttttattaaacttttgttgcatgtgtgatgctcctcctagtcacagagggaaaagacctattaaagcataatatatagtatagctttctgcaatgtcgagac

SEQ ID NO: 32941 - DNA, 1899 bp, Zea Mays
ggagcatcggcgcagcccctttctccgccccccaccgcgcaccgcccgaccagcgacgggaacccacgccgccccctctccgccccgtgcagtcgctccccagctcccgcgccgccgttccctgctaaccccatccccttcgcctcgcctcgtgctaagagagcgcggaccactgcggtgccacgccgacgccttctgccggccccaggtggattctgtccgcagactcctggaggtgctgctatctagccccttgatctgagctgaaattaggagctgaacctgccgggcgagccgatgtacggctcgccggtgtccaaggacctcaacctcccggtgcagccgcccatggcctcgtccgggctgctgaggttccttgctgaccaccacatccgggacgacaagccgtcgccgcttgcctccgccgccgtccacttcccgactgaaaccgacacggcctcccagcagcagcagcagcagatgatgttccactcccagcagcagcaggagatggtgagcgccaagtccggcctttaccgcaccgtgaactcaggcgtagaaaccgcggccgctgctggtgccggcggggccagctccagtgacaacgctagcaacctgattcgacagagcagctcccccgccggattcctcgatcatttgaacatggagaacggatacggggccatgctgagggcgggcatggccacggcggactccctcgcaggcggcggcagcaggctaaaagggcaactgagcttctcgtcacggcaggggtcattgatgtcccagatctcagagatggacagcgaggaggtcggagggagcagcccagaggcttccggcggcggcggcagggggtacatccctgggtacccaatgggctctgggtgggaggactcgtcggctctcttgtcagacaatttgtctggcgtcaaacgcccccgggactcgtcggagcctggccagagcggccttacgcaccagttcagcgtgcccaagacgtcgtccgagatggcaactattgagaaattcctccagttccaggacgccgtgccttgtaagatccgtgccaagcgggggtgcgccactcatccacgcagcatcgctgagagggtgaggagaacaaagatcagtgagcgaatccgaaagctgcaagaactcgttccaaatatggacaagcaaaccaacacatctgacatgctggatttggctgtcgactacatcaaggatctccagaagcaggttaaggtactaaaggagagccaagataactgcacctgctcagcaagcaagaaccagcagcactcctgctgaaaccgtaatgctcactgtacatgaatgacctcgaaagcatgtccactcgggaaagaaaaagatgcagtgtagcttttgtatgagcgaagggggatgaagcaatggcatcatcaagcattcaagtgattgggagaagggtaaaaaaagtggggagagatatatatacaggagaaacaactgtatagtttggctgtagctttgctatatatacacacacgcactaccctttcggtagaaagtggttaatttacctctgtttactagtagcaccagctgtaaatgtgccgcagataaacagtggagaagcttggaggtgttcagtgcgagcgatagtgtttcaactctatgaacatatcatcgttgggttaatgggcatcatctactggggtctggggatagccctgcttcctctcggacctcaggcctgaagcttgtatgttgttcagctatctgacattctgactatatcgatgcttaacatagctctagtgcgacaccaagagaacattcaggctctggacatggcatttatattgttccatcgccttggtcttaggctatggccagcggattgtgatatgacca

SEQ ID NO: 32942 - DNA, 930 bp, Zea Mays
atcgcggccatcgcggcggctcgtgggggaggatcgcggccatcgtgcaaaacagtaagacatacgacaatcgtgtccactgtcttttgcttcgagggtgaggattgagcagggacagatcgacggtgcagattggctgaaggcagaaccagtgaagtctctaaacagggcctcacacgatatcatcaccgggactgcggcgatgtcgtcggccgccgcctcctcctctcccgccgccggtagcgaaggaagcggtggtgcggtggaagggcgggagatcgcgtacgtgagctacggaggggagcatcacctgccgctggtaatgtcgctggtcgacgaggagctcagcgagccctactccatcttcacataccgctacttcgtgtacctctggccgcagctcaccttcctggcgttcgatgccagggatggcaagtgcgtggggacggtcgtgtgcaagatgggggagcaccggggtgcattcaggggctacatcgccatgctcgtcgtcctgaagccctaccgaggaaggggaatagcaactgagctagttactagatcaattcgggtgatgatggagtctggctgtgaggaggtgacacttgaagcagaagttactaacaagggtgcccttgctctctatggtcgcctggggtttatccgagcaaaaagactgtacagggatgaccagaagatggattctccctacttgtgacagtaccctaatcagtatgtagaattgagttggagaccctgatcattcttttttgctctgtttcatgcttttatagctagcatgtaactgcatattgttgtactaacatataaattttcgaggtgttttatttcctcctgttctttgataaggatgtattaatcaacttcagatcaaacaataagaccgtgcagttcttttgctcaataaacaaa

SEQ ID NO: 32943 - DNA, 3922 bp, Zea Mays
gaaaattcctaaaatgaagactggagacccagcaggtacgcggagcgtagcaaattcttcacgacaccccgatcgagactctggagcgcagagacggcagagagcacagtagccaagcgactggagactcatcactggagactggagagcatccggagccagtgctcgcaccaccgctcccgattcccaatcgccttcccgccgccgaaggggcgccgcactgtcccccggcctcgatctctctcgggccagccgtcggccgtggccctgcgcctcctgcgttatctggctggagatccggccggagtgccattcctactctcggtcaataagtattctggaatgtttttccgagctgaaatagatagcttctggagctggatctcagtattctgttagggacatgctccaaccgagggaagctgatttgcctgcactctttcttgtcttcattgtacttcctgtggtagcttattttcttctcgggagatggcatgatgctgcaagtaagaaggcaagggtaagtgtgcttgctcagcgagctgcagaagaagcctatagagaggaaacaatggcgtgcccagacattattctgccagggtcttccttgagaactatgccctatttcagacctatgcctgcattaagacaggaataccatgaatgtgcaacttgccatgcccctgcaaagactcgttgctccagatgcaaggctgttagatattgctctgggaagtgtcaaatagtacactggaggcaaggacataaggaaacatgccaaaagtggcttggtagtggttctagcagctttggtggatctagcactgaggctactgaacagatgccgttcttgactaacttaaattcacctcttccgggtggtgacattcacttgcgtgacttgaacttcgatactttatcagaaccatcctttcccacaactgatggttataatctagatactgatccatttttggcagacagaagcaacatgaataaatcaaatcaaggtattcatatgagcgaaaatggtgctgttggtgtatcttttgaaaagaataattataatgctgatgatgaaatccactcaccggaaaatttatctagaaacaaggtgtcaaacaactattttggttcagatgcaataagtggtaatggggatgcaatttatcctgccaaaagtaatgcacagcagcctagcagctgtgctcctgacatgagaaaacagccaaaagcaagcatcacagtttatcagcctgacataggtgtctatttaacttctgacatggtcagttcttgtgaggggtcatatgcttctgccagtgagccactgcaaaggagcttgtcatctggaagaactattgggaaagcaaacgcggtgaataagaggcctccatacccatcaagtaaggtggtttcagcacaaaagccacaggatagggtgtctacatcatatcaaaatgatggccatgagaagaatccttgcaacaaaaatgaccaaagatctacccccaaatgtgaatcaagtcaatcaacaagcagcaatctacaaaagtttggagcatccaaggttgaagttttaaagaagccttcaaaatttctcaaaaccagccttgtgggattgatcaatgataataagaggaacaaggtattgttcccatatgaagatcttgtcaagttttttcagtatgaagcccggggtatttcccctagaggtcttttcaattgtggaaacagctgctatgctaatgctgttcttcaatgtctcatgtgcacaaagccactgatgatctaccttcttctgagattgcattctaaagattgttcttcaaaaaaatggtgccttatgtgtgaacttgagcaatatgcttcaactttacgtgaaagtggtgggcccttatctccaagtagaattctttctaatctgaggaatattggatgtcgcttgggtggtggaactcaggaagatgctcatgagtttttaagcttgcttggatgggctgggtggtgagaagcatgttgagccaagtttgcaggaaacaacactgatacaacagatgtttggtggccgtcttaaatccaaggttaagtgcctcagatgttatcacgagtctgaacgatatgagaatataatggatcttactttggagattcacggctgggtagagtccttgcaggatgctttgacacagttcactgcccctgaagatttagatggtgataatatgtataaatgtggaagttgtgctgcctatgttaaagccaggaagcaactgagcgtgcatgaggtgccaaacatattaacagttgttcttaaaagatttcagtcaggaaaatatggcaagatcaacaaatgtgttactttccctgatatgttggacatggttccttttgtgactgggtctggtgacaatccccctctttatttcttgtatgccgtggttgtacatgtggatacagaaaatgcatcattctctgggcactatatatcatatgtcaaagatatgcagggtacatggttgagaattgatgattcagaggtccaggttgtatcagtgaatcaagttatgtcagaaggtgcatatatgcttttctacatgaggtctttcccccgaccaccaagaatatacatcgagaaggggccgactgttccatccgcgaagcgccacacatcaaagtattccaagggctctaaacacgagcgcgagcagacagagttactcctctcggcgaacgatccagcatacggtgtttatgactttagacctgatggcgagggctacacgcaagatcagcaagcagagttgagatccagggatttccatcgcgccgacgatgccttcgcagactcggtcagcgcggacttctcggaggccacgtcaagcgaatggtcgctgtttaccagctccgacgagtcctcattcaccaccgagagcacaagggactcgttcagcgttgtggactacggcgacaacgctggcctggacccaatctcctcgatatttgggccaagctatgctccggagcatcatcccggtccacctggcagtttcgccgcgtgcacgaggctctcgccttccaacccacagacaaggtacttctcggagagcacagggttcgtctcggactactcttccagcggcattgtacatagaggaagggatccaggtagggcatacacctgttcagcggaaccgctcgcttcggctgcggcggcgcaccagcaccagcggtacgcccttagcggccgagacggtttggtccagacatctgggttctgccaaatgtaaccggctttacgatttcgtagctatagctgtagctggtgctcgggcagctgcggtttagcactgccactgatgctgctgcctctatgttctttttatttcaggtgaggcgtattaaattttggctgcatgtcattcctaggctagctcgattcaatgtagcgagagagagaggaacaaatttagattgtgtctatatgcaggtgaaattttagagcgcggtggagctgctccggttgaagccatcccccgaggcccgaaccagtaaattacgccgaatccggcagtcgtatggccctgcacaccagtgctttgtgaaaagcttgcagattcatcaattgacgtgcacttgccttttatatggacgctgacgtatggaggtgcacactctccacctccgtatatctcgccacctactctgtttatattagaaggttgattgctgacacacaacacctgctcgtacttttttgtcgaaatcatgacggacaacaacgctaaacatatagtacaatcttcttgtcttgctgatctgctatgcccctttgtgaaatctgccggtgacatcagcgatggcgtcttgctgatctcgtggtatacctgatgtttcctcggtctcagcttttatcacgcag

SEQ ID NO: 32944 - DNA, 6033 bp, Zea Mays
gcgaaaaggcgagagccggagagagagagacatacagagagaggggaaaaaacttatctgcccttcctaatcgcccttacccccttgtgttagataaccacccctctcccttgcgcgccgccgccgccgccgccgcgcctccccgccgggagcccgtctccggcgatcgccgccgtctagcccccctcctgtccccgccttcgatccgaatcctagacgaaaaatcgtggaaaataccgcaaaaaatcgcggaaattcgcccggttctgtttgaataaatcgcacgggcgttgcgccccgcccctctcgctcccctcccgccgccagccccgcggccgccggcgacggcgatcgcgcagacaaataggcgcccgcgtcgagccagaaaaacccgcctcgtgccggtccgagcattcgtctctgtcgtggggactgagcacccgttgcctgtccccgcccgcctgcccgccgcctcctgctcctctcgtcggccgcggcacaaggagtgatactgagcctgtgagaggtattccatataatgccataatctgggatggcattcttcagcaactccgggagcaaggctgattcaggagggtacaacctgaatgaaaaggccgaagatgagggcatctacgagtcagttcaggatgggaatgttgacctgagttctaggcagtggaacttaaatgagaaagcagatgatgcttaccattgtgaagcagagcaatatgaggcgggccagtcaggtttgtactcttctgagaaggcatcagggcagcatatccagaaaggaggcagatcttctggtggtccatggggcacaaattttctgaaggattccaggtccaaacagatggccgaggatgttccatcgaatagtggtagaggaatgaatgctgctagcttgcatgatggcttggatgatagtggagaggatgatgagctgaacagggcaaatggtgaggtgcctgctgaggaaatgctctccgatgactattatgagcaggacggagaggagcagattgaatcgttgcatcgtggcgggacgaagcaatcaagctgttccacttctgaagacgaccccgctgatgtggattttgagccagacagcgaaacggacaaagctactgataaggataagtttatggatagtgagaattctgatggcgacgatgatgatggccttgaactctcagatgatgatgatgactttgttgagaaccggaggcaacctaaacgacttaagattgtagcaactaaaacttccaagggaaggaagttgcccatgccagctcaacgaaaacgaggggtgtctcacagcgatgaagaatattcttcaggaaaagattcagatcttcccagtgatgctgatttcaaacacagatcgaaaagacctgacaggttgcatcagaaatctgtgggccgcagtgatgttgccccaatcaattctcataatgagcttcgaacttctggaaggaggacagtgaaaaagatctcatatgttgaaagcgaagaaagtgatgatagcgaggagaagtcaactaaacaacaaaaggaggagctggaagaggaagacggagaaacaattgaaaaagttctttggcatcaacccaagggtgtagctgaagaagcaataaagaatcaccaatcagctcaacctactgttgtcagcctaacatcggactttgatcaacagtgggatgaattagagttctatataaaatggaaaggccagtcttacctgcattgtcaatggaagacattatcagagcttcaaagtgttagtggattcaagaaggtaataaattacacgaaaagagttgctgaggaacagaggtacaagagggcactatcacgtgaagaggttgaggtgcatgatgtgggcaaggagatggagctggatcttattaaacaatatagtcaggttgaacggatatttgctgatagggtcagcaaagctgatggagatgatctggttcctgaatatttagtcaaatggcaaggacttccttatgcagaatctacctgggaaaaagatacagatatcgattttgctcaagatgcaattgatgaatataaggctcgtgaagctgccacatctatacttgggaaaacagtagatttccaacgaaagaaaagcaaagctagtttgaggaggcttgatgatcagccagaatggctaaaagctggtaagcttcgtgattatcagctggaaggactaaactttctcgtgaatgggtggagaaatgatactaatgttatacttgctgatgaaatgggtctggggaaaactatccaatctgtttccatgcttggcttccttcataatgctcaagaaatcaatggtccatttcttgtagttgtgccactgtcaacattgtcgaactgggcaaaagaatttcggaagtggctgcccaacatgaatgttgtcatttatgttggcaaccgtgccagcagagagatgtgccagaagcatgagtttttttcagacaagaagggtgggcgtcatgtaaaattccatacgttgataactacatatgaggtgattctcaaggacaaagcggttctttccaagatcaaatggaactatcttatggttgatgaagcccaccggttgaaaaattgtgaagcatcactatatactacccttttggaattcagcactaagaataagctgcttatcactggaacacctttgcagaacagtgtggaagagctttgggcattacttcatttccttgatccagttaaattcaacagcaaggatagttttgttgaaagatacaaaaatttgagttccttcaatgaaaccgagcttgcgaatctgcataaggaattgaggcctcatattctaaggcgggttataaaagatgtcgagaagtctttacctcctaaaattgaacggattctacgtgtcgagatgtcaccccttcagaaacaatactacaagtggattttagagcggaatttccagaatctaaataaaggagtccgtgggaatcaggtatcacttttgaacattgttgttgaattgaagaaatgctgcaaccatccatttttgtttgaaagtgccgatcacggttatggtggagatagcattggcgatcggaataaagttgaacggattgttatgagtagtggtaaacttgtcttgttggacaaactattggtgagactacgggagactaaccatcgtgtgcttatattctcacagatggttaagatgttggacatccttgcagaatatctctcccttcggggatttcagtttcagaggcttgatggtagtacaagagcagatcttcgtcatcaagccatggaacattttaatgctcctggaagtgatgacttctgttttcttttatccacacgtgccggaggacttggtattaatcttgcaactgcagatacagtgataatttttgattcagattggaatccacaaaatgatctgcaggccatgagtagggcacataggattggccaacaggaaactgttaatatctaccgcttcgtcacatgcaaaagtgttgaagaggatattttggaacgcgcaaagaaaaagatggttcttgatcacttggttattcagaagctaaatgctgagggcaggcttgagaagaaagaatccaaaaagggtggctccatatttgacaagaatgaactttcggctatcttgaggtttggagcagaggaattgttcaaagaagacaagactgatgaagaggccaagagaaaccttgaaagtttggacattgatgaaattcttgagagagcagagaaagtcgagacaaagggtggtgaaggggaggaaggaaatgagcttcttagtgctttcaaggcatgtgatgtgtatgctaattgctaatgcttgctgatgctgagcaggaggtattctgaactaacatttattcttcatgttttggataggtcgcaaacttttccagtggcgaggatgatgcaacattctggagtaggctaatacagccagatcctgcagatattattcaggaaactttggcgcctcgtgctgcacgtaataaaaagagttatgttgaagatccccagtttgacaaaaataataacaggaaaagacgtgcagttgaagcacaagaaaagccaaggaggcgttctggcagaacagtggaaacagttaattcagtaccattggttgatggagcagtagctcaagtacgagagtggtcttttggtaatattccaaagaaggatgcttctcgttttgtacgagcggttaaaaaatttgggaatgcaacccagattgacttaattgtggatgatgttggtggtgtactagagaaggcaccacatgaagcacaaatagagctatttgatttgttgattgatggttgtcagaaaagctgttaaagagaatacagatatcaagggcacagttttggattttttcggtgtagctgtgaaggcctatgaattgctagctcgtgttgaagagcttcagttgttgtcaaagcgcattgcacgatacaaagatccaatcaagcaataccgcatccaactaccttataaaaagcctcagtggtcagcaagctgtggatggactgaaactgatgatgctagattgatggttggaattcattggtatggctacgggaattgggagaaaatacgtttggatccaaagcttggcctgacaacaaaaattgcaccagcaacacttggtgagagagagacatttttaccacgtgctccaaacttggataaccgtgctagcgctctcctgcaaaaggaatatgctaagtttagcggtaatagctcaaaagtcaaaggaaatgcccgccagacagtcaataacgacagtaatagtggagctcgatcaatgagaggccgacaaaaggatgcaccagataaagaggataataagccgaacaaagatgacattcagaagcgcaaggtaatgatggaagctgaagcaagagaagaaggtgaaatttctgaatcagaggcagagacaaagtatcgtctggacaaagaggagaagtggctcgaatggtgctctgaagttttaaatgaggaacaggaaactttgaagcgcctggacaggctgcagaatacaagtgtaaacctcccaaaggaaaaggttctttcaagaatccgcaagtatctcctgataattggggacaaaattggtgaagttgtccggcaacacagtgaatcttataggcaatcccgtaagtgtagccgcacctcccgcatgaccatgaggttatggaattatgttgccaccttttcaaacatgtctggggagcaattgcatgatctctatttgaaacttagtcaagaccaactggaaggtggagttggcccatctcatggtgccaatttcacatccattccttccagcaagggaggtaactcaaatcaacttcatcctacaagaaaccataggccaaccaggtctctccagtacaattctgagtctttgcacaataatgagagctctggaagttctgaagcctggaagcgtcgacggagagcagaccctgataatcagtttgacacccagcctttgtatcaacctccaattatgacaaatggaaataggttgcaggaatctagtagttctgcaggaattcttggttggggtccagttgaaatgagacggtatggtaatgaaaggccaaagcgtggtgttcatcctagtcattttcctactgggcatggacctttgttgtagctgaaggaattagatgactcgaacaaccttgtccactttggcataactgttcccagtgaatttcagcttccatatagttacaaatggtggaactctgtcggaattgaaattcttttttccataacaagaaggaataaaaagcaagacctgacctggagcgcagtttgaatactgtccctcaaaggttagctaggtgatcaaagccattctacaagtcatttcgcaaaagcaaacaatttaggagttgcatgaggcctactttaccctggatgcctcacttttgttatttagatgcagtgaggatgtttctagctctg

SEQ ID NO: 32945 - DNA, 1896 bp, Zea Mays
ctgggtttcaaaatttgaaccgcgcccgaacggctcccccgggactcgtaaccgaagcacgcacaaggcacaacggccaaggcacggcgccaagcctcacgtctcccacgacctccccccatttgcccatttgtccgtttcgcctcgtcgtcgtgggggcagtgcacgctcttcgcaggagggagagaggcaggagaaatttcgggggtttcgcgttgcggcgtggatgggggcgtcgggcaagtggatccggacgctggtgggactccggccggcagcagagagggagagacccggcgccgtggcgaaggggcggaagtggagccggctgtggcgaagctcgtcctcgcagcgggggagcagcgcgccggcgtcggaggcgccgtccgaggcgtcgtccactgccgacatgctcagcagctctgtcgtcgcggccgtcgtgcgcgcgcagcccagggacttccgcgtcatcaggcaggagtgggcagccgtccgcattcagtccgccttccgcgcattcctggctcggagggcgttgagggcactgcggggcatcgtgcggctgcaggcattggtgcgcggccgccacgtgcgcaagcagctctccgtgacgctcaagtgcatgaacgcgctcgtcagggtccaggagcgcgcgcgggaacgccgcttccggatctccgcggacggccgccactcgcaggacatcctcgacgaccgaagcggccttgctgatcctgtcaaggaagcagaggcaggatggtgtgatagtcaaggtactgtggatgacctaagatcaaagatgcatatgaggcatgagggtgcggtaaagagagaaagagcaattgcttatgctctttcccaccagttcaagccacagtggaagacccagctcccctgctgcatctctcaggaatcatggaactggcagaagcaataaagattggagccatttggatgggtcgatggcgacgaaaccatgggagagccgcctgatggagcagacccacaccgaacactcgaacaattcacggtgttcagaaagcatcgaggagatgaacgcagccagctcaaagctctcagatgcaagctcagtcaaagtcagaagaaacaatatgacgacaagggtggcagcagctaggccgcctccttccacaatctcagcttcttcgtcagatttcgtttgcgacgccagctgctccccatcgacttcctccgtcaccccagccgcctctggcaccagtttcctaacatcagacagaaggtctgattacgggccgaactacatgaactggactaaatctgcgaaagcaaggttgaatggttctggcacagcacataggctaccgctccaaaggcaacgatcttctgatctgcaccaccgcatcagcaggatagcgctatcttcggcagatgctcaaagcaccgctggatcggaagtttcggttacttctaagaggctgaacagtctgactctgagaggtcgaggcgctagaagaagtttggacaggaagaacgatgaccagcctgttgccttgttttaaatcctactagtcatgtttattttcatgacgctatgcgcgttaggcatgttcatgctgacttgtatgtatgctctgatttcaatgcctcgttgctcattttggtaccgtccacaattctgtctgtgccaacgccgaactgttacttttgagggatccaaaccgaagtcgcgcgggatggtgataacttgtatgcaatgtacctccgtgttggtcctgctggatcagcacaacgaaactggcaattgaattcaaagtttctttcttgagggaaaacatgtatattttggaaaatgcacgttatgtatttctcgtccaaaacttgtgcaaccatattgtgatcaaagttaagaaattg

SEQ ID NO: 32946 - DNA, 659 bp, Zea Mays
ctctcctctggctgccgctctccacagtcctcgggctccaagccttgcgtaaaccccgacccccacgcgcatagatgaagactaggtcgcagacgtcgccgaagcctctcaagacggtggcgatggctcccaggccgagcagcaccaagcggaagccgaggcccaagccggcggggaagggcgacccccgcgcacccaagaagccacccaccgccttcttctacttcatgaaaaggtcaagtattatgatatagctactgagaaacgtgcagaatttgagaaggcgatgattgaatataacaagaaaaaggaaagctgaacatttgtctgttccaaattcccgatggttcactgtaactggatgaatcaatcagctgtatattacagaactgtgatttttagtggaatttataaataccactagttggaaccgtcagctcacgcagatatgtatcttttgtagtcgacttgcacattttgatgacaccgagtcttctacccggtgtttttcatctggagataatttgtgtttcgtgctaactgctcgttaaattgcttattatagagttgtatgtatgattgtgtatataataatgtcctccaacgcaaaaaaatatatatattatcacagctaaaacaaatgatatccctactgtcaa

SEQ ID NO: 32947 - DNA, 2885 bp, Zea Mays
gaaacaggcgccgtgttaatggccgccacaacggtaaacgttacccttgccgaagagaagggaaaatagcagtagcgcccggatcccctctccttccctccagatcacaccactgccgcctccgcctgcaaatccatttctagactcaagctgttgctgcgagcgagctagggttggtgctcaggtctccagggtttcgcctccccgctcccggtgcccatcgccttggaccttggcctgccgggttagggttgggtcgcagctgcgggggccgtggggcggggatgcggccgatgcggcgatcgcgggcgatcgggaggctgtagcggcggcggggcagggtatctcttgggtggattctccggcgatggccgcagacgcactatccatcatcccgggcgccgtgcttcgcaacctctctgacaagctctacgagaagcggaagaacgccgcgcttgagattgagggaattgtgaagcagcttgcaacgtttggggagcatgagaagatatcagcggttatctcgctgctcaccaacgatttcacatattcgccacaggcgaaccatcgaaagggtgggttgattggccttgcagcagttactgttggactcaccagtgaggcagctcagcatctcgagcaaattgtacctcctgtgcttacttctttcctggaccaagatagtagagtgcgttactatgcttgtgaagcgctatacaacatagcaaaagtggtaagaggggatttcatcatctacttcaacaaaatttttgatgctttatgcaagctttctgcagattccgatgctaatgttcaaagtgccgctcaccttcttgataagcttgtcaaggatatcgtaactgagagtgatcagttcagcatagaagaattcataccgctcttgagagagcgcatgaatgtgttgaacccttatgtaagacaatttttggttgggtggataacagtgttagatagtgttcctgatattgacatgcttggttttcttcctgattttcttgacggtttgttcaatatgctgagtgattccagtcatgagataaggcagcaagctgatgcagcactttctgagtttcttcaggagataaagaactcaccaaatgtagattatggtcgtatggctgaaatactcgttcggagggcaggctctactgatgaattcactcggttgacatctatcacatggatcaacgagtttgtgaagcttggtggggaacaacttgttccctactatgcagatatattgggcgctgtcttaccatgcatatctgacgaggaggagaaaatccgagtggttgcacgcgaaacaaatgaggaactccgtgctataaaagctgatccagctgagggatttgatatcggagcaattctttcaatcgcaaaaagagaattgaacagtgaacatgaggccactcgaatcgaagcattgcattggttcttcactttgctggatcgatattgtgctgagttcttggcttacctgaacgatatttttgatccactcctaaatgcactttctgatccttcggacgcggttgtcctattagtattggaggttcatgcacgcatagctgaagaatctcaccacttccatcatcttgtatcctacctgatccgcaccttccacaacaaccattttgtactggagaagtgctgaaaaagtatatcgagagttctccactattcttgagagtgaagttgatcttgatttcgcatccgtcatggttcaggttttgaatttgattttgctcacatcaactgaacttggtgagctccgctctcctcttaagaagtcgttagtggattcttgtggcaaggacttgtttcagtctttatatgcttcatggcgccactctccgatggctacgataagtttatgtttacttgctcaggcatacaatcacgcaagctgtgttattcagtcactgggagaagaagacataaatgtgaattttttggttcaattagataaattgatccgtctcttagagactccagtatttgcttacttgcgtttacagcttctcgagcctggaaaacacacttggcttctgaaaactctttacggtctcctgatgcttttgcctcagcaaagtgcggccttcaagatcttgaggactcgactgaagactgtgccattcagtgaaaatcttaagcgcacatcttcagcgaatccatactctcagattctgcaagtgacggaagatggcaatagaaaccaagatatgcagaactacagtgcaatcaatttcccattccttctccagcaatttgagaacatgcagctgcagcatcgtaaccatttgaaggatcaactgcaatcccgtaaatctgcttcgactttaacattatctcaggagatacaaagatacgaagaagcgcattcctcatcgctgtcagagattaacaggcccccttcaagaacatccaaaggcattttatgatgcatttgttcttgcgatgtatgatatatttgccggaagcatcaccacatatatgttggggctttggttagtctcctcgttttttttcaaaggaggttgcatagggtacatagtgtaatcttttctatttcgttcctagattttgtcaagagatggcaattatttgttggagaaagctcgttgccacattctagtcattcttttcttagtggtttcactgctcatctggtttctgtaatttttcaattgaaggccaaatgagcaaagtagtaattggagatagaaatatgttactactgtcctatctatcgatctccaataaattagcgttgcaatgtaaattcctgttggctcgtatgatatatttattatattatttatatgccttatctttacccccattttatattattacaatatcgc

SEQ ID NO: 32948 - DNA, 803 bp, Zea Mays
ctacagcttacagctaagtcggcaataggaataaagctaagtcagcaaggcttaggcaagcgaaagaggaggcagagagggaaatagccgaataccgtgcccagatggaggctgagttccagaggaaggtcgcagagagcagtggtgactctggtgcgaacgtcaagcgtctcgaggaagagacaacggcgaaaatcgaacagctcaaccagcaggctgcaagcatctccccagatgtcattcagatgcttctgaggcatgtcaccaccgtgaagaactgagaagtgctgctcccaaactatgctcatcggtctatttatttttgtcagagcaggtgaggaataataatatggcccttgtaccagtaattctttttttaactacggaataagccgcagcagctttagcggcaaccgtgactgttactaccagaacttgccattatttggtataatcggcaaattaaataatattgttttatattggatttttgaacaaacttttttttgctgattccctacctggtgtttctgtttcatttcttgtatgagatctgcaaattcatcatggagtgaaagccgctcgacatggaaattcatggtgttgctttttttttatgtgcaaactgtgagttgttttggaaaagagaacaagaaaaatggttatgttcttggtgaactagaaactccgaagaaaaatggttatgttcttggtcaacgagttagagcttcgctagatataatccagatggacttggatgtcagtatgctacgatctacgaccacgccagtttggcacgctac

SEQ ID NO: 32949 - DNA, 320 bp, Zea Mays
ctaaggatggaagtacttaaatcgggacttgggttaggaacaggtgatgctccacctaggttaattaaggattggatgcgtatgtaggcctgtatgatcaaggactatcttaactggccacatgccctggaaatgggacagggtaagcttgaacccggctattccatacatgaaaagacaatcgcgcactgggagtggagagatggcgagagtgacacgtaccctcctggcaaaggaccgcctaaaaagggtggtgtgctctcgggtggcgcggacctgttcatgcagtggaggatccgtgggaatggttgacatatgca

SEQ ID NO: 32950 - DNA, 518 bp, Zea Mays
ctttttatctgcacgcgtctccttcttcagtcgcgcggtcttcttctccccgcgcgcagccgaggtctctcccccgcgctccttcctcttccagctccggcgcccggccggatctcctagcgtcgcgcccagctctgcttcctttcccatggtagcctcccttcccttctagctccctcctccagccgagcggttccctggcacgcgcttgcttcctgcgcatgctcgccggccggagctctttggcgcgctcgcccatgccgcgcgcagccaagctcgccctgtgcgtccatctctctgctccagctctgttgccgcgcgagctcgccctggctcggatccggcgctcggcgcctgtttctctgcttctctccttgtgcccaaggcttgtccagtccgcgccctccttgctgcagctcgccccgcgccccttgtgcatgcgcagctgaacgtcgtgccgggtactgcgcagtgcttcgtcaggcgtcgagcttagctcggtcttcgtttctctgcag

SEQ ID NO: 32951 - DNA, 234 bp, Zea Mays
ggatgctgtgacacgttcgtgagtggtctaggtcgtcgtctcctagtcaactttgggttgctggatcattgtcgccttacgatgtaattatttatttattttgtacagaactcctattctatagtaaggatgtgacagttgtttctgtaccatgattcatcatatgtgtgggactttgtcccagcacacctggtgattgcgttcgtgcctgggttcctaaaacctgggtgtgac

SEQ ID NO: 32952 - DNA, 1974 bp, Zea Mays
agtttgacgacccacccactcacacgccgaaccgacgccgacagctgccgcctgccggacccaacaacaatcaacaaagcctacaaaatcacaactccacgttcgtcgccgcgggaggatcgggctgggctggcctcgcctcggttggcttcagctgccacctgccgcgcggccactatccagcctccttcggtccttccccttccccagcagcaggctccggccgcagccatgcccaagccaccgccgcccacctccgacccctcgctccccaccaccaccaccacctcgacccccaagtcgtcgtcccgccctgcccccgcggggctcctcgatccgctcgccgcctccgggcgctccctcctcgcctcggcgcggcgctccccggtcaccacgctcgccggcgccttcttcctcctcgcgctcgtcatgtacggagaggacgcccgcaccatcgccgagctctccatcgacgactacctctacccggacgccgatctctacaacgtctccggcctgccgccccttgcgttgcccccgcctacctgcgacctctccagtggccgctgggtcttcgacaacgcctccgtcccggcgtacagggagaaagactgcaccttcctcaccaagcaggtcacctgcctcgccaacggccgccccgacgatatgtggcagtactggagatggcagcccagtgactgctccctccccacgttcgacgcccggagattcatggaggcgatgcgcgggaagcggctcatgttcgtgggggactcgctgaaccgcaaccagtgggagtcgctggtgtgcctggtgcagcccatcctgtccaagggcaggaagaagatcgtcaagcggggctccctcaacaccttctacgccaaggagtaccgggccacgctcgagttctactgggcgcccttcctcgtcgagtccaactctgacaaccccaacttccacagcatcaaggaacggatcatcagtcccgagaggatcgaggcgcacgccaggaactggaaggacgttgattacctcatcttcaacacctacatctggtggatgaacaccgccgacatcaaagagaccgaactcgaggtattggtctgagaacgacgaggttcccaggattgaggcgtatggtcgggtgttcaagacgtggtctgattggctcaataacaacatcgatcctgcccgcacgtccgtcttcttcatgacgatttctccaattcacatcagcccgcagaattggggaaacccgggagggatcagatgcgtgaaggagacgcttccttatcagaactacagccaacccctggatctttaccatgatatgcggttgtatgacctagtgatcaaggttgccagctccatggagaaggtcccggtgtcagtgatcaatatcacaaagatgtcagattaccggaaggacgcccacgcgtccgtgtacaccatccggcaagggaaactgctgacgccaaagcagaaggcagacccagagaaattcgcggactgcatccattggtgccttcccggcgtgccggacgtgtggaaccaaatactctacacgaggattctttcaaaatcaccatggcgttctaattttagtccccctccgtcccagtccacacctcttcctccccaatgattggagaatgtaggattatcctttttgttttactttttaggttagattgagtataggttagcggagaaaggaaaatggatgtgctgattactgatggtatgtaagaaggttcagctgaagtgtaagttagttgtgagtcagccaattcaggaaacaacagcgatctagtacaaggtgcaccatggatatgatactatactatacaccaagtatatgccactgcgttgctatggaatcattatatctatatgttcctacgactatcctgtgttcatatagaaacatagttgtttcgtagattaaattattcgaaaaggaatcaaagttat

SEQ ID NO: 32953 - DNA, 1836 bp, Zea Mays
  misc_feature (1)..(1): n is a, c, g, or t
naagctttacaggcctggatctgttggttttgtgtctaaatcgggtggcatgtcaaatgagatgtacagcaccattgccagagtgacagatggtatttatgaaggaattgcaattggaggggatgttttccctggatcaactctgtcagaccacattctgcgttttaataacataccacaggttaaaatgatggttgttcttggggagcttggtggaaaagacgagtattcacttgtggaagcattgaaacaaggaaaggtccagaaaccagttgttgcatgggttagtgggacatgtgcacgtctattcaaatcagaagtgcagtttggccatgctggtgccaagagtggtggtgagttagaatcagcacaagctaagaatcaggcactaaaggaagctggtgcaattgtgcctacttcatatgaagctcttgaaagtgcaattaaggaaacatttgacaaactgtttgaggaaggaaaaatttctcctgttactgaaattacaccgcctctcattcctgaggaccttaaaactgcaatcaagagtgggaaggtccgagctcctacccacatcatctccactatttctgatgacagaggcgatgaaccatgctatgctggtgtccctatgtctacaattattgaacagggttatggagttggtgatgttatttctcttttgtggttcaagcgcagccttcctcgctattgcactcagtttattgagatatgcgtcatgctttgtgctgaccatggtccctgtgtatctggtgctcataactctatagttactgctagggccggaaaggaccttgtttccagcttggtgtctggattattgacgattggtccccgtttcggtggagcaattgatgatgcagcccgatacttcaaagatgcatgtgataggagcctcacgccatacgagtttgttgaaggcatgaaaaagaagggaatccgtgtgcctgggattggtcacagagcagagacaacagggataagcgtgtgcagcttctacagaaatatgctcacacacatttcccttcagtcaagtacatggaatacgctgttcaggttgagacctacaccttgtcaaaagccaacaatttggttatgaatgtcgatggtgcgatcgggtcccttttcttggatcttctatctggaagtggaatgttcaccaaacaggagatcgatgagattgtggagatcggttatctcaatgggctctttgtgcttgcacgatcaattggcctgatcgggcataccttcgaccagaagaggctcaagcagccactctaccgtcacccatgggaggatgtactttacaccaagtgagaaagccattctttgcaaggcataataaagtattattatcgcctagagcttccagttgcctgtacacttcattaaatcgagcacttgcaaaaaagaaagccagagagagaggaagacgaacatcactagtcagcactagattgtgtgttttatgttgagttgcaaattcaggtcctgatttttgtcctgccatgaaccgttaggcgatattgtattggaaaggatgcttcctttattgtttcacgatatatggcctcagaatagaaatttccattaaaaatgaactctgatttgttcgtcgataaagtgcatttgtacagacacgcattacgaaactaggcattttcaatagcatattaatccagaaaaggatacaagttggtgacaacaaaaagatacacgtgtgaacttagtaagattttatgatgaatgtgagcatagtactgggaaatgtgacatgaaaccaaacaaaagaaatatatccaatagcagatattgtgc

SEQ ID NO: 32954 - DNA, 2280 bp, Zea Mays
agctgccgacactggaatccacctgccccccgaactcactctaccatttccttctcactggaaaaaaacccccccggcaaataaacgtttcgagcgtacacccagacgctgtagcactgtaggtgagggtcagatggatcaaacgctcccaaaatcatggacatgcccattatcccgttctgagacagcgcacaacgcccttcgcagtccttgtcggaactgcagcggtgtgcagggcacacgacacgagtacgttgcaggtacaacagtgtccagcagggagctgatgtgttaaaaaaatgcatgtttcggccgctggagagtgacagtgatgctgggtaatgtgcaatgctggctgcggtttctagtgattgctgggacggagaattcaggtgacgataaaagagtctgatgggcttccggaacgactagtacggatcgataatggtgtgacgcaatgattggcggcggtcatcttctggttggttataccaaagttaattagggaagaacgtgttaggcttatcatgacgatactgctactcatgttcatatttcaatttctccccaaggtctaccatagtatacacatcatgaggaaaatgcagaaggtgacgggttacatctttggatcgatatggtggggatttggtttaaatctatttgcctatttcattgcttctcatattgcaggtgggtgctggtatgttcttgcaatccagcgcattgcttcctgcctccaggaagaatgcaagaaaaacaatagttgtgatctaatatcactagcttgttcgaaggagatatgctttcaccctccttggtcttcgaatgttaatgggttcgcatgtgatacgaacatgacctcctttagtcaacgaaatgtgtctacttgtttaagtggtaaagggtcgtttgcttatggaatctatttgggggctcttcctgttatatcgagcaattcgcttgctgtcaaaattctctatcctatattttggggactcatgacactcagtacttttggtaacgatcttgccccaacaagcaatggtattgaggtgatattcagcataatcaatgtcctcagtggcctgatgctcttcacattgctgatcggaaacatacaggtatttctgcacgcggtcctggcaaggaagcggaagatgcagctgcggttccgagacatggaatggtggatgagacggaggcagctgccgtctcggctgaggcagagggtgcgcaaatatgagcgcgaacgctgggccgccgtcacgggagacgaggagatggagatgatcaaggatctgcctgaaggactgaggcgggacatcaagcgctacctctgcctcgagctggttaagcaggttccgctgttccatggcatggacgatctgatcctggataacatctgcgaccggctgcggccactggtgttctccagcggggagaaggtgatccgagagggcgaccccgtgcagcgcatggtgttcatcctgcagggcaagctccggagcacgcagccgctgaccaagggcgtggtggcaacgtgcatgctaggggcgggcaacttcctaggcgacgagctgctgtcgtggtgcctgcgccgccccttcgtggaccggctccccgcgtcgtcggccacgttcgagtgcgtggaggcggcgcaggcgttctgcctcgacgcgccggacctgcggttcatcaccgagcacttccgctacaagttcgccaacgagaagctcaggcgcacggcgcggtactactcgtccaactggcggacgtgggccgccgtcaacatccagctcgcgtggcgcaggtatagggcccgggcatcgacggacctggcggcgatggccgcgccgccgttggcgggcggacccgacgacggggaccggcggctcagacactacgcggccatgttcatgtcgctccggccgcatgaccacctagagtgatcaggaggggggacgggaccatcctagctgtgccggccgggtcatggtgtctgtacagtgtacactagtggtatgttgttgtcatcttctgcgtgagtgaactggtggttcgggatttgtcatttaaagaaggtcaataatggagaaatagtttcttagcccgattcaattgtcttcctttcaccaagaataaaaattacttctgccggactgcctctccgcgttggtctggattgcttttaccaagaataaaaattgcagccccggctgcagcggctgatggcaggacagattcagacgcgcagagaatacgtacaagtcgccgaag

SEQ ID NO: 32955 - DNA, 2552 bp, Zea Mays
cgttccaggtcgtggtctttgccaaattcccacgcccctgcccaccctgcccgaatcctctcgccctttacccccgcccgcgaccccattcacactctcgctgctccactccgctccgctcagctcgtcgggacgcgcccccgcctcccatcccatgcccgcccccgcgctcgtcggaggccgctcgcggcggcctcccatcccgccgcgctgacgagagggcctctcggtgggggcgcttcgggtgttcattttgtccgttcggggaaggggagtgcggcgatggggaagcagcaggaggggaagcggcggcgcggggagaaggacgggaagcggaaggggagggggaagacagctgcagcggcggtgccggaggacgcggcgccagtggccgggtgctggatccgcttcccgcgcctccgcggctgcatgccgtcgcgcgccaaggtcgactcctccaccagcgcgcgtggcggcggccgggatgatatatctacatgtgtagaaaccaaaccatctactgatgatgcttgccaggaccaatcagtaccaccagcctctggttccgcaacaaccagtaacactggaagtatctcaccttcttccatagttggagaggagctaaaactagctttccaactgcgtagatttacttttagtgaactgaaatgtgccacgagaaacttccgacctgagagtcttcttggcgagggaggttttggctgtgtctttaaaggatggattgaggagaatggaactgctcctgttaagccaggcaccggattaactgttgctgtcaagacactcaaccatgatgggttgcaggggcataaagagtgggtggcagaagttgattttcttggaaaccttcagcatccacatctagtgaaattggttggctactgcattgaagatgaccagaggttgcttgtgtatgaatttatgccccgtggaagtttggagaatcatctttttagaagcaagtatcttttaatcttaccattattagttttatatgtaacatatatgctattgttatcttattttttcatttctatcagttaatccatgttagtgtttctgttcttgttatgatagatacagtgtgatgttttaacacatgtggtacagtcacttctattttggtcatcacatgtgcatgagcactttggttttggttaacataagtggtatggacaccttaactgaccagggcattgtttgtcacaaagtttcccactgtgtgagggaatatttttttggtcaatagatagcatttactaacatcttgatctggtactttggtatgtaggaattcacgaggaaatgactaagagtcattgcctctaccatgggccattagaatgaaaattgctcttggtgctgcgaaaggcctcgcttttcttcatgaagaagctgaaagaccagtaatctatcgggacttcaaaacctccaatattcttttagatgcggactataacgcaaaactctctgattttggacttgctaaagatggccctgagggtgataaaacacatgtgtcaactagggtcatgggaacatatggatatgctgcacctgaatatgtaatgacaggtcacctgacatcgaagagtgacgtatatagctttggagttgtactactagagatgatgactggtagaaggtcaatggacaagaacaggccaaacggagaacacaacctggttgaatgggcacgcccttatctgggagaaagacgcagattctataagcttgtagaccctcgtttggatgggaacttctccataaaaggcgcccagaagacggctcagctggcccatgcctgcctcagccgtgaccccaaggctaggcctctgatgagccaggtggtggaggtgctgaagcctctccagaacctcaaggacatggccagctcttcctactacttccagtccatgcaacatgagcgtcgcacagcacttgccaacccatatggcagtcaaagcatgaaagcgcagagcacctttgcgcggaacgggcagcagcccatgaggagcctctcgtatggccctcatgcttccccgtatcgccagtcgccaagacttgacagcaagcggcaatgagtcatggtgcttgtctgtcgaccataacatattttcaagactgaagttgtaaccagaactggtgtatgaactcagccatccaacaagcatctgagctatctattattgtggatgaagcagcaacattgattcgaatttgcatatcatctgcgagtgaatttttctctcttgttatcgcttacattttagctgtactgtctttacggctctagataccttgacttgaaaggtggaactaaacagggttttgatcggtctttgaaacaatgctcaggcagcaaatgcttggaatttgttccttcctggaaaccagcagtaggcaagtctgatatatgttacatagttgtcctaaggctgttcataatctatggtttcttgtcacaatatccaaatttgccacgtcacatattactttaaaaggtatatttgtcccaatacatagtatta

SEQ ID NO: 32956 - DNA, 2326 bp, Zea Mays
aagagcctctccttgattcctaaatccagcatacccttgagagtcttttctttagtcgggtaagtcttgctgagtaattccatactcagggttttattccctgttgtttttcaggttctaaccttgtgttgccgtgatggtgttaagtgccggtgggctcggccttcttataagtctaaggaacaaggcccatgacatttcagtggaaaactctatagtggaggcagtggggagcatccaagaggagccactgctggagcatcatatgtgcatgcagaaggatcagggctatatacgaagttactcgaccgaaagcttggctcttgtgtggggctccaacaagaattagtgagaattttgcactcttcttaatacctcggtaagaatactaaagtcaccgatgaaagtttgtatctctatcacactttaagctcatgtatttacatagtgctaccttggttatatgttataccttttgagcttaggtataaggtagtgaataggtttagaacttaattaggttgcaaaagttttttgtggtagaggtgtctattccgcttcctcggcggtcaccaatgctgctcaatcatttctgaaaatttgtatctctttcctgtcaatcctactatgctgctcattgcccaacatccaagtcgtatgtttccatctgatgttgcccccctttagcacctcttagactccactttgatgtttgatgatggttaggctccatccctatagaagacaatgattcaacatatatcgctttagctgttgctccagccatgtgtgttgctcatgtagggcaccacgaacacgctcgagtgagcatgactatagccatgactcttgggtctaatggttgtgggcttagggccctagcgacatgacatatcgttccctcgcgagccatggtttgctatcgaatcatcccttctaagaggctagggtcgcaccccgccttccatgttgtcatgtcattatactcttatagaattcatagttaatacttgtttcaaccaaacaacttctatctttcccacaaccgtcaactcacaacatcttcctcaacttgcaactagaatctaatttttagaaatttacaactcaaccaagcaaaaccttttgtatggatgattgactctagtgcaagcagaagactgttgattatatatccaagaggtaataataatctatgagaacactaatggacctttagggtaaaagtatctacatatacaaagagactaacatgctagaagtgatacacacatcttaactggtgtcgactctctccctgttgttgtgggttctcaaactaccatcgttctttcactcgctatgtgtgtggtgctagcacaccggcctcgcggtgattttatccctattgttagaatataagtaaatagtccattcatctctattaatttaagcttttggattgaactaattaactataaagagccagaggtctcgagcttgaatcctggttaacataattaaataaaataattggtgtttgctccaattccacatctgagccttgagagaagctcaacatgatgggctgttggaacataggtgaattattcacctatctctatcaatttaatcttttgggttgaactggttagtacatgcaactcaataccggtacatatagatactttggagacgttgttgttggatttatgaagttttgatcggtaatgaacgtgaagaccacggataaacatgttactactcctgatacgctaggacgtgtgactacttccactgcattcgcactcttttttctactatgttacgcatacaatgttaacaatctttaatcttatcttctaattgtatataaaatgtagtctatatatgctaacatatagtgcacatattttcttacatgaacgccacctggttcacgatgaggaacagcgcgaccggggccttgcatgccattggtgcacagcagtgtgtgccctcttggccacatccagaaaagcagagtgagcttcgagaggagctcttgatgactcgattgctaagtgcttgtggtggttggagacggcgttagtagggtgtggtatttgtaagtggccgaaacgaagcgcgaagatgatgtgatcaacttgttagcacatgcatatgaggttgagatgaggattcaggacgccgatgatctgctggatgggttagaactagcgaacaagattgctgtagtggcggacgcaggttaaggtttgcggtttaccctactctattcgcgatctttgccataagccaaactaaggccctgtttgggaacaaagtttttgaaaactacagtttt

SEQ ID NO: 32957 - DNA, 917 bp, Zea Mays
cttgacctgcgggggataagacaaccctcaaatattgtattaagaagaagaccttttcacacaggagatgttttctatgcaagatgggatgaagtattggttggggctactgctgttgtgtctacccttggagggtttggcaatgaagaacaaatgaaaaggataaatggtgaggcaaatgtcatagcagtaaatgctgcaaaagaaaatggagtcccaaaattcattttaatctccgtccatgactacaaccttccatcctttcttcttacatcgggttacttcactggcaagagaaaggcagaatctgaagtcctttccaaatacccagcctcgggtgtcgtgttgaggccaggcttcatttacggtaaaaggaaagtaaatggcttcgaggtaccactcgacgctgtcggacaaccattggagaagttgctctcctctgtcgaaaacttcaccaagccgttgagctcgctgcctgcctctgacctaatccttgcaccccctgtgagcgtggatgatgttgcctatgctgtaatcaacggagtcatagacgacagcttctttggggtgttcacgattgaacagatcaaggaagccgcgtccaaggtacgagtgtgaacccggggtcttgttccacaatctctgaacgtgtgttgtaggtggaaagttcataaacttagcagtaactcattgatccttgtgttctttatttctcgctgaattttgaccatagtcaaccgttcaaaagtcagtgcagcattcttttttctgctggaatctcttgagaaaatatagtttccaaactagcccttaatgacttaaagagctagcaaaatatgtagtactgtgtgggtcaccgaactgttatgttggttcacaatctcgctggaggtgagcggcatgagctcacaaccgaa

SEQ ID NO: 32958 - DNA, 2023 bp, Zea Mays
agagagagtgagagagagagggggagagaaaggttaaggaatccgagctaaggcgccgtttcttctcctcctgcttttttcttctcggcaccgtcactggagggagaggattcacgggacgaggcgacgcggaagggatttcgtcgcttgtgtgggcggcgcgtccgctggttgctttgcttccatggagagggatttcctgggtgcgatcgacagggcgtggaagtgcggcgaggcggcgaaggaggagagccgatcggagccagacagcccggcggcgacgcggtggcagtttgcggcgaggtccggcgtcgcgccggcgttcatgtcgttcaggacggaggcgacgggcgagggctctgaggcgttctcggtctccgagctccggccggccggagacgccttcgacggcatcaagaagcagagctccatgctttcgatctaccagcagcagaggcagtttggccacaacagcagccaggccacggcacagcagcagtaccctgcagcggcgcacaggcagcgctcgcaggtggcggattacggcgcggcggcaccgcatcgtctccctggtggtggtggtggtggatgcaggctagtgcagccggtgtcggtgcgccaccctgtgccgttccatcaggccaacctgatggtcaggtcatcagtgtcgcagagcttccacaaccagcagcagcctttcaccatgagcaacaacgggtttggcggctctacggccggcgtgtacggggcgaggaacccacggaaccaggcctcgacgcagctcacgatattctacaacggctcggtgaatgttttcgacaacgtcccggtcgacaagggcgtctgttcctggtgctaccccgtcaagtgagccggactcgccgcctgttcctgcccctgcccctgccaaggtcaacgtggccgaggtcttccctggtgctagacagatcgcagttcagaaaccggagccctgcgtgccgcatctatcaagcgcggcaactgcaagcccagtccgcatcgtcgtgccgcaagccgtggctccctccaggagcacgtctcactgcgctacagaggcctgcggttccaagcctgctgctgctcctaccagccagacagtctcgtcgtcccggcagttggcagctgcaagtgctgctgcagctgttacgccaagagctgtccctcaagctcggaaagcgtcgctcgcccggttcttggagaagcgaaaggaaagagtggctagcgtcgagccatacctgacgtccaactccaagagcccgctagagagcagtgacgccgtcggcagcgctagcgctccaacgaaatcgtcatccacagacgtcgccccggcgagcagccacaacggcggcggcgcagagcttgtgcgccatggcggatatcccaggagcatcagcttcagcacaaatttgcagatctgactctggtgttgctgtccatagactaccactaccactacgactccgtgtccgtgagcgcgcccctccctacccatcgacacgaaagctggatagctgtcttgctttgcatccggatgaggcgggaggtataggaagatacgatgagatgagagtataaagatgctgagtgctagcctagccgcccgctgtatagcttttgcagcgcgctgctgacaagatcgagggccgtgacctactcgtttcaggctcttcttgaatggtttttttgtcgtggtccattgttgtatattattcaacttgagaaacagagagtgctgctctgtctctgataaaagtttatatgaaattgataaaaagtttctgctttttccaaacaaggtccttactgactcggaagtggtacatggagctggggaggggggctacgtttcggacagaacagataacaagttgaagagagccaattcgataacggtgttgctgcccaaggctgcaatacgccagcaaagtagctatgaacgtaattttgcttgaattatgtgccaaactttgggcaaaaatcataaactttcatcgatattggtagc

SEQ ID NO: 32959 - DNA, 1937 bp, Zea Mays
aactaattttagcggttaactactagttagctactgaagattccaaaaccaaccccccatccacgccgcgatgctccgccgccgccgggcaccgctcctcctggccgccgccgccgcgggcgccgcgctggctgccacctctccctccggcgaaaatggtcgaagcgtcgcctccgcgctccaccaaggcatcgctcgctcctcccgttccgtctacacgattacaagtattcgctgaggggtctggatgctggatcggcggattaccgtgttaagctctccaaggttcatctgcggtcagcaaaaaaactacttaaactatgtgaagtgaatggagggttttatgtcaaagctggtcaatatgtatcttcactaagacaagtgccaaaggagtactcatcaactctctcctgcctgcaagaccaggcaactccatccaagtttcaagatattaaagcagtaatagagcagaactttggcaaggaattgtatgacatgttcatcgaggtcgattgcataacaatcaagatgtagctgtcaaggttcaatatcctggattggagcagcgaatgaagatagacattatgacaatgtcattcttgtcaaaaatggtctcttgggtttttcctgattataaatttgacagaatactaattgaatttgagaaatccatgacaatggagcttgattttacgcgggaggctaagaattctgagagaacagccagctgcttcaggaaaaatagtgttgttaaagtgccttatgtgttctggcaacttacaaccagggaggttttgacgatggagttttgttatggacacaaggttaacgacttggacttcctgcggaaaacagatattagccctacaaaggtagctaaggctttgattgaactctttggtgaaatgatatttgtacatggttttgttcacggtgatccacatcctggaaatatattagtttctcctgaaggccatgggaaattttcactagttctgttggatcatggaatttatagagaattggaccaaaagttcagattggactattgtcggctatggaaagcactgatattgttggattcaaacaaaattctggaattaggcgaacagtttggcgttggcaaatatgcgaagtactttcctgtaatattcacagggagaactatagaaagcaagtcagctcttggcacacaaatgtctggtgaagagcagaggcgtctgaaggaggacttaaactctcttgggatggatgatatatcttcatttatggaatccttgccaccggacttctatgtcatactacgaacagacggactattgaggtccattttagggaatcttggggcaccacgccatgttcggcttctcacttatgcaagatgtgctatacacggtcttgagaagcagcacaaaatggagtctggtgcaatcagacgtatgttcttgaatgtcaaaacaaatgtcagctatctccgtctgagagtgattattgaaatagcggtattattagctaaagcaaatggtgccaagcagaaagtcgtgaacaaactcagacagatgttacaggagaccagtcaaggttttcaccgccgtatgtgatgcccagaagtcagcgacgtggtgaaattaaggctacgagaaaggtgggggaagttggaagtacgtcaggactccggagtagaatcataactgtgattgttctgtttcaacttgtaaattggaggttgtattgtgtcaaggagtccaatcataactgtgagtgctctgttgtaacttgtaaattctacttctacgtcgagtctgcgctcgagagtccaggtgttttttttttgttggaccaagtacgcatcccaaaataagtctacatcccaaaattcgaggagtcaaacaaatcttaatttgaagtttgcctaaatttataaaattggtattaac

SEQ ID NO: 32960 - DNA, 3734 bp, Zea Mays
ggccagcgttacggcgcgcaaacctccgcctctcccctcccctgtcccctccaatcctccattctccggccaccctcgcttctccgtccctcggcaatccgcttgtcccccgttgcccgctccgttcagaagcgcctcgccgctgaccggtcgtgacccgcctcgcacctccgccttctccgtccctcgcggccgcggctgccgccgaatggaagccgcctcatgctgccgcgtcttctccacgcagcggtgccgcttcccgctccgcaggctgtcggcgccgccgtggccgcagccgttctgcaccgagtccagcggcggcctcgtcaccccgtcggcctccaagcggaggtccaggggccccgtcatggccgcgaagaaggccgcggagggcgaaaaacaagaagatggaaaatacaagcacactgtggatctcccgaaaacaacatttgggctgagagcgaattctgtacagcgggagccagagctccaaaaattatgggacgataatcaggttctgaaaagggtttctgaaaggaacactgggactgcttttgttctccacgatggccctccctatgctaatggtgatcttcacatgggccatgcgctcaataaaatcctcaaggattttataaatcgctacaagctgcttcagaatcataaagtgtcctttgttcctggttgggattgccacggccttccaatagaactaaaagttttgaagtcaatggataaggaaactttgagtgctcttacacccataaaattaagacaaaaagctgcaaaatttgctaaagcaacagtcgatgcacaaatgaaatctttcaagcggtatggtgtatgggccgattgggacaacccttacctaactctgtcaccggaatacgaagctgctcagttggaagtgtttgggcaaatggttatgaaaggatatatctatagaggacgaaagcctgtccattggagtccatcatcacgtacggctttggcagaagctgaactggagtattccgaaaatcacatttccagaagcatatatgccgcattcaagattactaatccatctaaatctgggatgctagacgatttttttccaaatgtatctttggtcatatggaccaccactccatggacaattccggctaatgctgctgttgctgtgaacccaaagcttatttatgcagtagctgaggtacagtctgtatttgaaagtgagtcaacatccggtggtaaacaaagaaaagttggaaatatattgagttctgagaaaggaaaactgttcgttattgtggcttctgatcttatcacaactcttgagtccaaatggggtgtgaagcttgtagtacacaaatcatttcccggatctgccttggagcactgcaggtatgcccatcctgtgaatagcaacgaatgttccgtcattctaggaggagattacattacaactgaatcgggcactggccttgttcatactgcccctggccatggccaggaagactacataacaggtttgaagtatgggcttcctatcatttctcctgtggacgatgaagggaacttcacggctgaagctggacagttcggtggtttgtctgtcctgggggctggcaatgctgcagttgtgaagtatctggatgaacagtattcactcattttagaggaaccatacaaacacaagtacccctatgactggagatctaaagaaccaactatattccgagcaactgagcagtggtttgcatctgtggatggttttcgtgatgctgcaatggatgcaatcagacgagtaacttgggttccttctcagagaacttggggtgtccctattccagttttttaccatgtggactcacaggaacctcttataactgaagaaacgattgaacacatcaaggctattgtgttgaagaaaggtagcgatgcatggtggtatatgacaactgaggaacttcttccagatagatatcgggacaaagcatctgaatatcgcaagggaactgatacaatggatgtttggtttgactctggctcttcatgggcagctgttttagcaaaaagggacggtcttaattttcctgcggatatttatcttgaaggttcagatcaacatcgtggatggttccagagctcattgttgactagcattgctacaacagggaaggctccctactccagtgttattacacatggatttgtactggatgaaaagggtttcaaaatgagtaaatcaattggtaatgtagtggacccagagaaaatcattgttggtggcaaaaaccatagggaagaacctggctatggagcagatgttctccgtctatgggtttctagtgttgattacactacagatgtgttgattggcccacaaatcttgcgccagatgtctgacatgtatagaaaactacgaggcacgatgcgatttcttttgtcgaatctccatgattggaagccggataattctgtgccgtacaatgatctgccaaaaatcgacaagtatgcacttttccatttggagactgtcatgacttccatgaaggatagttatgaaagttatcaattctataaagtataccagatccttcaaagatttgctactgttggtttgtccaatttctatttggatgttgcaaaggatcgcctttatgttggaggccgagtcagcttcacaaggaaaagttgtcagactgtgctcatggcacatctgctctaccttgttagggccatttccccgattatgcctcacctagctgaggatgtctggcagaacctaccctttcaatacaccttgcaggatggatcccttgcaaactttgtttttgatctgaaatggccagaaaagaatgaagaatggctctcggccccgaaggatgatgttgatttcctgggtgttatcctggagttgaggtcagaggtcaacaaaattttggagaatgctcgcactggaaagttgattggttctagcttagatgcaaaggtttatctccataccgaaagttcagatacggtattaaagctaaaggagctatcttctgcatccaatgatgcagacgctctgcatcgcctgtttatcacatctcaggtcgatattcttccaatcctaaatgaagagattacatcatctgtaccatacacaggaaagttcagtaacccacgcactggagtcatatggattggtgtgactcgtgcggatggtgcaaaatgtgagaggtgttggaattacacacaggacgttggatctttccatgaccatcctactctctgcgttcggtgctatggtgtcattgagttgcagacacaacctgcggccgcagctgtcagttgaaaggagtgatgttaacgtatcctatcgaaccatctaattttgaggatcattggtggaattcattcttttggagagctttcacgctaccatgtggcggtagcctgggactccagcttgaatcaagttttgcatgcagcaagctgtactttagattcttcatacataggtcacgagagttgtttggagcttgggtcatcgcttactttcccatactactggggggcttatttggaacagttttttacacaaaactcctgacctgtaaatcaattttggaaaaccgtatccggtggtcgatccatgtattaatagagtaataatgttactatgttcatccaaatctcaaagacgtgatggttgtgttgaaaaaacagcttgaatcacttgcttatgctcaactgttttttct

SEQ ID NO: 32961 - DNA, 238 bp, Zea Mays
cttcatgctattaattctccttacacaataatcattttaaacttgagtttcacgtgacacgaccactttatacttatgtacacaatctattcatcaaatcaataattaagctaacaaaaatatgaatcggcttaccatactaactctgacgtgctatccgcgaacacggcaaggattctagttcgacccttgcgtcgagcacttggtgaatatcacgctgcaaacttcgtcttcaccc

SEQ ID NO: 32962 - DNA, 3768 bp, Zea Mays
tttattcggtgttcgagactagaagcctggagaaacgtttgttgttcttccagaacacgccctcggaatcctatcgcctcccacagcacacgacgcgcctttgctgaactctctctgtcgccatgctgccggcggtcgccgctgcatcccccggcctctcacatctgccgcgctaccaccaccttggccgtcgctttcacctccgccgccaccgccttctacctgctattccggccaggctatcgtgtggggccacccacgcccgccgccttctccttgccggcgcgttcgcaaaaggggagggttcttcaggacaggatgttgatcactctgctggtgccacaaattctgggtctgcataccttggtctcttcgttcgattgcttggcttggataatgacacccgtgatagggagcatgctgtttgcacactctatcaatactcccttggtggaaggaagagcatcgatgagataatgcaattccctggttgtattgttctcatcattagcctcctgaaatcagagtccattcttgcctgcgaagcagccacaggtcttctgcgtaacattacgtcagttcacatatataggaagatggctggtgagagtggagcaatggaagaaatcattaatcttctctgtaaatctacaataacccccaagattctagagcagtgtttgtgtaccatttggaacttttctattgatgaaaaatggaggtacaaggttctgaagagcgatgtcctaatgaagattgttggttacctggatgaagaagacatacaagtcaaagaagccgctggtggtatcatatcaaatttagctttgagttcctctagtcatggagctttggttgaagtaggcgtcatcccaaaattggttcatcttttgcaaaccaaagaagatgactataagattattagaaaggaagctaaaagttcactaatacagctggccactgatgattgttactacagccttataatagaggagggtctagttcgggttcctttggttggctcagctgcatataaagcctttaaacctctccctcattcatggccctcttttcctgatggctctaagattcagcggagttctcatccctcaaagtacggtgctaccgaactgctccttggcttgagtgtcaatgagaacgatacaaaaccagatgaagctaaaattaatgctatgataggacgttctaatcagcaattccttgcacgtgttggagctattgagttggatgatcaaggacaagaggaatctggatctgaaaagaatgacatgtataccattttgccatgggtagatggtgttgcacggttagttttaatccttggacttgaagatgtctctgcaatcaaaaaggctgctagagcaatgggtgatgcatcaataaatgaacatatgcgtacctcattcaaggaagctggggctgttaaacctctacttcagctgctcaagcacaaagatgtacatgttagagaagctggtgcttatgcgttggaaaaattatgtgtaagtgccacagtctgccataatatcaaaacagaaggtggactagaattgcttgtaaatatagtcaaggatcgacatactccagtagaactactagagaagataatttatatactttctcgaatgtttgacatggggatttgcatggttgctgtgccggatactgaaggttataaggatagtgaaaacagtgcaaagacatctgttaaccaagagatgtccagcgagttgatctttgattttgatgctatctcacacttaacggaagttctaaaggaagcatcgccaaggttgcaagcaaaagtctgttgtgtacttgaccatatagcagcttcggagcaacatgccaccgcaatgactgctgcttgcactggttcagtaattgaagctattcttgaaataggggttattcatgggaccagaagtgactctgagaactttgaaattcctagtgtagttataaaagaactcagtgaggctgtgtctgcagctgtgaggttactctcaaagttattgaactttgatcttttcatccgcagcataaacggtgaaaaaatcacttctttgctaagaagaacgctcaaatcaaatttcccccttcagtcaaaggattgtcttgcggcatgcctcattaagctagaatccagagctggcttatcaggagatcatggtgttagtagtatagatatggagataactatctatgagactattccaaggctaattgagcaaatgatgatatcactttcgtttgaaaataaaagaagtgctgtaatagagctcaacaagataatatctggtggtgtgctggaatatacaagagcagtggcagattctggaggcatatttccactggtgaaaatgcttgaagaggcggatggagatgcactggaggctatcttatctatcttatataatctgagcatggatccagagaatcacccagcaataattgctgctggagcagtgcctctgttgaagcggattgttcgtacagaagccccacaatggagtagtgcaattcagctgttgagaacattgcctgtatgacattgatgaagaaaatggccattcatcgccaacaaacattataaactgcacttagggcctgtttggtttgatggctaacttgccacactttgcctaacttttgtgcctaaggttagttcttcaattcgaacgactaaccttaggcaaagtgtggcacatttagccacgaaccaaacagccccttagtgcatgcacaggtacattgttaagatttcatcagtgtctacacgatcagtttgttccaaatgcctctgcgattatgattctttgaggttgttaatcactagggatgctagtcaccgtatcacttttacatgtataccttctctcttaacattacaatggtagaggataaccataattggagtacatatttggatatggatacaaggtttactgcctttcttggatgtttaggagacaaaattgatgcaaaaataaaattcaattagtactcacaggactactagctgctttgggaattttctggaatatataaaaagaagtgaactcaaaaccattcaactttttatcttagtttcagttgcgcattgctgaatttaacatatgtgcaattaagggttggcaatcataatactcatggatagaagtagaatttgtgaaggttctaagaatttattttctggtcctccttgatgactcgacgatgatcagagcatagggaggcatacttttatcttcgaacaaacctttggtggatatacaagtatttgttgactgaagaatccgatgcagcagaaaatgtctttgaaaaaccaatttcttagattgaggttgcggttgaacctagctccagctccctatcatcatcaaaatttgaattttatgatctggaagaaagcatcagcaaggcatttcctccaaagtagcgatatatgctgcccttttggctagttgaaaagcacaccggggcctgatgtgtccttttgctcacatcacatgccacggcaatagctagtaccacgaactattttggataccggcagtttgctggttgtgagaggacccaagaaagttcaaattgtagcttgctaaatcgtcgtgtttcgacactaggtgactttactctttaaaaatgctatcctttttgtgtaacctgaaatcctgaataacctccacggtgccaatatcaaaagaatctctttttgactccagctggggtaatcgtgaggca

SEQ ID NO: 32963 - DNA, 1576 bp, Zea Mays
ccgcggcggcggctgacgggctgagaataggagagagaaacccctctttctcttcctctccttctcgacgaacccgtcccacaagcacgtgcgagccaaggcagacaagagcgaggtggagagagggagagagagtgagtgagagaggaaaaccccgcccccgtccaggcaaccttcgtcgacgcatacggcggaggccacagaggcgccacgcgagggagccccgccgcagcagcggccgcgaattcggcacccccggatctccttgccggcgcccggggccccgatcgcctcctccccatggtcgtgcccctccgggcgttctcctcgcgcgggcgcctgccatgtcggacctcgcttccaccagcaaggataaacttgcgtattttagaataaaggagctcaaagatatcttaaatcagctggggttgccgaagcatggaaagaagcaggaccttgttgacagggtattggcagaattatcagatgagcaaggtcaacgccatcatggatggggaaggaaaaatgctcttacaagggaggcggtggcaaaagttgttgatgacacatacagcaggaaaatgcaagtatgtgctcctgaccttccctctaggagtcacagtgggtcagatttcaatcattttaggcccaaagaggaagccactgacttctactatgtggagactaaggtccgctgcctttgcaatagcacaatgctaaatgacaagattatcaagtgtgaagatggcaaatgccagctgtggcagcattttacctgcgtactcattccagatacacccacggagggtgctggccctgatattccacctcatttttattgtgaactgtgccgactgaaccgggcagatccgttttgggtgactacagcaaatccactactacctgtgaaatttatctcatctggtgttggaaatgatggagcaagcgcacctcaaattgtggagaagaccttccaactttcccgagcagaaagagaaacagtccagaggccagaatacgatctccaggtttggtgcattcttgtaaatgacaaagtccagttcaggatgcaatggcctcaatatgcagaattgcaagtgaacggtattcctgtacgagtaatgaccaggcctggttctcagttactagggataaatggacgtgatgatgggccactggtaaccacatgcagtagagaagggattaataaaattagcttatcaagagttgatgctcgaaccttttgctttggagttcgaattgttaggaggaggactgttcctcaggtattaagcttgatcccaaaggaaggtgaaggggagtcttttgaggatgctcttgctcgtgttcgtcgttgtcttggaggtggaggtgctacagacaatgctgatagtgatagcgatctggaagtggttactgaatctgttacagtcaaccttcgttgccctaatagtggatccagaatgaggattgctggaaggttcaagccttgtgttcacatgggctgttttgatcttgaaacttttgtggaattgaatcaacgctcacgcaagatgcatgcaaggttcgccaaact

SEQ ID NO: 32964 - DNA, 1409 bp, Zea Mays
cttcctctccagtctccacgacaacaaccccacccatctcctccttcacgaaccttctagaaccccgtccagaaccctacccaaccatggcggcctccctcctctcccgcgccgccgctgccgccgcggcgctgcgcggcgcggcccggccgaaccacctcctcgctcgggcctccctccccaagggtcgggtcgggtgggcggcgcgcgcggcggagggcgccggtgggccccggtgcggcccgtcgccactgctgggcgcgttcgggatcgcggcgcggtgcaacgccacgtcgtcttcgtccgcggtgtccgaggccaccggcgtccacacagtgcccccgacggagcccgtggtgtcggccgagtggctccacgccaacctcaaggaccccgacgtcaaggtacttgatgcctcttggtatatgcctgcagaacaaaggaatccattacaagagtaccaggtggcccatatccctggtgctttgttctttgatgttgatggaatatccgacagaacatctagtttaccacacatgctgccatctgaaaaggcattttcagctgctgtatctgctcttggcatctacaacaaagacgggatagtagtttatgatggaaaggggctgttcagtgctgctcgtgtttggtggatgttccgtgtatttggacatgataaagtttgggtgttggatggaggtttgccccaatggcgcgcttctgggtatgatgttgaatcaagtgcctctagtgatgccatcctaaaggccagtgcagctggtgaagcaattgagaaagtttaccagggtcaattggttggtccaaccacatttgaagcaaagttgcagcctcatcttctttggagtcttgatcaggtgaaagagaacatcaacacccagacacatcaacttatagatgctcgatcaaaacctagatttgatggtgcagttcccgagccacgaaaggggattagaagtgggcatgtgcctgggagcaaatgtgttccgtttcctcaggttcttgacagctcacaaaagctattgccttcagatgagctccgtaaacggtttgagcaagaaggaatatcacttgatcagcctcttgttacctcttgtggcactggtgtgacagcatgtgtattagccttgttgcaactgctgtttagtctcttcataataggacgcccgtgctcttcatagaggacctcttgattgtatttgccccgtgctgtgattctatggaggttggttggatgcttggatgtaaggctggggaagcgaagccttttggccttcactgtaaaagctgcaacagaaaaactgtcacatgcactgaattataagataactccccttgatctctcgtcttggttgattaataatgctaaagtttgtctgctgtatgtgagc

SEQ ID NO: 32965 - DNA, 685 bp, Zea Mays
cacaaccaaaactgtgttgattacgagttggggtatcacaaactgatgaacgacaaattcttagatgacaaatatgatctaagcaaaacccaaacactaatatggtggtggttgctgataaaatagagattaggggcgtgcatgacctttggttgcatccctaatatgctccaacacgatacatggcccaacagcccaacatacggtgttgcaacactaaaacagaatctgaacgctaacttgtttcgacgattcctgttgactccggatgaattttaaggtgattccagttgggttggaaagcgtatctccttaggtttccatccatataaagcataacctaatcggagttcggatgcatcttgggcgtctgttttagtgtagactagtcctagacttcgaggtggagacgaagttgagtcagacttggatttctcttgttgtgaatatcctagcttctcgtccttgacatcttggcctttcccaagtccttactagtcctctccaaggttcctaatcataaaaacattcatggcatcaagcgtaagctctaaaacacaattgattaggtaagaatgaacctagaggtttagttgtcgtgcacatgctcgtgttatcagtccatgctttatttttatgggagtgatgtcctcatcatcttctaaccaggcaaccctaggttgcc

SEQ ID NO: 32966 - DNA, 885 bp, Zea Mays
tggggcagcaatgaaggcgatagatcaactatcgaccttggagctcctccgtcaggaaactgcaagtacatttgtgaaactctgtgagaaaagattgttctacacaaagagaacagaaaccttgactgtcaaactacaggagcaacaggaatggtttagtatgaagaataagattactagacaggagccacatgttgccaaatctcagagcaagcaaaacttcattgaagtttttaatcaaacaggaaagtgatgctcagaacaagcccgggaaactctacacacaactggtgtcagctcagctcaagatccaagacatcaaatcacaaagatcagcgcttcttttagaaatcagcagaatcaagcagattctggagcaagagaaaaacataattcctggttttcccgctgcactacagcagatggatatgaagtcattggaggaggaatacaaagctctgcaaggtgataaatcgggggaagttgagtacttccagtctcttgatgaaacaattaatgggatgaaggggattttggatcctgtcaaatgccaatgtggactggagtacaacttaaaacttgatggtgaagccatggatataagctaagcaagaacgaccacatacgcagatgcccatctccaccagatttcgtgcattttagatctgtacagtgtgagagatggattattctttggaaggtacagaatcttctcgcatgtatacgggtggatgctttgggcagagcttgacagcgtcatcgcgaataatatagaattctgatgttagaactatctggagcttgaacggactatacggccatagttttgttcaataattgtttttccttacgctcaaccgcttgtccagattgcagacataaaag

SEQ ID NO: 32967 - DNA, 363 bp, Zea Mays
gatttcggaacagagacacccgtccacggagagttgcggctaggtagtggggacgaattccggcgagcaattcgcaccaaccccaccaccaaatgggcccgtcaccgccacgcatccgttcggcttgatcacgcgatgcttcttgaataccgaattagagcctaacgctggtgaatcggggatttcgtttccccgcggcggatttgctcccggcaatggcgtgccccggacggatgaacgaaggaaggagaggatgcggcgcgcggcgaaggggcatggaagtcggattggtagtacggcgccgtgcggagcacgagaagcgttgccattgcaggtgagcttctggaagcttgggaatggcgg

SEQ ID NO: 32968 - DNA, 2609 bp, Zea Mays
atgtcgcggccgctgtacaggggcgtgtcggggatcggcggcaagctggcggcggcggacgaggcgtactacgaccccaaggagcccagcgagaacggcattggcgggggcttcggccggggcggcgcgcggaagcggcacctcgcggccgcggcggtgaagatcggggtcctgctgctgctggcggcggcgctcgtgggctcggtcgcgtgggcggggacgctctacgcggggcgcggcgcggcggcgcgcgcggccgcagccgccgcgcaccgcgggtaccggcggctgcaggagcagctggtcacggacctgctcgacatcggcgagctcgcgggcggcggcgtccgcgccaaggaggcggaggtgtgcccgcccgagtacgacaactacgtgccctgctactacaacatcacggacgccgtcgacgtctcggatctgggggccggcgtcgtcataagctacgaccgccagtgcacgcgcgacggcagggtcacttgcctcgtcgcgccgccgcggagctaccgggttcccgtgcgatggcccagcggcaagggcttcatctggaaggacaacgtgcggatcagcgggcaggagttctcgtccggaagcctgttcaagaggatgatggtggaggaggaccagatctcgttcccgtcggacgcgcacatggccgacggtgtggaggattatgcccatcaaatcgctgagatgattgggttgcggaatgaattcaatttcaatgaggctggggttaggacagtccttgacatagaatgtggatttggtacctttggggcgcatctttttgagagagatctcttgaccatgtgcattgctaactatgaagcatcaggtagccaagtccaaattacactggagagaggcattcctgcaatgattggttcatttgcaacgaagcagcttccgtatccctatctttcctttgatatggtgcattgtgctaaatgcaatattgaatggtacaaaaatgatggcattttcttggttgaagtgaacaggcttttgaggcctggtggatattttgtatggacatcgaatttgaatacacatagggccttgcgagacaaagaaaaccaaaagaaatggacagccattcgtgactacgctgagggcctttgttgggagatgctgtcacaacaagatgagacaattgtatggaaaaagacgaataaaagggaatgttacaaatcaagaaaatttgggcctgagctatgtggccatgatccagaatcaccatactaccaaccactaagcccctgcatatcaggcacaagaagtcagcgttggatccccattgaacaccgtaccacctggccatctcaggctaggcaaaactcaacagaactggacatacatggtgtgcattcagaagtcttcgctgatgataattcaagctgggactccatggtgcgaaactactggtctttgctatccccacttatattttcagaccatccaaagagacctggtgatgaagacccacaaccaccatttaacatgctaaggaatgttttagatatgaatgctcattttggtggatttaatgctgctttactgaagtctggaaagtctgtatgggtgatgaatgttgttcctacaaatgccccaaattatctaccactaatatttgaccgtggttttattggggttcaacatgattggtaagtagtagtacatgatcttttgtcctttgttgatttgaatttgttttacccttttttgtttcaggtgagtgctctggtaatgctaaatcttgaactaccttacttgacaaagttttccaaactaaacttcatatgcatagtcagtcataacttggaaatgttaatacatgcaaattttaggcatatggaaagttgttgatatagaggaattagagcatcctcaatttcacataattttattagagtacatggagattgatgcataatcaaagtatcaatttgatagacaactttcggcatatcaatctttggatcatcctccagttaaatgatcgatggatggacatgtgttaggtgtgacgcatttgcaacttacccaagaacatatgatatggtgcatgctgatggctttctatcacttgagaagacccacaagcatagatgttctactcttgacatattcttggaagttgatcgcatcctacgaccagagttattgtctgagcagaactgagtacaaagcttgggacgaaaacacgggaaggtgccattagattggttagtaagtgcatgctgcagagaacaggcttggtggcaaagctttccaggccaaggttttattgccaagacacagagatgaagccatgaaattactttagtggtgaaaaccatatccaataaagggatgacgctgcggtgtacataatcgcggtcaatgtgccatataggtataattcgttttctccttattacagtttctctctctctttttttttgtagttgtaccgatttgtttttgtatcttgtatgtaaattgattggtctatatactggtcatcccagactacagtctagtgaaaccaatataattattatttggagatgaatgataagcaagaacactttataactgttgcacta

SEQ ID NO: 32969 - DNA, 4348 bp, Zea Mays
cgaggtgctgccgccgcccgcgcgcgggacgctcaaaacagccgcttccccaaccaaaaggcgcaagaaaactcgtccccgccgctcaaaaatctcccgcctcccgcggatgggatggcatccagtttcacagaccacacgcccacccgctccgccgctcgcgcccaaaaattttcgttcagccggctgcctgccccccaccaccacttccctcccgttccgaaaccccgattagccgccgacccgccgtctccccacgtatttgactggtgctagagccagcgcccagatcaaccttcctgagtccatcggcaccgcatctgcctcgcgatccgtctctctctctgtcccctcacggccgtagaccttttcgagggcggtatcggagggaggagagggggaggcgaaggcgggagtagtagaaactaggaagggccgttcgtgtcttgcggagaagatggagaacctgaggaggttcctgaacccgctggtgctcaacctgcagaagatggagctggagctcacctgccccgtctgcctgaagttgctcacctcgcccacaacgctgccgtgttaccacacatcctgcagcaagtgtgcccttacaccgacttcaaaaggctacagctgtgccatttgcaaatcaggctattgttctcaagatttaaggccagcttctcaccttgagtcgatagtgagcattcataggagcctcagctctaccgtcagcaccatgattgaacaacaggattctcaaattaacattcatgttgcaaaggcagcatctcatggaacaccagaatcaggaaacagaagtggggtggaggagaaatctgaccagatgaaatcttacaaccctgttgcttcaaagctagtatataaccaaccaactggacctgcatttgggaacattgatagtgttcaagcaaaagatcctgcatttgagaacaatgctggtgccgcagctgttgcaccaatggcttttgtacgaaagggtcattctgggtcacaatcttctgatggccctggagatttggactgtgacagcaatgacctcgaaggagaactgatgacaagcctatcacctcttcaaactgcattgaaacgagaggcaaatgcaatggatgatcataccagagaattgaagaagcaaaaatcaaatgatcaagttcaaagacaaacaaacatggccagtgcttggaaatgtgagttctgtcattcttcccaagttactgagtgtactggccctttgtcacattatttgaatggggagccagtagaagctgatcaagcttggaaatcaagtgttcagcatgtccatgagaaatgcattgaatgggctcctcaagcattctttactggtgacaccgcaaacaacttggggcctgagttggcccgtgcttctaagatcaaatgcagtgtttgtggcttaaaaggcgcagcacttggctgccttgtgaagagctgccgcaaaagttttcatgtcccatgtgcctacaacatcaaaggctgcaaatgggatcaagagaactttgttatgctgtgtcctacacattcgtcaaaaaagttgccttgtgagagattaaagccaaaaaagaaggccaagctgcagcaaccatcttccgacattgatggtccgatttcaccctctccgatgcaaagggctgaactttggactgcctcaccttttctgactagtgaatgggtgatatgtggatctgcgctcgttggccatgagaaggaaatcttggatcagtttgagtgtcacactggcatcacagtaaccaacacctggagttcagatgtgactcatgtgattgctaatacggatgaacgtggggcatgtgcacggacactcaaggtcctcatggctattttagctgggaagtgggttctcaatgtgaattggctgaaagcctgtatggaggctagggaaccagtcccagaagagccctacgagataaggtgtgatgttcatggctctgtcgacggccctcgctcaggaaggctccgagcgatgcagcaggcaccaggtctgtttgctgggttgaccttctacttcagtggccatttcatgccgggatacagggccaacctcgaagatttgatcgccgcagcaggggggtccgttctggagaaggccgagctctctagcacgtccttgatcctctacagcatggaggcgccgccgccccacaacaacctagacgccctcgagaccatcaacaagagattagccgaggcccaggaactggcgaccacggctggctgcaaagccattcctcatacatggcttctggactgtatcgcgtcgtgcgcggttgagttgaacgtgtcgtgttctactgcctaggttcaaacgtaggaatgtgacatctgctgctgtttttttttgaaaaaggagattaagagacgattggcttgttgtcttgatccaaagtatctttagacgttgtagcatgaaagcggaatttagtcggaataagcctgtgtatcttagtcaacgttactgtcggtgatgtcatccacatgtttcacctactgacaggtgcagtttgtctgatttttttcttcttgatttgtatctaaaaaaacataaaaggatgcactcagatccaacgctccagacggcgccatctgagaatttgcatatctgcctgtgggagtgaaatgattgtggagtgcattggaaacgaagcaaagcgggatggctgagctcaggtggttgcttcagaagtagttcaccagcaagcagccgggaggtcaggtccccctcacgcccctcgtgtgtgggtgtgcccacggcatggcgttcttcagcagcggatcccgggtgctggtcgaaatcctgacgaggatgcagagcgctgaaagaccaatgcctgtcgaccacaccttcttcgagtcgggatccattcgctaccatgtggaggcttcagcgtcggatcccgagaacgtgttcctatcgatatcgacgccatcgctctcctacgactacgaggaggctgcagctgctccctcgtcgagccgcctgcctgagctgaccctgcaggaggcgaggaagacgtatcacaggttcgccgagatggtggagccgccgagggaagggtacgtcctgacgctcaagctcaacttctccggcctcacccggcccaaagatcgcgtcaaggccattaaccaggtgtcgctgctgcaatccgtggtgctgagctcgcagctgaagcacatgctggggagcctcggctcgtcgggcacgatgaggctcgtgtacaacaaccagagggagcccttcttcgtcagcaagacggctgagaagataaacgctatcttccccatgcgtttcagggatgacacggacctggccatcgccacctccttcttccaggagctgcaggaggtcgggaactcgttcgcgagggcgcccaagtgcagctggtcgccgatcccaccgccggagctgcgcggggagaacgtgcaccacctcaccaccaacggcggattcgtctccttcggcgtcctgtcgcggcacgtgagggggaagcggccgccaagaccgcgtggatcctgctcaacttccagtcctacgtcaagtaccacatcaagtgcacccggagccacgtccagagccggatgcgggagcggctggaggccctgacggaggccgtccagaacgcgaggctgcgagggaatagcggcgacgacgacaagaagcggtcgtcacaagttgtgaagaagaggagcaagagacgtctcgccagcctggcgaaagcgagcgacagggtgcgcaagggtttcagggccgtcctggacaagatgaagcggctgcggctgagggtcagggtgaagggcctggaccggctccggcggcagttccggtgccggtgcttcgccgtgcctaggctgcccgcgccatctcgcaccggcagaaggaaggagcactacagataccacaaactggccgagtaatctatatatataccgaactttggtcatcgacgacgtcgattctacgtactgtattaactgatgatgagcatggctgctagtttaatagcgatggcactccgctattatatctagcattggagcgcaaaaaagagtttagatcttttctcctcacacaggcttaaaaggttttagcctctgcctaatgtggtaggcttagagttagagatggacattgaagacgccttaagtgtccatgcttcagtgttgttgcatttgagctaatttgtacctgtacttttagtgcccgtttggcacagctccagctcctgattctaagcgaggatctggaggagccgtgccaaacgggtattttttaaaccgattctcgtgtgaagccgaa

SEQ ID NO: 32970 - DNA, 529 bp, Zea Mays
ttatcccagttcatgcacaccttggggaaaaaaagagatccgggctctacgttgcaattctaattgatatcctgccaagtattcttcgagaggtccattcaaaaaaaaagtattcttcgaggcttgtgcacttctgtcactcttttgtgtagcccgtgtttaacttctgggcggtatggtatcaagagtacccagatgtatccgtcgctggtctgaacactaatttaacgcactcattcgcagtatggcaatgatgtggccaactaacggtccctttcaccttttggtatttttacaacagccttgcgcttcagccttcagcttcaatgatatatatggtatggctggcaggataaagacacgcaaacgtgcatgcgcgggtgcaggtgcagtgaaccgaaaacaagcaatctcctgacccttccttgcatttcacgattcggtgaggctagggaaccggttccctgcatttctgtcgactgggggtgaccggggtgctgcatatcgtcgtccgggtccgggtcctgcg

SEQ ID NO: 32971 - DNA, 1467 bp, Zea Mays
caaaatgctcctcgctgcggtttgatcgaggccgcggccccccgaaccctcgcctcgcctccccctcccgccgccgtcatggacgacgaccgcgaccacgaccaggaccccgatgcgtcgtcgccggccgcgccgtggcggcggtccgtgaagcggaagctgggcgcggaggcgggggacgaggcgggccccgcggcgcgggtcgaggcggaggacgagcgcgcggcgctgcgggaggcggcggcggcggcccagtccacggcgtcggcgctgcgggtcgaggtcgaggaggagcgcctcgccgcggccagcgccgccagcgaggccatggccatgatgctccgcctgcagcgcgacaaggccgaggtccagatggagctccgccagttccgccgtttcgccgacgagaagatggcgctcgacgccgccgaaatcgaccagctccgcgcgctcctcgcccagcgcgcgcgccgcctgctgcgcctgcgctccaggctccgcgagtacaggctgcagtgcctccacctcggcatcccgcttcccgagggcgaggacctcgtcgcccagaacgccgccgaggaggaggaggaggacctcctcctgctcgagggcgaggagggctacatcgttggcgatggagggtactactaccctgagctccgctgcaacgacggggagtactactacgaggacgggcgggaggaagaggacgtggttgccctcgatctggagcgccggatctgccttctcgaacacgatcaggaacctcgcctgcttgagccaccgcatgagaaagaggaaggtacccacctttacacagatgaagtgttgccggacatgtctgaacatgaactgggtggcctctatgccgacgagatgttatctaaggaggatgtggaaacaatgaacaacctccacaatgatgatgaagaactgccagagtcgcctactgctggaaatgatgacggggaggaagcaagcgaggctgacggtgctgacagtgtaagtggcagtggcagtgatagggtatacaccattgacaaggtgcatcaaggtgcagcaatgcctattgcaagggtcgtggataagtaccaaggggaggcagtggagccggacattaagaagctttacatgaggctggaggcactggaggccgatagggagtcgatgaggcaggcccttgtggcaatgcgcacagagaaggcacaacttgtgcttcttcgtgagattgcgcagcagcttgccaaagatggagttccagttgggccgggagctggggcggggccaggtgtacaccatttgcctagaaaacacgcagttgggattgtagaaaggagattcacagaggacaagaaggcgatacttgtgaagacattttccatggctgccttgttcaagcataatttagtccagcaatgccagaggatagcactttcagagttctgtttgtaatctgctaatccagtt

SEQ ID NO: 32972 - DNA, 382 bp, Zea Mays
ttcctacccacgctcccgcgacgtccaacggatccccaatgtaccgcataaaaagaaaaaccgactcaccgcagatgggccatcggtagatcccgcctgccgccgacggccaatgcttcgccgccgacgatcccggtatacgactgtccgaaccccagacccggcaccagtgttactacgccggtgatcgcactgcttccactcgcaccgccaatggcgatgataagagcgttacgattgtgctcgggggaactagggaaggaagaggtgggcgcaagcggtggagagagcacgacacacccggcttttaaccacgaagacgaggccaccgagctaggcgcagagaaaatcggggcgtcgttgtaacaaccccagcttcgcg

SEQ ID NO: 32973 - DNA, 2132 bp, Zea Mays
ccgccccctgccctgccattcaaactgtcatcttcttccagctctgtcgtcgtcgtccagtcatggggagagagagaaaagctagctagtagctagctaccctctgtctctgtgtccgccatgcccagcccaacagggtgttgctgctcagtgctcaggtctactgctgccctcccatcattaactcatcatccaccccccctccctccatagtaaactacgctttgcccatctctctctctctctagcttttaccttcttaccccttgtctttctctctctctacaccccccactctctagaaaaggacagcatccccccgtccatccctctagctagctgagctcaagccaccacaagtttcgttccacagacaaagaaacgggcgagagggaaaggagaaagacagcgctctttgtcactcgctcgtctgcaacaagctaagtgtagagtgtagttgcaaagggattgcaagagagagagagagagtgtgtgtgtgatcgacccatggagctcttcccctcccagccggacctctccctccagatcggcctccccgccagcgccacgccgcacgaccaccaccacggcgccgccctcagcgccaggttcctcgcggcagccgcaggcggcggtggcaacgggatccctggcaacccggcggtggccatggcgccgtcgctgcagctgcccatgccgatgccgctgccaatgccgatgccgatgccccccaacgccgccgccgccgcgggggccgccggcggcctttactaccaccccgacgccgccgccatgctgcggcccatacgcggggtgccgctgtaccagcacccgcacacgcacgcggtgccgccgacgttcccgccgcacgcggcgggggcggcgggcccgtgcttctgcgagccttgccacgtcgccgcgggcgcctggcgccgcgccgggtgcggcgtcgggacgcgcgtcgtcgccgggttccccacggcggccaagcgcgccgccagggcgccgcgcatgcgctggacgtccacgctccacgcgcgcttcgtgcacgccgtcgagctcctcggcggccacgaaagggcaacacccaagtcagttcttgagctcatggacgtgaaggatctcaccctggctcatgtcaagtctcacttgcagatgtacaggaccgtgaagaacaccgaaaggccggcagcttcgtcagatctagctgatgggttcgagaacgggtcggcaggcgagatctgcgacgacaactcgctcgatctgcacggcgccggcaggccagagtcgggggcggcgcggcatggaagggaagactggaccggctttcccagcgagtccaacaccgggcgcatgagcatgcattctcgatctctcaaggatcagacgatgcagtccaagagcctggagatcctctcggacatgaactcctcctgcgtgtcggagacgacgtcgtgtgccagcgagttgaacctggagttcaccctaggcccacgcatcaggcactagcgtgcaaagcgaccagaggacgatataatcggaggaggattagctataggctactatataagacggggtgctttgcattgcgtgcgtgcgtgttcatgggatcgtgttaagacggaggatgcactcatggtcccagagagagagaggcagcatatatgcatctttcatcgttaaaagaagctaggccatggacagacaccagcagcagcagcagccaggaaaaaggattaaaggtgtagcatcagcagcagctagctctagggtagtggtagtagtagtggtagagtgaggtgatcgttcgaaagctagctaaacacagatgcaatgtgtgtaatggatggagttgttgtgttagatcgagcgcgtttgcgtttaggatcggaccatctgtttaaagggcttttttcgcagcaacaatgcatgcatatgagcttgcatttgctaggggccgcaggagtacgtgcaaaggaaaaaagggcgggggtgacctgtgttgttgctttctcctgcatcagtcacatgcccttgagcgctccatttgcattttgagctcagcttttctttgtcgtgatgggataaggcgatcaccaaacccttgcaatatatgcttatttgaaggcgac

SEQ ID NO: 32974 - DNA, 3430 bp, Zea Mays
ttgatttgggtgttttgtgtgtccctttttctatatgattcttcatttagctaaaatgtgtgcgccatgctttccagccccaagggaagtcatttttctacttgcaaggatgtttctgcatacctcatggcacttcttgggtatccagagctcaaaccagccactaataagtatgaaagcacaggacaaccttactcgagtgctaacgatggtgatgatagtctattccagtgatccaaatgatgtgaatgaaaggaacttaaacaaagcaaatgtttatcaatgccagaaatgcaatttgactttcggtgaccggacttcatatgcgcaacaccatttggcgtatcatgaaatgagtgttaagaggcgtaggactggcaagtttggtgagccagtagtagggaaagatggaaaatttgaatgccctatttgtcataagacctttgaggaggaaccacagtactttggtcatgtcggatctcatgcaagatatgaaggtttagctcctgaagcattcttggataaggctacttccagaagggcagctaatgattcattggcagaaattccatttagccttcaggaattgactgaatcacatggacagaacaacaaggtttcttatggtgaaaagggttttcagcaccacaatcattcaaataaacatggtgataataaccttacagccattgatctttttggtacaaattattcggataatttcatcaggccaaataaaacttggggtagtcctgaagagggaccttcctgtaatgatgctccaagtgtatctagatatacaaattttacaggccatgctgatgtgatagtttcagaaagggcatcaatctccaataatcaatctgttagcaacattaatggctttatatttagtgatcagccgggaggtaaccatgttgtcagacctactgcctctgtaacagccaatcattatgaggaccagattattgatcgtggcagggctgctccgaatgctgacaataatactgtgaaagcaagagatgtcaaccttaattcatgtgcaagtgcaagtacaatatctttccctattgcttatgcaaataatgaaacatcagctgcccttaatgaagctaatcggtcatcttctactgccaaatgttttagtggcagttttaataacaacgatggtgcatgtagtgcgtcttcctcttgtggaccaaccaataaaatatctagttcatttggcacatcaagcaaaacccaagctgctggctccagaagcattggtgcaagctatgaaccttatggtgaagattgtagtgcccttaaagctaacccttttgccagcaagaacaatacctcagtgtatcagtacaatttggccacacagcctgtctatgcagtggcagctagggcagattgttttgcttctggttcagagcagacaaaaaacagtgataaagaacttgcatccagtgccaagcaacggattgataacgtggagaacagaacaagtaaagaagcaggatttgtcgcggaagcttataatagtggtgcttttaatggtggtattaccgaaaagggttttgcacagatcagtaacagttttactcacataaagtccaatgcttctggctcttgttcactacctgaatcaaaaactccaacaaatggaagtgatagcaactgcatcaagggctctttggttaatagaggtgatgatagcttcacaaaggtctcaattgtcaatagacccatcaacaacaatgaatcaaatgtagctagacttgaggcgatgggaaagttgaatgatgagatgcaaaaccgctataactatcatgctcctggtattgaccctcatgttgcagctagtgctagccggaatgccaatggttttatgcctatgcaggccaattttggttgcatgtcctctacagttcaatctgttgttgatgtttcagtatccagcacatctcaagatcagtgtgatttgcaacttggatttggtgcacagaagcagcagatattttctaaccatggagagcttagaacggctacacctggatcccctctgcctgggagcattgccagaaaagattctgtacccactgaaccctcacattttgggagcatgaatggacctaaatcttttcccactggaacatctcagtttgggggctttgcaaagcctacttttgtgcctgctgcgccttctcagtttgggagcatggctcaagctaattatgtacattctgctcaatcctcccaattcacaagctgggttcaaccgaattctattcctcccgctgaatcctctcagtttggaagcaaagcccaatctagttctgtgccccctgctaatacctctcagttcaggggcatggctggacaaaattctgtacctcctgctcagtcttttgggagcacggttcgaccaaattatgtaactccagaatcctcacagtttgggagcatggccagaccaaattctgtccctccacagtatgttaacatgcccagccaaaattttgtgagctcatccgagccaacactggttttggggtatgcaccacagattggaagtggccctccacctcaagtacagttaggatgggatttgtccttgccaaggatggttactggcggcagcatggtcacttgtttatgtatatggtgcaacagtcagttccatcattttggccctgttgatggacagcagcccagttcttttggcttcatttgccccacctgtaaagataggatgtctggtcatcacagtgtgcccaacaatggttcatggcagccttgaggtgcagcgctgtctggttaatcatctgtattgctgcattcgagggatcttgtggttttctgtacactactcatgcctgtcgactgtcaaggtctgaaaatggtcttctcaagcagcagttgtccgtcctccaagttgagtggactgccaaggaatgaacggcatctctgtatcaacagtgtcagctgggagctggtgtagtagggtaatgagagaagctacttttcaagatagcaatgggagaccatgatgaatccaggccatatttatattttttcttgaatccaccagttacgttacgtgggaatgtcttgagttcactggttgcattacatctggaattttgctgccctcggatgacccagccacctttgcattgggctccgaggatgttgccactcagcttccccatgttttggtttactttgagttctagcagcgatgggagtggcctttgttattgcagtgtcttggtggctgtgtaaagtatgcgttagctctagctgtctcaggtttaatttgtccccattgaagtagttgtgcctttgtcgatgattgctcatttaagttgtgtatactcaagctgaaaaggctgaaggtaattgtaagtgttagctcgacgagcatagcctaacgtcc

SEQ ID NO: 32975 - DNA, 3107 bp, Zea Mays
cgagccccccttgcaacggtcagatccattcctatatagtattcctccgccgccaacctcctgagcatcccatatctgtgtgtgctcaattcgccatccacaaaatcactgcacccgatcatcgtatcaggaggagaaggtaagagacgtgagggagatggaggcggcgacggccatggatttccacacgctctcgcgccgggagctccaggcgctgtgcaagcgcaacggcgtccgcgccaacatgaccaacgccgccatggccgaggcgctgcagggcctaacctcggtcgacggggtcgacgagatcggcacgactctctgtctgccgacggcgacgccaggaaggtcggcgatgaagtcggcggcgaagatggtggccgtcgaggagcagcagcacggtagcccgctcccccgcggccgccgcgtatcggtaaaatcaccagaggccatccggatggaggttggaggagaggacgagatgaaggagaacgtgaagactcccggcgtggtgctgcgcagcactcgccgcggtattcgggccacacccgcgcctcttcctactccggttccggcgtccagtgcgcgcgcaacagcgaggaggactgccgttcgtaggacgggcgaggtggcgccgaccccagccacccggaggagggcggcctctcgcaaagccgcgggggcagtggaggtggaccgccccgccgaagatgtatccgaggacaagacatcgaagatgacgagagctttggatcaggaagccgaggtggtggcggtcgcatcaaaagaggagaaggggcagcaagacgaaccgagagctgctctctcggatgtgaaatgtgatgacccaaagggggaggagaaggtgcagcaagaggaaccaaaagagcaggaggaagttgtccagtttttggaaggggacaacaaagtggaggaagtggaggagggtgaggaagggtctgcagctgttttgggtaagagctgcaatgatcctaaggtggaggaagtggtggttgtcatggaggaacagttcacagagccccatgaaggaattgtgaaagagcaggaacctatcagtgttgagagatctgcttcagtggaagtcatggatgattcaccaatcctaggtgtgattgagaagaaacaggatgcctcagttgaagattgtgaggacttggctgagttctcacctgcaagggagatgactgatgaggccattcctgttactgaagataaggaagtggccatcagtgaggagtctgttactgaagataatgaagtggcaatcagtgaggaggctgttactgaagataaggaagtggccatcagtgaggaggctgttactgaagataaggaagtggccatcagtgaggaggctgttactgaagataaggaagtggccatcaatgaggaggctgttactgaagataaggaagtggccatcagtgaggaggccatcgaggaagatggttttgctaacactgttgagactgatcctaccccaaaggagattcttctgactgaaggtgaaatcatactcattgaaggcaaagaaggtgctgctaatgagatgccacaggctggtgagaccagtgaagaagatgaggaagattaccttgctgaattgaaagaaggggctgctgatcaggtgctgcaggctgagctggcagacaatgaaacaagtaaagaagatgaagatgacctaagtgaaaagagagaagggactgctgctaagatgctgcagggtgaactgacggacgatgagaccagcgaagaagacgatctcgatgaagatgaggaatgggtttcagatgatgatgagaacaccgaggaagattaccttgctgaattgaaagaaggggttgctgatcaggtgctgcaggctgagctggcaaacaatgaaacaggtgaagaagatgaagatgccctaagtgaagagagagaagggactgctgctaagatgctgcagggtgaaccgacagacgatgagaccagtgaagaagacgatctcgatgaagatgagggatgggcttcagatgatgatgagaacactgaggaaattggctctactgacgagaccgatgaagatcctgatgagaccaatgaggagagttacacctctgatgcagtccaaatgatgcagggatctgggatagctgaagatgccaacgaagatgcctctactgaagatgatgatttcagtggcgacctaccaccagagtttgaaaatatcatgatattcagtggtgctgaaaccgagagtgacattgctcctccagtgctcgaggaaaacaaggatgctgttgtatctgcaacaaaaactgcaaagtccctggatgattctgccttaaaaacagggcaggaggaggagggtcctgaagaggttgacaacgttgtgaagtccctggatgaagaggtagaatcaaaggagatgcagaagcagcaaccacaggattataatagcatgagcctcaggaagcttaaagccacacacaagaaatatctcattgctgcaaaggaggaggtcaccgaagggaagaggcttcctctcgaggaggtggatgaaaacgcctgcatcgaccactgaacagaacaagcaggcgaaattttgtgtggatggcgtctgccacaaaaggattgaaacgcggagtgtgctctggttgtgaagtgataactaggctaccgcatgttcattttcaaaagttttcgtgtgtgatcgtgatcaggggtgaaaccatggtttcagccaacaaacttgcagttcctgttgcttctcccccttttttcctttatatatatattttgtatcggttacagaacatggtttatccagtgaagatgctaagtttcgcttaataatgtatatgaaggtcctggatacctcaaattttgttcatgttgaaccagtgcgaagttatagaaacgcttcaaagttcaaatagcatttagcatgttccatgtgctgctatttcagcactcattcccgtgctggcaatgcaaactgcaactggtcattagttagcattgactgaattttctagcctgttcgctttttatttcgaggaacctgctttgtatcgttgaagtatctctctaatatctgtgta

SEQ ID NO: 32976 - DNA, 3242 bp, Zea Mays
ccaccccacaccctctcccatctctctctccgtgccctcctcctcccccccagtccgccccacccttccggccctccccctcttttatatccagtaccatggtgatctccgagctcgggtgagctgatgagaatgcggccgatttgaggaaggctgtgggcgcgatggatgcggtttcgggcggattcgctaggaggctgtagaggttaggttccggtgtcccccggcccggccggtcgtgggagatgagctcctcgtccgcggccagcatcgggcagccgccgccgcccgcgccgccgccggaagaagagaagaagtgcctcaactcggagctgtggcacgcctgcgccggcccgctcgtctgcctccccaccgtcggtacgcgcgtcgtctacttcccgcagggccacagcgagcaggtggcagcgtcgacgaacaaggaggtggacgggcacatccccaactaccccaacctgccgccgcagctgatctgccagctccatgatgtcacaatgcatgcggatgtggagacagacgaagtgtacgcgcagatgacgctgcagccgctcaatccacaagagcagaacgacgcgtacctgcctgccgagatgggaatcatgagcaagcagccgacgaattacttctgcaagacgctgactgcgagcgacaccagcacgcacggcgggttctctgtgccccgtcgtgcggccgagcgcgtcttccccccgctgtgtggtttgtaggatttcacacagcagcctccagcacaggagcttattgcacgggatattcatgatgttgagtggaagttcaggcatatcttccgaggccagcccaaaagacacctgctgacgactggctggagtgtgtttgtcagtgctaagagacttgttgctggagattctgtgctattcatatggaatgagaaaaaccagcttttgcttggaatcagacacgctacccggccacagactgtgatgccctcttctgttctttcgagtgacagcatgcacatcggactccttgcagcagcagctcatgctgctgcaacaaacagccgcttcacaattttctataatcctagggcaagtccaacagaatttgttatacccctttcgaaatacatcaaggctgtttttcacacgcggatatcagttgggatgcgattcaggatgttatttgagactgaggaatcaagtgtccgcaggtacatggggacaataacagaagtgagtgatgctgacccagtgcgttggcctagttcctattggagatcagtgaaggttggttgggatgaatcaaccgcaggagaaaggccacctagagtttctctgtgggaaattgagccactgacaacctttcctatgtatccatccctgttcccactgcgagttaagcatccttggtattcaggacttgctgctcttcatgatgacagcaatgctttgatgtggctgagaggagtaaccggtgaagggggctttcattctttgaacttccagtcacctggtataggttcctggggacaacagagactccatccatccttacttagcaatgaccatgatcagtatcaagcagtggttgctgccgcagctgcctcccagtccggtggttatctgaagcagcaattcctacaccttcaacaacctatgcagtccccacaggagcagtgcaatctcaatccgctgttgcagcaacaaatactacagcaagcgagccaacagcagatggttagttctgatgctcaaaatattcagtccgtgctcaacccaggtgctattcagcagcagctccaccaactccagcagatgcagcatactcataatgaccagaagcaaaagattcaaccagatcaacagtaccaagttgctagcagtgcggttctcccgagtccaacatcattaccaagccatttgcgtgaaaaatttggcttctctgatcctaatgtgaactcttccagcttcatcagctctagcagcaacgaaaacatgctggaatcaaacttccttcaggtaagttcaaaatccgtggatttgtctagattcaaccaaccagtagttagcgagcagcagcagccgcaacaacaacaggcatggaagcaaaagtttatgggctcacagtcaatgtcttttgggggctcggtttcgcttaactcgcccactagcaaagatggttctgttgacaacaaagttggtcgtgatgtgcagaaccagtccctttttagccctcaagtcgactcttcctccctactgtacaatatggtacctaatcttacctcaaatgttgctgataataatatatcagcgtttccctctggatcaacatatctgcaaagtccaatgtatggttgtctggatgactcttctggtttattgcaaaatacaggagagaatgatccgacaactagaacttttgttaaggtttacaagtcaggatcagtggggagatccttggacatcacccggttctctaattatgctgaacttcgagaggaactgggtcagatgttcggcattaagggtcagttggacgaccctgatagatcaggctggcagcttgtatttgtcgacagggagaacgatgtgcttctccttggagacgacccgtgggagtcatttgtgaatagtgtatggtacatcaagatactttcacctgaggatgtgcataagatgggaaagccaggaaacgatccacgctacctatcttagctacctatcttaaatcgatacatggagctctttctggctcccatgacgattctgcggcacactgcagcactgttcacgacggccctgctctactgtgctcgcatgttcgcccgtgtcatctctactctctagcatgcacaccgtgctcgtcttcagaagacgaactccccgtcgcttgtatccggtgcaggtcacccgctcctggactgatattttgtaggttccacgtaggaatcagtatcagcaactctatcctagtttgtggtaggctcgcgcggcgctcgttcctgtgtcgcatcaggatcttcggactaaaatgcgtagtcgaaaccgttctcgtgattcgtaagctattcatgtatttgaggattcctcgacatgctttcgacgatgaactgcaataatctgaatgcaggaggattgtttgagatttgtacttcagttttgtgtctgccggtttgcagggttgctgtgatgacgtttcaggtgttctctgtctgaaactattttttatggattggcgagttggtg

SEQ ID NO: 32977 - DNA, 1690 bp, Zea Mays
cgagcaaacagtcatacactgggacgcggagtcgcggacgcctgcgcgatcagcgaacggaagaccgtggaagcaaagaggcgcaagcgagcacggaacaaatacaccttcaggtggcctccctccgactgccgactgaatcttccacctcgcttcgcgcctccggctccgcgccgggcccgcataatctgtgctcgggatcgcctcttcccgcggcaaatgggggccgactccgaggacgccgtcaagcagctcagcctcctcatggagcaagtggaggccccgctgaagagatcgtttcaggtatggatctggagtgcactatgtccgtttcgttgggaaagcatggatcttgcttttgtctctggtagaatttagcccgtgtagtcatatcgtagcgtacctttgcgaatttcagcgagattcgagctgatttagagagggagagtgagctactcactgtatcgttaatccttgtgaatggataaatcggcgtagaacaaactctggatgattcacttcatctctgatcgtttcttggtcagtagtatatgctagaggtacgatgatgcagctattactgctaggaaagtgcacgctcggagatgttgcttgatctgtaacaggtggtatgtgctacgcgaatttgctgcattgttaatggggtagtcaggtttggtggtgcttggctgcttgaccttacctagaatggcaatagtgtagtggcttgcactctctgtgaaattcgctgtagttctctgggttgacatgtgttgtgacttgtgagcccatagatcaaggctgtcttctactgtcaatggagtagcagaatcatggtgatcccagactatcaaatactgcgttaagacagtttggacaaggttggcattggttggaagcgcgtggatcatgcttccaatccgagacgaaatgaatggcaagactgctgatctctagtccattaaatatgctacgtcgatttggaattttggacatattcgggaatcgtcattgtacgtgccatctgtatagaatatgcaccagggctatcctaaagaaacactggtgcgtttccttaaggctagagagtggaatgtagcaaaggctcataaaatgattgtagaatgtttgaattggaggattcaaaatgaaattgatagtgtgctagagaggcctatagtcccagtagatttatacaggtcaatacgtgattcacaacttattggcctgtcaggatacacaaaggagggtctcccaatttttggcattggtgttggacatagcacatatgacaaagcttcggtccactactatgtgcaatctcatatccagattaacgagtaccgtgatcgtataattttgcctaggctgacacaacagtttgggcggcctgttaccagctgtataaaagtgctggatatgactggtttgaagctatcagcactaagccaaataaagatgttgacttccatatcgacagttgatgatctaaattaccctgaaaagacagagacctattatgtagtcaacgttccatacatattttctgcttgttggaaggttgtgaagcccttattgcaggagaggacaaaaaagaaggtcaaagttttgactggctgcgggagagatgaacttctgaaggtaaatatattcttccttgcttgctgccttttcacctgtcatttctggg

SEQ ID NO: 32978 - DNA, 3852 bp, Zea Mays
ctttcctgctcccatcttctcctctccccccttcgcggccaagccaaagccatgcctccttcgacttctacttcccccaccacgtcacaacagggcctccacaccgcctccctccgcccccttccgcttgcgcccacgaaccctaaccctaaccccgtcgccgccgcgggacctacccggctagcactcgcaccgcgccttcggcgtcatattcggcgcctgcgctctccgtcctcgcgcggcgagccggggtgctagggttttctagatggatccacgccgcgcacccccgcggggcgggggcgccaacgggctctcttactccacgctgttcaatctcgagcctttgctgaacttcagggttcctgtaccggaagatcttgcccgctacgagaatagcagctcaaatgggagtccaagcagtgaaggtcagggatccttattggatcagtacaatggtgtaaatgatgcttcccatggcctgcaccggaagcggaaaaggcatcttgacggtgccagcgatgatgatgaggcagatgcctatagtaacaaaataactgaggagcaataccgtgctatgctcagtgaacatgtccagaagtaccggaggtcaaagttcaaggagggtgcttttagttctgatcctcctcgtgtggcaacccctcaattaaaacacaaaaatggtggtaaaaaaaatatgaagcgcataagtgatttcagcgatgatgtggcattagatgggatagaagcctcacatgaatataatgggatagagtgtattaaaactcatggcggttttaataagcttgttgcaactcttgattccacttatttagatatgggggatagtacacgttacttagttccagagggttatgataagttagcatcatccctcaatctccctgtttcttctgatatacgtgtcgaggaacacttcttgaagggcatgctagatttacgcaccctagcagcaatgcttggtactgaccaaaggtttgaggcttccaatcgtggtggaatatctgaacccctgccacaatttgaatctctcaaagaaagggtaaaggtgcaggaattttctcttcaagttaccaaggacccctttgcaattccggaaggatcagctgggaggatacgaaggtatattatatcagaagctggcgatttgcaggttcattatgttagagtcatggaaaaaggagatacatatgagattatcgagcgtagcttaccgaagaagcaaatagtaaagaaggaaccttcggtaattatgaaagaagagtctgaaaagacttacaaactatggcagtctcttgctacaaaaagcataccaaagcatcacaagaattttactgctttgataaagaaacgacaagtagatgcgaagcgcttctctgatagttgtcaacgagaggtaaagctcaaagtaagcaggtcactgaaactgatgaggtgtgctgcagtacgcacaagaaagtttgttaaggatatgcagatgttttggaaacgtgtagacaaagagcagtatgagttgaggaaaaaagaggaaaaagaagctgctgaagctttgaaacgggaagaggagctacgtgaagccaaaagacagcaacataggctaaattttctgctgtcccaaacagagctttatagtcatttcatgcagaacaagactggtggttcagcgccgcctgatgaggaagatgtccctgatgaagaagatcctgaggaagctcaattgaaaagagaggccttgagagcagctcagcatgccgtctctcaacaaaagatgaagacaaatgcatttgatagtgaaattgtgaggcttcgtcaaacttctgattctgctcttccaactgatgattcatctagcatggaccctagcaagattgatctattacacccctcaacaatgcctgagacgtcttctgtgcagaccccggagttgtttaagggtgtattaaaagaatatcagttaaaaggcttacagtggctggttaattgttatgagcagggcttgaatggcattcttgctgatgagatgggtcttggcaaaactgttcaggctatggcattcctgtctcatttggctgaggacaaaaacatatggggcccctttcttgtggtggctcctgcatctgttgtgaataattgggctgaggagttgattagattctgccctgacctaaagatacttccttactggggtccagagaggatgattcttcgaaagaatatcaaccccaagcgtctgtatcgcagagatgctagctttcatattcttattacaaactatcagatacttgtgaatgaagagaagcttttgagacgtgttaaatggcaatacatggtattggatgaggcccaggctatcaaaagttcaagcagccagcgatggaagacattactgagcttcaactgtagaaaccgtcttcttcttactgggacaccaatacagaacaatatggctgagttatgggcacttcttcatttcattatgcccactctatttgacagccatgaacagttcaacgagtggttctcaaagggtattgagggtcatgctgagcatggaggagctttgaatgaacatcaacttagtagattgcacgctattttgaagccctttatgctccgccgggttaagattgatgtcattgctgaaatgaccaaaaagaaagaagaaattgttccctgcaaattgagttctcgtcaacaagttttctatcaagccataaaaaataagatctcgcttaacgagttgcttgctggaagtcgtggcagtctaaatgacaagaagttacttagcctgatgaatattgtcatgcagttacggaaggtctgcaatcaccccgagctgtttgagcggaatgagggaagctcttacttcaactttgctgaaatcccaaactcacttctttctcccccatttggggaattgcaagatgtacactatgcaggcaagagaaatcccataatctttgagattccaaagttagtttatgagggaatcatctccaacatggaaaattctggaaacatctgtggatttcagaatggatatttgaacaggctgtttaatatatttttgcccagcaatatctatcgctcagccattccagaagttagttcatcaaaagagtctcttctatcatctggtgcatttggctttacacgtttgtcaaatctgtgcccagttgaagcttccttcctggctactgcttcattgtttgagagactagtcttttcagtaatgcaatggaatatgaactacactgctgaaattctggatgaattccttgattcagaagataccggcatccagtccagtcataatgattccacaaaagttcgtgcagttgcccgtttgttgctttcttctacaaaggtcaagcccagtttgcttaggacaaagattgggactgggccaattgatggcccatatgaagcactggtgctttctcatcgcgacaggctcgcttcaaacattaggcttcttcgttcagcatatgcttttattccgccagctagagcaccacctataaatgtttggtgtgctgatcgaaattttgcctataagttcaccgatgagatgtatgatccttgggccaagaaactgttcctgggatttgctcgtacttctgagttcaatggtcctagacaaccaattgctcctcatcctttgatacaagaacttaatactgatttgcccatcattgagccgatgctgcagctaccctataggatatttgggtcttctccaccgatgagtaattttgatccagctaaaatgctcactgcttgtttggacgtttagtttagttccttagattaagttaaatttgaaccgag

SEQ ID NO: 32979 - DNA, 247 bp, Zea Mays
tgcctgctactggtgatgctagtgcaccactcgatgatgacaaggaggagggtgaaggacatgcaattggtaacaatcaaaaaaggcagaaaagatgcacatcttgggtgtgggaatactttacgaagaagaatatggtcattgaggagaatggaaaaaagtacgaacaagtgtgggggcactgcaactttgcaagatgtaaggcaaagtatagagctgaatgcaaccatggcactactgggtttag

SEQ ID NO: 32980 - DNA, 194 bp, Zea Mays
ttttgttgcttttgctccaaggtggtatcaaatgaagaagtagaagaatgaagaggcgggaggacgtggtcctccatataggactttttgtttgatagttatcgggaggagtttttgcctcccttgatatgtgtaataatactactcagcactcgtttatagctctggtctgtaataagtaacttaatcttact

SEQ ID NO: 32981 - DNA, 2150 bp, Zea Mays
aaaaaaaccctgtttcaggccaaccaaccagctgccctgccggcgcgatttctctttctttctcctcccccaccgagcgccgatctctgtttcgccctatcgcaggaggcgacatgcaacagtggagtcgctgaccagggaggggatgtgactgtgaaaggctgctgcagctggccatgcgatttcagatttcccattcacaacaattcaccccacccatcgtgcacatgatcctactgttgtgcacactgattgatgagaactgtagtggctttgtcctctacccaccaccaccaccaccaatagcaggcccttttatacattggccatgacaccgatgatcactccaaacagcagctgcaaagatcaccctggattcctggagcacggagagagagccgagcgagcagctgtcggcacttgggagtggcactgtggaatctggagaacctaggtagaaaatcaagcaaagcatctcccactccaagcagtagcaccaacacccccctgcattcagcgctgccagctttcacataaacaagttggggaagcagttgaggttttctaattcttcttggaaggattgagatctccagttctgataatgggttcttttgggatgaactggaatcagaaggaccccatggtgtgggattgggaacatctagtaccgtctgtctcaaatgcagttacaaggcacggatctgctaattcatctggtggtactcttacttctaactcagagctagggcatggttcatccaagagctctatttcagcgtccattgattcaccctctggagtagggaacagcttagagttcaacttcgccgctgttgagaggcatgttaagaacacgggcacgaacggcagagtcgatgactcggggaattctccatcgtcaatgatagctttcaaccaaggagagccattaatcagcctgaaacttgggaagagggcttacttcgaaaacgcctgcggaggacaggatgccaaggtttctgcagcttcagacgttacttctgcagccagcgtggtcaagaagactaaggtgtctcagcagaatgcaaagaactggtactgtcaggttgaagggtgcaaagttgacctgtcttctgctaaagattacaatcgcaagcacaaggtctgtgtagtccattctaaagctaccaaggtggttgttgctggtctagagcgtcggttttgtcaacagtgtagccgttttcatggtttagcggagtttgatcagaacaaacgaagctgtcgtaggcgtctgatgcatcataatgcacggaggaggaaacctcaggcagacacaatttcattcaattcatcgacaatgttttatgatacaaggcagcggacaaatcttttctttagtcaaccactttatggccaagtgaggagcaatgcagggtcttcatgggataacttgggaggcttaaaattcatggagacgaaacatccgccagtgcatccaacaaaaacagcatcccctgatgaactgcatttctcagccctccagataactagtgctgcggctcacaccggacatcatcatgatctcgatgggttcatggcgttcaagggaaccagcacaaaggtccttaaccaaggcgtggaggcttgggcggccgcttccagctcgaacaacggaggcccagaaggtgggcgtgctctctctcttctgtcagacggctcgtggggctcgagttcagccgtcatccagcagcccacatctcacgcggacgccggtgcattgctgccgcccctcgccaccgttgccgtctccaacgccgccgccgccgccgggcatcctctggacccgtccccgggaaggttctggccgcaagacgatcatcccccgctcgtcgacggacccgccacgcagattccggagctggcgcacctccggatatggtgaaaggaaacgcatgtgatgcggtgactggtgacatgccagttcgagggcctggctgggaacacatctggttggttagcctgccgctctggcttgaatttgccggcgacgacagtctttgtttgtatcttttgatcagaacggacacagacatgtttgcacaatataatgtgacgagtccctctttggggttgaggagtgaggagatggagaacgataggaggcaaaa

SEQ ID NO: 32982 - DNA, 1885 bp, Zea Mays
gccctcggtgccgcgcccgtcgccacgatctggtctgcagatgctcatcttgactcctgttggtagcatgtgagagtgatggcggccgccgaagcgagggctgcctggcagcgcgccgccaaccgctgcatggtccaggaggacgccaagcgagctccccatctggtctgctgctcgccgcccctacaaccgcacgacacgagcgatggaaatcctctgagcccgcaagatctccatgtccctacatttgtgcccatcaactggaacctgatgaactccagcctgcccatggagacccagtggtggctccagttgcagcccaactttgggtgccaggcagccttagctagggagcgcctcaactatgtaggtgcggaagccgctgagaagaaaacggagggtctagcgccagtacctaaacttgaggatgtccaagcaaacaaggccgcagatccttttgagcctccatggaccatttccgcggctgtcatgaagcaaacatctggaacgggtttggaagagttgaagaatctcgcttgctataccccagtgagcctcgactgcaaaggtagtgccaacagatgtgtttccgaggataacaagtttacagatttcaaagctttcgatcctctcttccctaagccacaaaaggaatactgcgaaatgcatgccccctggaaagaaaccagaaaatctcagccatggtggcaactagctgatgccgatggtttggcttcccttgtcgctgaaagagcaatggaaaacattgtcgacaatgatctgccaaggcccactcagacagtccgggttcatgggggtgaagtgaaggtccctgaaaacaaggatgattatgggctgtctgctctttgtgcggacaaagagctggatcctgcacatgacactatggagtgcagctacagtgtttcaagcaccaccaacaacgacacgaactcttctgatggggggcattggcaacaacatcaaagaaataaagagcccggggaggcacatgattcttatagttccaccgccaatacaccgggcggcaagccagcatatcagaatgcttccgagagggccaagctgttagatgctctccgccactcacaaacacgtgctagggaagctgagatagctgccaagaaagcctacgacgagaaagaccatgtcatcaagctattgttccgtcaggcctcgcacctttttgcatgcaagcagtggttgaaaatgttgcagctggaaaacatatgccttcagctcaggttcagagagcaccagatagcgaccatgttcccagagcttccatggatggtgacgaaagaaaaggtagcaccttctcaagagcacagtgacaggaagaaaggcagaaggctgaacaggaaaggtggcctacgcgatgccgttgcatttgctgttggtgttggtattgttggtgctggattgcttcttggctggactcttgggtggctactgccctaactggaagtttcattgtcgtagatgacaggacagatgccacctgtgcacgctgaattgaatggcaataggaaggatctggtgtacatacttccagaaactggatataccttatgttggatgcgatccttagctgtgtgctgtacatatgggccagtgagggtctggtggaagatgaaatcagccgacttcaacaacgtatgcgctagtactgtaaatctatagattttatttgctttaatgtagcaggaattgtgataatccgtttgctgtaatgtgtgctagacttactagtttaaaataagttagattatataatctagacagattataattccaaacaaacagacccttatatgcatatgcatagcttgttttagacagattataatcccaaacaaacagatcc

SEQ ID NO: 32983 - DNA, 1013 bp, Zea Mays
acaatcatggaactgtcctaacagacaagatggtcccaatcacagcaactggagaccacacagcctctaattggatacctgctacaatcagcaatggcaacggcactggtggcatgttcactgtcgcaagcagaaagtcgaggaatgggttccaattttgtgctgtcactggagacccaggctctcgcaatgtgtctgatgtaaacttcccaagtgattacacagaacttctgacgcaggctaaagaagctgctgaatcagctttcaaggatggaaaacagctactggaaatcgagttccctacagctggactacaaaccgtaccaggtgatggcgaagggggaaatgagatgactggaagcatgcttctcattagagaattttgtgatcgcttcgtacctgcagagaaagcaactcgaaccagagtattcttccctgaggcgaatgaggtttcttttgcaagacagtcagcctttgaaggatgttcgctgaagctagattatcttacgaaaccatccttgttcgaagattttggtttcacaacgaaagtgaaaatggcagatcgtgtgaaaccacaagacgagacattcctcgtggcttatccttacttcaatgtcaatgaaatgctcgtggtcgaagaactttacaaggaagcagtagttggcaccagccggaaattgataatattcaatggagaactagaccgaatcagaagtggatattatccggcgttcttctacccaaaacttgcagagctttccaaaacattcctcccgaagctggatacggtttactatatccacaatttcaagggagctaaagggggaacgcttttcaggtgttaccctgagccttggaaggtcctgaggaaggcgtcgtctgggaactacgtctgcctgcatcaacaagaggagatgccttcgttgaaggaagtggccctcgacatccttccttctgtatagctaggatcttcacttctttggttcatactagaacaacaacgacgctttggc

SEQ ID NO: 32984 - DNA, 1968 bp, Zea Mays
gcttccactggactgcaagctgctgctgcccctctcgttgaagagatctcgtcgaaagccctctcggtctctcccgcggtcccgccccgtgccgtgcccgtgccctttctcccaatggccgcctcctccgacgaaccgtagcgccgcggacaaccagcaggtcgcttggttccagatccccactcagacacgtcacatcgcatggcggcgaacgcggcgcagcaggacccgcgcggccaacggcggctctgcggcgggggcgggggcggggccacggcgtgcgtgcgcccacgcgcctggtgctgctccttctccttctccggcgtgcccgacagccccgacctccgcccgctcccctcctcggccgcgtccccgccggcggggaggaagttgccgcccaagtccccctcggcggcgtcattctatggctcgccgacttcatacaggctagcgggcctcatcgacccgcgccgcatcctctcacccggccgcgtctcccctatcgatcacgacggcgcggtcccgccgcccctcccgctccctccgccgccgccgccggctgcggccgccgctgacgattcggcagttgtgatccccgcagagcggctggcgtcggcattgccatctgccacggtggcgccgtcgctggtcgccgtgcgggaggaggcagacgcggctgggatgctcgatctgaggttgttgctgcggggggcacacgggaggtgcgtcctcatggagctcgactccagcgtgctgtgcggctgtagcgacttcttcgccgccatggccccgcgcgaggatgctgctggcgctggtgggaagaggctcgaggtggacggggtggagaatttggatgctttctgcgccgctgtggagctcatgtacaatcctgatccaatagggtgtcttgcagctgctggtgtgtcaagggccatagatgtgcttgaggtatgctcctctatcatgttcagcaagggaatcaaatcatgtttgacatacatagaagctgttccctggaatgaaaacgaagaggagaagctgaagaacctctttgcaagattcacttttgacgaagcaatgtcccaggatatactggcaagattgcgtccgcacaactggaaaagctcagatgacctcactatacagcttattcaatctgtcactggaagcaccagcactgtggcaagaaaagacatgcaatctttggtaaatggtcttctaagcaaaagttcagtctatcaaaaggactcttcagggctaaacaaggagagtctgtaccagatatgttattcatgtcttgagtcactggttgatctctttgaagaggccagagaaccaacagattatacaggtcagattcttgtagttagagggagtaaaccactgattgagcgagtctctaggcaaacagagaacctcagttggctcttggatattctagtaaacaatgacattgcagaagaatttgtagaactgtgggcgaagcaagacaggctcattaggatgcacgaacaagcgtcagcgatggtcaggtatgagctaagccgaatatcagccgctgtgttcattgcacttggtaaaggaaaagttcagtgtcgtggcaatgtacgaagcctcgtctttcgtggatggttcagcacgatgttgttggattttggctggcttcagcgctgccccaaaggtctagacctaagatcactggaggagaatctagggcgaggcattttaaccctccctctgaggcagcagcaatgtttgtttgaagaatggttccagttctattcgaccaaaggtgctgagtgtccgaaccttattagggctttccaggtatggtggagaaggtctttcgttagatcgtcggtagaacctcaaagacaataatcgatgcaccagaaggtggaacaactgtaccgatgcaatgatgacgaggcggcccgcaccgctggatccgccgatgatggcgacgat

SEQ ID NO: 32985 - DNA, 2101 bp, Zea Mays
gcagaagtcgaccggcatcacagttcacatccgacaactaatcagtccatcgcgttcgcgtccacggtcagttgccggcgccatccctgcccctgctcacccctccccgcctggcgtccacgatcggcgacggcatgtctcgcgacgcccatctcggagtcggagtcgagggagacgcagccgaggaaaagaacgccgccgctgacggcggcgaaggagtcgggttcaggtcaggcggcggcggcgggcacaagctgtccctggtgccgctcatcttcctcatcttcttcgaggtggcggggggtccctacggcgcggagccggcggtgcaggccgcgggcccgctgtacgcgctgctgggcttcctcatcttccccttcatctgggccatcccggaggcgctggtcaccgcggagctctccacggcgatgccgggcaacggcggcttcgtgctgtgggccgaccgcgccttcggcccgttctcgggctccctcatgggcacctggaagtacgtgtccagcgccatcaacggcgccgcgttcccggcgctgtgcgccgactacctggcccgcgtcgcgcccgccgtgtccgggggcggggcccgcgtcgccaccatcgtcgccttcaacgtggcgctcacgttcgtcaactacacggggctcaccgtcgtgggctggtccgcggtggggctcggcgtcgcctcgctctcgccgttcctggtcatgtccggcgccgcgctgcccaagatccgcccgcggcggtggcgcgtcgtcgccgccgagagggactggaagctcttcttcaacacgctcttctggaacctcaactactgggacagcgtcagcaccatggccggcgaggtggagcggcccgggaagacgctccccaaggcgctcgtgtccgccgtctccatgacgtcgctcggctacctgctgccgctcatggcggccaccggcgccatcgacgtcgcgcctgaaagctgggggaacggcttcttcgcagatgccgcaggtgcgtggtatccaatctgttcctgttctattctaccagcagagccgtctcctccgatgctgcccatgccatgtggtccgcaatcctgatggcgtcgtctatagagattttatatgcggtaagattgaatagtcggtaacctgttgcagaaagagtcaaatcaaatcagatcgaatgataaacaactactagtagcaagcgtcgcccaccacgcatgatcggtgggcgttggctcaagtactggatagaggtgggcgcggtgctgtcctccatcggcctctactcggcgacgctgagcagcgcggcgttccagctgctggggatggcggacctgggcctgctcccgcgcgcattcgcggcgcgcgcccccgtcttccgcacgccctgggtcagcatcttggccaccagcgccatcatcctcggcatgtccttcctcagcttcaacagcatcgtggcggccgccaacttcctctacagcctgggcatgctcctcgagttcgccgccttcgtctggctccgcgtcaagcggcccgcaatggcccgcccgtaccgcgtccccgcgcgcctgcccgccgccgtcgcgctctgcctcgtcccctccgcgttcctcgtcttcgtcatggccatcgccggctggaaggtgtacgccatcagcgccgcgttcaccgccgcgggggtggccgtgtactacctcatgcgcttctgcaaggccagggggtgcctcaggttcagcgacggcggcgaccaagggaccacggcggtgtaccaggacggcagcaacgcgggcgatgtctgaatgatagatagactctttgtgccaaaagcactatacgaatttgtattgtaggctagtgttttgtgattaggaattagtggttccggggaaaaggattcatgctccctccagtttctgctcgtgacatcttgcttacgtgtgtgctccaactctccatacttgttggcaacatcaaagacgactccctcaagtctgacgtaactgtttggttgaacgttgaaatggtgtgataaccatttcgcggtcgcatatatacccgtactaatgtgcagatgctgacttagggcctgtttg

SEQ ID NO: 32986 - DNA, 5074 bp, Zea Mays
accacagcctccgctcaacggcaggagaatcacggcgagcgcgtgctcgtgggcacccctctccatcaactggggtgcgcgatcgatcgatcaaaaccccaatccagccttctatttccgatcgagacgcaaacgaagcaggtagaaggccaaggccagcgcagacacggatggcgatgggagcgacggttcgcgcagcggctgcagatgccatggtgacgttcttgtgggtgttgtgcgcctccgcgctcgatgtctccatagcagccgtcacgtcgtaccaggggttgcaggagggcaccggccactatgcgctcctcgtcaccacgtccctcctctcggtgctcctcttcaccttcgacctcctctacggtgtgctcggtggtgccagcttcaacttcactgactttgccacctcctattccgccggactcgatagcccctccctcttctctgttgcgctccacttcctggcacggactgtcgtggtggtgaagaggaccactttgcgcgtggctcggaaggatgcctatatggcagagttagatttgtttgctaaaggattgcatgaaaggctggttcctttcctgggtcactgtcttgataaagaagaagaaaaggttcatgtgtataggtttgtccaaaatggtgacttgtcaagtgcactacacaaaaagtcaagggaggaagatgaaggcttgcaatctttggactggataaagaggttgaagattgcaacgggggtagctgaggctctttgctatctgcatcatgaatgttctccaccgatggttcatagggatgtgcaagccagcagcatccttcttgatgataaatttgatgtacgccttggtagcttgagcgagcttcctgcaattgaatcagtcttgaatgctatgaagagcaatacaaatcagcgagtatctccaatatttgctcttgtcctatgccctacaagagagcttgctattcagcttacagctgaagcaaatgtcttgttaaagtaccatgaaggaattggtgttcaatctcttattggtggcactagattcaagcttgatcagagacgattagaatctgatccatgccagccagatcatctattagatgaaaccaaccgtgctggaagcaagattagggtggaaagggctgagcgaagctcctacacgtttcaatcacagttagatggcggtgcacagttctgtgtatcacaagaggcatctaggttgacctcgctcttcttagtgttcatgcccactgcgcaagacaacaccacaacgccgatggagttggaagatttcatcaggctcgactcgatctggatgagatggactctgctcgctgaggaccgaacaccgaagccaggcagccagccgaggaagccaggcgacaggcgacgccaagtcgagaacaccctaggtggtcgctcgcaggctgcgagtgagagccgtggcggagtcgccgtccttgcccacggaggaggacacagccgccggcgcagtgggatggcgacgccgacgcccatgcccggaagcgaggggacgctcgtggcggtgatgccgcggtccccgtccccgacgccggcggaggcggggacctcggcgaccgagacgcccgtgctaatattcctttacttccacaaggcgatccgcgcggagctcgaggcgctgcacggcgccgccgtgctcctggccaccgagcgcaccggcgatgtcgcggcgctcgccgagcgctgccgctttttcttcagcatctacaaacaccactgcgatgccgaggacgcggtcatctttccagcacttgacatccgagtaaagaatgttgcagggacctattccttagagcataaaggagaaagcgatctttttagccagttatttgatctcctggaattggacatacagaatgatgatgctcttcgtagggagcttgcgtcatgtacaggcgcgatacaaacgtgtctcagccaacatatgtccaaggaggaagaacaggtctttccattgctgacaaagaaattttcatgtgaagaacaagctgatttagtgtggcaattcctctgcaacattcctgtcaatatggtagcagagttccttccatggctttcaacttctgtcacatctgatgagcaccaagacatccgtgactgcttatgtaaagtagttcctgatgagaaacttctccaacaggttgtattcacatggatggaggggaaagcagcaagagaagtggcagagagctttgccactggtaatttagtaagaaatcatagtgctgaggatgtctcagaccatggggagatttatgtttgttcacagcaagaatctaaacttgggagtaaaaactgtgcagaatctaatggttctcaagccgacaggcatcctatagatgatattttatactggcacaacgctatccgcatggagttacatgatataaaaaaagaaacaagaagggtgcaacagtctgggaatttttctgatatatcagccttcaatgagaggcttcagttcattgcagatgtatgcatctaccacagtatcgctgaggatcaggttgtttttcctgcagtcgatagtgagctgtcctttgtgcaggagcatgctgaagaagaacacaggtttaacaatttcaggtgtttaattcagcaattccaaatagcaggagccaaatcaactgcactggacttctactcaaaactgtgttcacatgctgataaaatattggagacaatcgaaaaacacttcagcaatgaagaaaccaaggtgcttcctcaagctaggatgtttttctctcctgaaaagcaaagggaactttcgtacaaaagtctgtgtgttatgccattgaaattattggaacgtgttttaccatggttggtgtcaaagctgagtgatgagcaggcaacttcatttcttcagaatatacgattggcagcatcaccatctgaaactgcactggtcactcttatctctggttgggcatgcaaaggccgggacaaatccaaatctggagaatatttatgcttaacatcaggtacagcaagatgcctgtcagatgatgtagatgatcagggaaaatgccgatcattctgcccatgtgcttcacacaacagctcagatctttctctgcagctacaaactgaaaatggttctaggccaggcaagcgaggaaaagatgcagtatcttttcctggtactaatggaagctactgctctcaaactgctgacattgatgcaagtccatgtagcaaaaagccttgttgtattcctgggttgagagtaaagagtagcaaccttggtattggttccctggcttctgtgaagtcctttcgctctttaccatacaattctactgctccttcaatatattcgagcctcttctcatgggagacagatgcatcattgtcttgttcggatggcatttcaaggccaattgatacaatattcaaatttcataaggcaattcgcaaggatttagagtacttagatgttgaatctggaaggctcattgatggtgatgagtcttgccttcgccaattcattggaaggttccgtttgttatggggtctttacagggctcacagcaatgctgaggatgaaattgtgttcccagcattggaatccagagaaacattgcacaatgtgagccattcatatactcttgaccacaagcaggaagaacaattattcgaagatatctctgatgttctctttcagctttcacaactacatgatagccagggccatgcccagactaaagttaatgaagtaaagcaaagctgtttccattcatctaatgacgttgattttactaggaagtataatgagcttgccacaaaacttcaggccatgtgcaagtctatccgggtcgccttgactaatcatgtccatagagaagaacttgaattgtggccgttgtttgacaaacatttttctgtggaggagcaagataaacttgtaggtcgtataattggttcaacaggtgctgaggttctccaatctatggtaccctgggttacatcagctctcactcaagaggagcagaacaaaatgcttgatacctggaagcaagcaacaaaaaatacaatgtttggggaatggctaaacgagtggtggaagggagctggaacatctgattcttcagcagaggcaccctctgctccagaagtcatttacaagataagcttgaacaaaatgaccagatgtttaagcctggctggaaggacatatttcgaatgaaccagagtgaacttgaggctgaggtgcgaaaggtttcacgagatcctacacttgacccaaggcggaaggcctatctaattcaaaatctcatgacaagccgctggatagctgctcagcaaaagttaccggaaccaaattctgaagaatgtagtgatgatgctagtatacctggatgtgcgccttcatatcgagaccaggagaaagaaatttatggttgtgaacattacaaacggaactgcaaacttgttgctgcatgctgcaacaagctgttcacatgcagattttgccatgataaagttagtgaccatacaatggaaaggaaagcaacacaggaaatgatgtgcatggtgtgcctaaagattcaacccgttggtccgttctgccaaaccccatcttgtaacagactatcgatggcaaagtactactgcaacatctgcaaatttttcgatgacgaaaggactgtgtaccactgcccgttttgtaatttgtgtcgtcttgggaaaggtcttggtgttgatttctttcattgcatgaaatgcaactgctgtcttggaatgaaattaactgagcacaaatgtcgggaaaaagggctagagacaaattgtccaatatgctgtgacttcctgtttacatcaagtgccgcagtcagagccctcccttgcggccacttcatgcattcagcttgctttcaggcatacacttgtagccactacacttgtcctatctgctgcaaatctctgggagatatggcgttcttttttgactcgtgagcggaaaacctgccaatcatcttgcttcaatgcctcagaatagcaatgtagcatcagtttatcgga

SEQ ID NO: 32987 - DNA, 756 bp, Zea Mays
gctttaggcccgttggccagctaaacatatagttgggccggcccgtcaagatagctgcgtcccgcgcatcggcggcggcgtggcggctctttcctcctctcgcgtgacgcgggcgcgcggccggccggcgagcgccgacctcgcggggaagagcgcctacgaggtcctcagggttggggagactagttccagcgtcgagatcaaggcctccttccatctcctagccaaagatacccacccagacgtcgccgcgactgcttgttcttgacggttccttcagatcatcaccgcattctaccagattcacagtgaagagctacgatggcgacctgctgcgatcgcagaggcgtgttgtgcagaaacaccccagttcatctcagttggtatacccaagtgattcaggctcaggcattgtggcttaccattgacgacatagctaccaagagggttgccactggctctggttattttgataggctcaaaagcgaactgttcacagcaatccatgctccatactatggaactgatgtcgactccatggatgtccttcctgattgctttgaagctgaggagagatcttctgaatttactccaaatgtttctataaatgtgaataaggattcaatatctatgaatcctgttgatatgaacatgcaagagatgcggtatgaaaatgatattcctgcaaaagatgcaaaatgccttcaaggacatttagttgcggatatttgggaaattagttgttactgtgactag

SEQ ID NO: 32988 - DNA, 591 bp, Zea Mays
tggttatatggctactgtgtgattgtcaccaacccaagcgtgttgataaaattgccagagctacttgcttctgtcaatatggaggaagatgcgttgaacaagctacagctgaaactgctggacgttctcaagtatgctttcttgcttcagagttatgcttgcaacctttttagcttaacctgaatcattccaatggctttactgtcaggtttcttcagaagaatcagatcaccttctttacctctgcgtacgatggttcttgtaaaggtgcagatgaggataaaaccaaatgattgcatgtgaacgttttatatcatgtaacatctttcgatggacttgtctggcactattgttgatatgaatgtcgcttaggacaacaatcggtttatgtaggatagatgctgcagattcctgaaagacggtacttgaactgcccggagcatgttgtattttcttaagatgctggaactaagacggcttagttgaattttcactatcaagtgagtctcggtcttgccccaaaaagaatgttttgtacctcctctgtcccaatttatacgacaatttataattcgtatgacttttttggac

SEQ ID NO: 32989 - DNA, 6155 bp, Zea Mays
tctttccccagaggcaccctcaatcccctttcccctcctccctccagactctcggaggcgggcgcgcggatctgtcggccggggccgatccagtcgattccaccggacaaggccgccaaaaacacactcgctcgacgcagcgagcggggccggcccttcgtgccgcggggcgcccggtggcgagggccgcagcgcgcagcgatctgaaaccctaggtggtggtgggcgccgccgccgtgtgtagacgcgatggatgcgaggttcccgtactcgccggccgaggtggccaaggtcgagttcgtgcagttcggcatcctcagccccgacgagatcagacaaatgtcggtgattcaaatagaacacgcagagaccatggagaggggcaaaccgaagcctggtgggctcagtgaccctcgattggggactatcgaccggaaaattaagtgcgagacatgcatggcagggatggcagagtgtccaggccactttgggcaccttgagcttgccaagccgatgttccacatcggattcattaagactgtgctctccatcatgcgttgtgtttgctttaactgctccaagatcctcgcggatgaggatgaaaccaaatttaagcaggctttaaaaatccggaatccaaagaatagattgaagaggatatatgatgcttgcaagagcaaaaaagtctgtgcaggtggcgatgaccttgatgttcaggaacaggatactgatgagcctattaagaaaagaggtggctgtggtgctcagcagccaaatattacagtcgatggcatgaagatggttgctgagtttaaagctccaaagaagaaaactgatgatcaggatcaactccctgagccagtggaacgcaagcaaatcctctcagctgagagggtccttaatgttcttaagcgtataagtgatgaggactgtcttctgttgggcctgaatcccaaatatgcccgtcctgattggatgatacttcaagttcttcctgttcctccaccccctgttagaccatctgtcatgatggacacctcttccagaagtgaggatgatctgactcatcagttagctatgataatacgacataatgagaatttgaggaggcaagagagaaatggtgctccagctcacattataacagagtttgctcagctgttgcaatttcatattgcaacatacttcgataatgatcttcctggccaacccagggccacacaacgttctggaaggcctattaaatcaatttgcagcaggctgaaagctaaagaaggcaggattagaggaaacttgatgggcaagcgtgttgatttctcggcccgtacagttatcacaccagatccgaacataaacattgatgaattgggagtaccatggagtattgctttgaacctgacatatcctgaaactgtcactccatataatattgagaggttgaaggaacttgttgaatatgggcctcaccctcctccaggaaagaccggtgcaaaatatattatcagggaagatggtcagaggcttgatcttcggtatgtgaagaaaagcagtgatcagcatctggagcttggttacaaggtggagaggcatctcaatgatggggattttgttcttttcaatcggcaaccaagtcttcataaaatgtctatcatggggcatcgcatcaaaattatgccctactcaactttccggttgaacttgtctgtcacttcaccatacaatgctgacttcgacggtgatgagatgaatatgcatgtcccccagtcatttgagaccagagcagaagttctggagttaatgatggtgccaaaatgcattgtctctccacaatcaaataggcctgtaatgggtattgtccaagacacactgcttgggtgtcgcaaaattactaaaagggacactctaattgaaaaggatgtatttatgaacatcttgatgtggtggcaagatttcgatggaaagattcctgcacctaccattttgaaacctaggcctatttggactgggaaacaagtttttaacttaattatccccaagcaaataaatttaattcggttttcagcatggcattcggaagaagaaaaaggatttattactcccggtgatactatggtcaggatagagaagggagagcttctgtctggcacactttgcaaaaagagtcttggaacaggctccggaagtcttatccatgtcatttgggaagaggttggtccagatgctgcccggaagttcttaggacacacacagtggcttgtaaactactggcttcttcaaaatggtttcagtattggaattggggatactattgcagatgcatccaccatggaaacaattaatgatacaatatctaaagctaagaatgctgtgaaggagcttattaaaaaagctcatgagaagcagttggaagctgagccaggacgcactatgatggaatcatttgaaaacagagtgaaccaggttcttaacaaagcccgtgatgatgctggtagcagtgctcagaatagcttgtctgaaagcaacaatttgaaggctatggtcactgcaggttcaaaaggcagtttcattaacatttcacaaatgactgcttgtgtgggacagcagaatgttgagggcaagcggatcccttttggtttcattgatcggacgttgccacatttcacaaaagatgactatggtcctgaaagtcgtggatttgtggaaaattcttacctccgaggtctgacaccgcaagaatttttctttcacgctatgggtggtagggaaggtcttatagacactgctgtgaaaacctctgagactgggtatatccagaggagacttgtgaaagctatggaggacatcatggttaaatatgatggtactgtaagaaattctcttggagatgtcatccagttcttgtatggagaagatggcatggatgctgtttggattgaatctcaaaaattggactcattgaagatgaagaagcctgagttcgataatgtattccgttatgagctggatgatgagaattggagacctaactacatgctacctgaacatgttgacgatttgaagaccatacgtgaattcagaaatgtgttcgaggcagaggttcaaaagctagaagctgatcggtaccagcttgggtctgagatcaccacaactggtgacaattcgtggcctatgcctgtgaacctcaagcgactcatctggaatgctcagaagacattcaagattgattttagaagaccttctgacatgcacccgatggaaattgtggaagcgatagataaactgcaagaaagacttaaggttgtacctggtgatgatgctatgagcattgaggcccagaagaatgcaaccttgttctttaatatcctacttcgtagcacgtttgctagcaagagggtcttgaaggaatacaggcttacaaaggaagcttttgaatgggttattggtgagattgaatcgaggtttcttcagtctttggtggcccctggcgagatgattggatgtgtggctgcacaatctattggagaaccagcaactcagatgaccctgaataccttccattatgctggtgtcagtgccaagaatgtcacccttggagttcccaggttgagggagatcattaatgttgccaagaagataaagacaccatctttgtctgtttacctgaagcctcaggtgaaccagaagaaagaattggctaagaatgtccagtgtgctttggagtacactacactgcgtagtgttacccacgccacagagatatggtatgatcctgatcctctagggaccatcattgaagaggacacagagtttgttcagtcctattatgaaatgcctgatgaggacattgacccggataaaatttctccttggttgctgcgtattgagcttaaccgtgagatgatggttgataagaagttgagcatggctgatattgccgagaagattaaccgtgagtttgatgatgatttatcatgcattttcaatgatgataatgcggataagcttatcctccgtatccgcatcacaaatgatgaagctccaaaaggagaaatacaagatgagtctgctgaggatgatgtcttcctaaaaaagatagagggcaatatgttgacagagatggcgcttcgaggcattccagatatcaacaaagtgttcatcaaagaagggaaggtcaataccttctatcaagatgacggtttcaaagcagctaatgaatggatgcttgatacagaaggtgtgaatcttttagctgtcatgtgtcacgaggatgttgatgctacaaggacaacaagtaaccatctgattgaagtgattgaggtacttggaattgaggctgtccgtcgatctctcttggatgagcttcgggtggtgatatctttcgatgggtcatatgtgaactaccggcatctggccattctttgtgatacaatgacatacagaggtcacttgatggctattacaaggcatggtatcaaccgcaacgacactggacctcttatgagatgttcctttgaagagactgttgacatcttacttgatgctgctgtatatgctgaatctgaccacctgagaggtgttactgaaaacataatgcttggtcagcttgctcctattggtactggaggctgtgcactatatctgaatgaccagatgttgcagcaagcaattgaacttcaactcccaagctatgtcgaaggcctagactttggcatgactccagcacgatcacccatcactgggacaccttaccatgaaggaatgatgtcgccaagttatctgctgagtccaaacatcagggcttcgcctattaatacagatgcttcgttctcgccgtatgttgggcacatggcattctcaccattcccttcaccaggtggttactccccatcgtcagggggatacagcccatcttctccggttttcaccccagagaaaggatatagccctctctctccatcatatagccctgcatcaccaagctatagtcccacctcaccgtcttacactcctggctctcccacctacagtccaacaagcccgaattactccccaaccagcccgacgtactcgcctaccagcccatcgtactcacccacatctccgagctacagcccaacatcaccaagctacagccccacctcaccagtttatagcccaacctcaccagcatacagccccacatcacccgcttacagccccacatcgccatcctacagtccaacttcaccatcttatagccctacatcaccttcatacagccctacgtccccttcatacagccctacctccccctcatacagccctacctctccctcctacagcccgacatcacctgcttacagcccgacatcaccaggatacagcccaacgtcaccgagctacagccctacatctccgagctacagtcctacatctccgagctacaatccttcatcagccaagtacagcccttcacatgcatactctccaagcagccccaggatgagtccatacagccagacttctccaagctacagtccaacgtcaccgacttactctcctacatcaccatcatattcacaaccaagtccatcgtacagcccaacgagcccgttcaacacctctggaggacccagcccagactacagcccgacctctccaaattacagccctagcggaagctactcccccactgcaccgggctactccccgtcgtccacaggccagggtaatgacaaggatgataagagcgctcgttgaagaggcacaggagaacaaggcgctctagagcactcgatgaaggcactcggtgatggccacatgggaagatcgaggcacttttttttcccttgagtttttgtatggttgatgaactctgagagcaaacttgtatttttccgagctgctaatagcagaaatagttgtttatgtatgatactagaactaaggactggactgtgctgcgacttgataagtggttaaccgcgtggtcgcccctcagagagtaacacatgtagtaatgtttaatgataatatcgtgactgtacttggtactactatgctatggtgtactagtgtattgcatgcgcgcgtggagcagagtgatctgcgtgtgtatagtgtagtgtgatggtgattaaatagaaaacttagttatacagtagataaatgttgtg

SEQ ID NO: 32990 - DNA, 1083 bp, Zea Mays
atggctgggcaggctggccttttgttgggcggttgggtggacgcgtgtgcctgcccgtttctggggggaaatgacagcgaggcgccgagaataggaggcgcactggctcatggctggcgcagggtcttctgccgctgggccgacgtcgcctccgtcgtcggcgcgcgaggccccggaccctccgccgccggccaggggcttcgtcgtcggattgtaagccacaaaacgtagctgcctactacgactattattgatccaaaaaaaaattattttttgggttcctgctgctcatcgaggacgggaaacgtggcgagattttttttttcttctgaccgcggtaccggttcatcttgtcatgcgatgcagcatcatggcggtatgttgctgctgcctagccgacgagacgatcatgtgatgtgacgagggtgtgaacatctccgtcagacacgcgttgtgtacataaaataacctctgacagtacagtatttaactgtggtctgtgctaggaataggctgcattttcccgtcgcggccgcgcgcgccccgtatatgtatgtgattcgaatgaacatgtacgttctgaaaataatgcaaagacggtgaatgatttgctagacctgaccatgcatgcgattcgtggtagcagccgtcgccaagccaacagcccaacaccagaggctgctagccgtacccgtacgcgacacgcggtggctgctggtatcgggctccgtacgtgtctatacgtcaaagacaagaggtttcactacaaagtgtcagattggcttgcagttgtatcagttgtttcatctggcgaaaaatcaaagcactagcactccttcgtgttcgtggttattattatacaccaaacgtccaaacgcccaaacctcatttcatccatcacaactcaacgtccgtttggagatcattttgatgaatcgccccctccttggcggtttttatttaaatttggatgttaccgctgcatcactgagcaaaagagttctaggactgttgctttggatggtatccattttttgtttgtatccaatcttgggattgaaaaaccgagttgttttcgcgaaa

SEQ ID NO: 32991 - DNA, 1532 bp, Zea Mays
cgaagtagcctctccatatttgcggggtgatggaaatgctgttgctgccacgggcaaaaccgaaatctcagctgcacaaaagaaaactcaaactaacatgaggacccttagagggcatacaggtgctattactgctcttcattgcgtaacaagaaaggaggtctgggatcttgttggtgatcgtgaagatgctggttttttcatcagcggaagcacagattgcacggtaaaaatttgggatccaagtttgcgtggttctgaacttcgagcaacacttaaagggcatactagggcaattcgaacaatcagttcagatcgtggcaaaatagtttctggagctgatgatcagtctgtcatagtatgggataagcagacttttaagcttttggaagaactgaagggccacgaggcaccggttagttctgtccggatgctctcaggagaacgtgtccttattgcatcccatgatggtactgtgaagatgtgggatgtccggactgatacttgtgttgttaccgtgggtcgttgccaaagtgctgttctctgtatggaatatgatgattccactgggattctggcggctgctggaagagatatcacggcacatgtctgggatattcgctccagcaagcagatgttcaagcttcaagggcatacaaagtggataagatcaatgaggatgaccggagagaccataataacaggtagtgatgattggactgctagagtgtggtcccttaaccggggaacatgtgatgcagtgttagcatgccatgctggtcccgtactatgtgtggaatactcaccttcagataaaggaattatcactggttcagctgatgggctcatacgattttgggaaaatgaaggaggaataaaatgcgtcaagaatcttacacttcacacagcatccgttctgtccattagtgccagtgatcactggctagcgattggtgctgctgataattctatgtctctttttcatcggccacaagaaagattcggtggcttctcaaatgcaggatcaaaagttgcaggatggcagctttacagaactccccaaaaaactgctgcagtggtgagatgtatagcatctgacctggataggaaaagaatatgtagtggtggtcgcaacggactcctgcggctttgggatgcaactacaagcatctaggactgatagatgttcatgtgaaaaggcaattgacatgatgttgcatgccattttccttttagctaggaatttatgtgctatttagaggatgcgaaaggagccggactttgttctactgtttctttatcatctaaaaaaccctgcccagttgagtatatgtttgacgtcgtgtaaaattttgtttatattttcgggttcagatagccttacgtggctacgattttgtaagaactatgagaaacttgggaagttctgtactactaccagtgcaaatgtttgttttagtacaacattattttttatgtgcatattcatcgtatgaacctgcactagtgcaaacatgactgctagcatatgc

SEQ ID NO: 32992 - DNA, 304 bp, Zea Mays
tgtatatattggacgctgacgaaactcataggggaacccataccttgattggcgcgctcgaaagcctagaccgcggcagaacgcgcccgcttcgtttgcaaatctccggcgagcaattcactccaatcccatagacccgagtgccactaactaaccccactccgcacggtgcgtcccgacaatgggtccaggccagcacccaagggccctacgctttgcaatcggatttccgcccacggggaaaggttctgtggctcggcggagaggttcacggtgatggtggggggtcgtttctgcgtgcgag

SEQ ID NO: 32993 - DNA, 1658 bp, Zea Mays
ctcctctgttgttttgcctacacacgacaggagccattggatcgttgttggagggcagatacggaggggcaaggtacgtggtgccttaccttggctaaggcactgaatctggatccctcctccacctccacgcgagcggacgacacgaagcggccatagccgcacgttgggatcccctccgctacgcctctcgatggtctccgccagcgcgccgccgccgcaggcccagtccgacgcggccgggtcgggggaggaagtgagcaagaaggtgcggaagccgtacacaatcaccaagtcccgggagagctggacggagcaggagcacgacaagttcctcgaggccctgcagctctttgatcgtgactggaagaagatagaggcttttgttggctccaagactgtcatccagattaggagccatgcacagaagtaccttttgaaggttcagaaaaatggaaccagcgaacatgtcccacctccacgaccaaagcgaaaagctgcccatccatatcctcagaaggcttccaagaatggacacattttcgtcatttccgaagagaagatgtctcaagacaagaaggcagttgctgagacgaagctaactgaagaggaaaagcttcttgaggagaagattgctgggtttgttgaatcaatcgcaaaaacaaatacagagaagatcactaaagagatactggaaggcttgtctgaagatactgatgatagcgacagctatgatatggagagtggaggcgaagactctgaagatcggccctggcgaccaagtcatacagtcttcgggaaatcaactatcaaacagagtcatctagataatatgagaggaaggtattttcgagatatgtctatcgtgagggctgacatagacagggccgctcctgctcccgaagaagacgaagttgtgatcttccgaagcttcttcaaagctggacttcggttcccgttgagtagatttgtggttgaagttttgagtacataccagatctaccttcatcagattactcccgaagcaattattagaatggggattttcgtctgggctgtgagaagtcaaggtctggagccaagcgcaagatgtttttgcagtatgcatgagctctcgtatgagacgaaggcctggggtaaagaacaatatcacaacaatttcggctgctacagctttgttgctcgctccggcgtaagctacccagtgccaacattccggaagaggtggcccggagactggatgaaagaatggttctatgtaaagaatgatttaaaggcgagagaagacattaaagagatcatcatgcgccccatttggtcccacttcggcctccggaagccgaaggttgaaattgacgaggcagtcgaagcatgccgaagggctttcagcacaatttgctcttttgttgggacaagggacttgcttcaagagcatatagcctacagaatatggccacttgtagacagctgggaaatgccgaaggacaccatcactaaccctagcgagggcggcctagttcgactgaagtacaccttcaggtttgaggacaaatttgtcgaaccagatgatgactggctgaagtgtattgaaaatactagtgatgaattacttggagcatattccaagtccgaagataatgcactatctgcagctttcg

SEQ ID NO: 32994 - DNA, 845 bp, Zea Mays
tttctttggacacattagtttcttatttgtatatcctcatctatttattaaatgaaatctgctattaagagactttatgtaggtagccgtgctccctgatattcgagggcctgtttgtagagctccaggtccttgattctttgatggagtgattctggtgggtgagtggagtggggagcaggtgagaatcaattctagaatgattctcgtggagattgaataggtagcagtgaggagggtgtttttttagctcccagcttctagtgcaaatggagaagtgattgatgtttactctttatcagaatctgtacagattttactgtttgccttggttgagtgattctcgcatagaagctgctccaaggagcgtgccaaatggcccatgaatgttatccctgacagaaacaaaagaaggtatctgatagctctgcacaccacagactaccaacaacctatgctcttcctcaatacccttgccgtcagtgtgcttgtggtcgcgaaactaccgaatatgcacaaggtccggattttcggaataaatgccgagaactgagcaacgtcatccttcgccagacatttaccctatatgcgcttttcagaacggttttgtgtgttcccccccccttctagtgcctttagttgggctcatcagagcaccagtgttgaaaaagttgttagcaggatgggccttggtcgctgtatagagagatgctcggaggcgtgctgtacatctgatgtgcacggattctgtacactcttaatgttgctatatatacggtttgttgcaagcatctgtcggttgctatatgtacagtgtggttcttgcagagcgatgtgtttcctcg

SEQ ID NO: 32995 - DNA, 2312 bp, Zea Mays
atggggatggcggcggacgcgacgacggccatgaccatcgacttcctccgcgcgcgcctcctctccgagcgctccgtctcccgcgccgccaaggagcgggccgaccaccttgccaagcggtcaatagtcaccgagcccgtcgccgcagtgcaggttgtggagctggaggagcagctccggacggtgacggcgcagcggcgcaaggcggagcgggcggccgcggaggtgcttgccatcctcgactcccagggcttcggccgcctctccgacgccgcggacgattcaggctcagagtacgaggccgacacgggcgatcccaatgccgtcgagagggacggaggcggcgggaatgcagcggaggacgcgctgtcggggtcggagctgggagccccggcggcggcggctgctgcctctgctgctcaggccgggggcttgtcgtggaggggccgcgccgcgagccccgaatgcgagaggcggcggccgcagcaccaacagcacaagggcaggcagctaaggcagaggcacggccacggccacggccacaggaggggttacttttactgccgcgccgcggattcgtcgcccaagtaccacccagggcagtcttgccggaagatcaagaggaaggagctgagatctcagacagaagaagaggagggcaacgacaatgcagtggagagcacggaggacgggcaggagagatcagattgtactgtttgcactgatcaaccggctgatgttgatggcgaggtgaaccaagatgggcatggctcttctagtaatggaagaggggaggatcgtgatgatcttgccatggtatatgagaaggatggggagatggagagggtactcgagaagcaggctgagctaattggacagttcgaggctcaagaaaatgctcagagggagtgggaggagaaattcagcctgagccgggattcagttatggataatgttaacttattaaacaacaagctaaatcaggctgaaaatgcttgtgggaggagggaaactgctcgggttgtagataaagaagtggtttgtgaacagtgactgctgcagcagtaatttcaagccacggagaactgcaggttaggaaggatgtgctgacaactaaaagctatcctgaaggaagtggcaataatcttgggaaatcagctctaccaccacaaggaagctgtggtagcagactaaatgcaggacatagaaatggtcaaggagatgaaagttcagacagtggttcaagctaccatgtgaatgctcgatcttctgagcaatacataaacacatcatcagttgggagccagctaagtgatactcctaaaagcgaagtctcagaatggagctcctcttgctttcataaccataccgataaccagcttgatacacaacttcatcaatcatcaaacaaagatgtaggaggggtgctagaggcccttcgacgtgccaagatgtctctcagagcaaagctgagctggccaagtctagccagcaagaacatattggcacttgaagcaccggatgatttgccagtcaatggcatggaactttcactctgcaggacagcccatgtcagtcaggaaatattcgcactaccaacaccaacagactaccttaacaaggtattaccgcatgatgatgtgaaggtaccaataggtcctgctggtttgtttcgtttgccaatagattcatttcccagagatgagatgaccacaagggatggctatggttcatggttcagtttgacctcggtgagtccaccctacgtgtcgccaagctatcatgctgatcatattatgccagctctatccttgtctcagtatggttctgggttgtcactaaatccatactatgatcctcatagttccatgttgctatccatgcccactgctggtgggcgtagcgtccctgtgtcagatttcagaataggggatggttccttcctccgagaagttccacggcctgacaattattaggggatgccttctagagacaactgcacacttccagtatggtcatggtcacgggaactctcataatgttcaaatgtatcttcatgctttgtaaaaactatcaaaaagttcaattgtacctgttcatgcttggaatctcacgtctgtgatggtgttggatgccatttgctgcatcgattctgcattacgttaggtactgatgtataccatgtagtgttgcaaactaagaacatgttctgtttgtaagcagtatcggtgtttgaaatattatttcgtccgtccgatgtaagttgtgataaggtactaggatggtaataaagctaatttttttaactgaaa

SEQ ID NO: 32996 - DNA, 1276 bp, Zea Mays
aagaagactatgggcttctagcaattcacgtggttgaagacgtcttgtcccgttccagaacactcgcgctctcgcacgacggcacgagcgcgctactgccatagtgccatggcgagcggcggcggtgctgcggcgcggatggacccggaggtagcaacagagctggtgcggaagggtgccaccctcctcctcctcgatgtcccccagcgcaccctcttcggaatcgatacccagatgttctctgttggacccaagttcaaagggatgaagatggtgccaccgggagcccatttcgtctactactgctccccaaacaggcatgggaatgagtttgcacctactgtcgggttctttcttactacacaccaatctgaggtgattgttcgaaagtgggatgtgcaagaggaacgattaatcaaattatcagaagaagaggatatcagatactcagaagctgtaagacattttgaatttgatgatcaacttggaccatacaatttagattcttatggagattggaaacaactttcggactacttgtcaccgaatgtcattgagcgtcttgaaccaattggaggagaaatcacaattgcgtgggagtcatcatggatggataaagctccccaaagtgacatggagagacgtttggtggaacaactaagagaaggaaagtttgcaaagaatgctcctgtacagtctgggcggagaggatgctactacacaagtatccctgcttcagttaagcataaggacatctctgggggtgacttgacagccctaaacttggacaaaacaagtttgctggagactattttggccaaaaattatgaaggtcaagaagatctattcttgggggagcttcagtttgctttcatagcttttatgatgggtcaatcactagaggcttttatgcagtggaaagcactagtcagccttcttttgagctgcagtgatgctccccttcatacaaggactaacatgtttataaagtttataaggacattatactatcaactcaagcatggttttcaacatacccaagattccaaaagtggggatatgggcaattctctgtgtttggatgaaacatggttttcaagagacatattcctgtaccgtctttcaaaggatttctttacagttgtatttgaagccccagtcgtggatggagaccttctgtcatgggctaggaaactaaaatcgcttctggagactacgtttgggtgggatcttgaggacgacgcagtgaaccttattgatgaagatgacgagcgca

SEQ ID NO: 32997 - DNA, 2519 bp, Zea Mays
atgtctattgtgccttgtgatgtgtgtgtctgtgaattctcaatggatcgtgacccatgggcaaaattccgacgcccaaacagtgagcacccagcccaatcagaggagacacgcacgcaccagcaccctggtgtggccggtgcccggcggccaaacgcgatgccatctccgtctccagccccgccgccagtgctgccgatctcggagcacgaggacgagatagtcgccgcggtggacgcgaacccagtggtggtggtcatcggcgagactggctccggcaagagcactcagctctcccagatcctccaccgccgcggatacacccgtcggggtgccatcgctgtcacccagccccgccgcgttgctgcggtttccgtttccagaagagtagctcaagagcttggtgttccacttggggatgaagttggttatgcaattcgatttgaggacagaacttcagaaagaacatgcataaaatacctcacagacggcattcttctccgtgaaagcctttcaaatcctgagttgaagcagtactcagtaatcatactggatgaagctcacgagcgtagcttaaacactgatatccttttaggtttgatgaaaagattgatcaaggaccgagcttcagatttaaaagttttaatcacctctgcgactcttgacggtttaaaagtttcaaagttcttctcaggatgccctgtgttaaacattcctggaactttattccctgtggagaaattttacagcactgatcgcccaacaaattatatagaatcttcactcagaacagctatagatatccatgccaaggaacctcctggagatgtcttaatatttatgacaggaaaggatgatattgacaagatggtatcaaaattggaggaaagaattcgaaatcttgaggagggctcctgcatcgatgctcttgtccttcctcttcatggttctttgccacctgagctgcaggttagagtatttgctccagcacctccaaactgccgacgcttcattgttgcaacaaatgttgctgaaacttcgctgactgtagatggtgtcgtgttcgtgattgattgtggttatgtaaagcagcgccaatacaatccatcaagtggaatgtattcacttgatgttgtccaaatcagcagagtgcaggctgatcagcgagcagggcgagctggtagaactcggcccggcaagtgctataggctatacccaatttccatatatcagaatgagtttcttgaggcaacagtccctgaaattcaacgctcttctcttgctggaagtgttctgtatctgaaatcgttaaatcttccagacatcaacatactgaagtttgattttctagatccaccatcacgagagctacgtatcattatattaaaagaagaaataaacaaggtctaaaatagaccggggtacaattgacgccttacggcagcctgaacgacactaacatagactgacttatctatataactctaggctacatgagagagggaagcaacaagggaggtcaaccccttggccccggcagtctcccacagacggcgctcatccccaacatggattaggaaattagcaatattaggggaaaggccatcaaagatgcatctgttccggtgattccacaaaatttcaactgactgttttctgaagcattgcaaaattatgttattactatgaagtccagtgaagaaactacttttgtgatgactactcatgtcacttttgaattgttacacgtggttaggggaggaaacctcttggaggttgtagttctgatgggtggtatggtagggtgatgggctttgttgctggcaactcgtgatggtttttccagccttggtgaacattggcagtggctacagcttgggcaggggctggtggcagcgcaaaggagagtgagagggaactttaaggcaaaaacacttttctggttaatccatatggatacatccaaaagatgttatatatatgatccacccttcttaattcaattcaagctttcgccacaaagctctcttattctctaatactgataactttttggcggccccgaattggaggggtatggaggttgcagcatgctagccgtaccctctggttgctgcaacatgtagatgtaggtggtggctactgcctcttgggttcagctgggctgcttggcccatgggcattatgccaaaaacataaatgtgtaaaagtgtacttacagaagacataaatggccaaaagggggagctatttggtgccttgaaataaataaaataaaaaatatgttctttggcttctgcctactatttaaaatttacaaatgatttgcaggtgagtcattagaagatgctttgaggcaattatacctcattgatgcaattgatgaaaacggacaaataacggatgttggacgagttatggcaggaatatgctacaagttcttatagcacaatggaatcgtgaatcgtagctgacacctgacagactatgacaatcgaagtgtttggtgggattttcac

SEQ ID NO: 32998 - DNA, 1726 bp, Zea Mays
cccaggcccagccacagatgaagaaagcgcaagccaccaggaggagctagcaaaagaaggaggaacgaagagaagagagaaattaacagctcgagagaaacggagctagatagtagcaggggcgctgctcgctagaggccgttgatatggcgcttcgcgacgtgctgctgtccatagcgcagacgccgcaccggctgcgcaggagggcgctggtgacgtggacgccgacgcaggagctgaacgaggtgcgggaccggtccggggcgcgcatgaagcggcggctggagtggtacgacctcgtggggctcggcgtgggcggcatgctcggcgcgggcgtcttcgtcaccacggggagggtggcgcgcgacaccgcggggcccgccgtcttcgcgtcctacgtcgtcgccggcgtctccgcgctgctgtcgtccttgtgctacgccgagttctccgtgcgcgtccccgtcgccggcggcgccttcagctacctcagagtaacgttcgctagctacatcttgtcaggcgagttcgtggggttcttcggcggagcgaacattctgatggagtacgtgctgtcaaacgcggcggtggcgaggagcttcacggactacctggcatcgacgttcggggtcacggagcgcaacgcgtggaggatcgtcgtcgacggcatcgccgacgggtacaatgagctggacgtgccggccgtcgcgctcatccttctcataaccgtatgcctgtgctatagcaccaaggagagctcgatgctgaacatggtgctcacggtgttccacctgctcttcttcgccttcatcgtcgctgccggcctgtggaacggcagcgcgaggaacctcgtgcggccgcacgggctggccccctacggcgtccgcggcgtcctggacggcgccgccgtcgtctacttcagctacataggctacgactcggcgtgcaccatggccgaagagatccgggacccctcccgcgcgctccccgtcggcatcgccggctcggtgctcgtcgtgtccgggctctactgcctcatgtccgtcgccctctgcgtaatgctgccctacaccgagatatcggaagccgccccgttctcgtcggcgttcagggagaaggtggggtggaggtgggcgagcagcgtggttggcgccggcgcgagcatcggcatcgtggcgtcgctgatggtggcgatgctggggcaggccaggtacctgtgcgtcatcgccagagcgcgtctcgtgccgttgtggttcgccaaggtccacccttccacaggcacccccatgaacgccaccatctttctagggttctgcactgcatcattagcactcttcacggagctgcaaatagtgttcgagatgatatccatcggaaccctgctggtcttctacttggtcgccaatgcactaatctaccaccggtacgtgaaggtcggcacaaaccggcccctgcatgtcctcctcttcctgctgctcctcaccctgagctctctcggcttctccctctcgaggaagatcgatgggtggtgccagtgggggatgacactgttcggcgcagtctccatagcaatcaccaccatcttccactgcacagcacggcaggacatcgccggaccctcgttggagtggtcggttcctctgatgccatggcctgccgctgcatctgtcttcctgaatgtgttcctgataaccactctcaaggagattaaactttttagatgatg

SEQ ID NO: 32999 - DNA, 2165 bp, Zea Mays
gcaagattctctgggcagtttcatagccggccggacgccactctatcccggccgtcggccgcggttcaggctctccttccattagaagcactcttctagtttagactttataatagaggcgctgaggcctcacccttttccctggtgttgcaagttgcaacacacagcgtccggcgagatcggcgatcagaaaccacgagcccacccaccatccggaacgcgcgcgatgtgtcccatcagaggtggtggttgttcttggccagcgtccgtcgtcggctctgccacggcggcgctgctcctcgccgccgtcatcgtgcggctcttcgtcccccgtgcctgttcttcaggaattatcaaggggcggcggcaggtaggtgctggtgctgccggaggagcacggctccctgccggctcgctcgggtggccgctcctcggcgagacgctggcgttcatccgggccgcgtactcgcctcgcccggagtccttcgtcgagaaacgccgcgtcttgtacgggaaggtgttcaagtcgcacctgtgggggtcgccggcggtggtgagctcggacccggagtgctcggcggcggcctccagcgccgggtgcacggcctcgcgggcgccttcttcaagtcgccgcagctcaaggcgcaggtcaccctggacatgcagcgccgcgtcggccgcgccatggacatgtggggcaggcggcgccatcggagcatgggcgacgacagcggtggtatgcccgtgcgtgtgcagaacgaggccaagtcgattgtgttcgaaatcctagtgagggcgctgatagggttagaggaaggggacaagatgcagtacctcaggcaacagtttcaagaattcattgccggtttgatatcacttccggttaagcttccggggactcaactctatagatccctcaaggctaagaagaggatgacaaagttgataaaaacgatcatccaagagaagaggaagaagatgatgtcggaaggcgacgatctgcgtggtgggactcatccacgtgatatgatcgacgtcctgctaggcaacggcaacgacgagctcaccgacgagctgatatctgacaacatgatcgacttcatgatccctgcagaggactccgtgcccgtgctcatcacgctggccgtcaagtacctcagcgaatgcccacaggctctgcagcaactcgaggaggagaacatggagctcaagaggcagaaatcaggcgcgggagaaaccctagaatggacagactacatgtcgctcgccttcacacagcacgtgatcacggagacgctgcggatgggcaacatcatcaacgggatcatgcggaaggcggtgcgagacgtggaggtgagaggccacctggtcccgaagggctggcgcgtcctcgtctacttccgcgccgtccacctcgacgccgccgtccacgacgacccgcacgccttcaacccctggaggtggaaggagaggcccgacgtcgtggccatgagcggcggcggcggcggcggcttcaccccgttcggcggcggccagaggctgtgccctgggctcgacctggcaaggctcgaggcctccatctttctgcaccatctcgtcaccaatttcaggtgggtggcggaggaggacaccgtcgtcaacttccccacagtgcggctcaagcgagggatgccaatcgcagtgacgcccagaacctgctgaacgcaacgcaacttgccaggcaaaaccatactatacatttatactcaactaaagaggtgtgagaaataatacagtacatgcatgcatgtaatggagggcgaaattaaaagttggcacggcaaagaagctgctggtatgccaaaagttcagtttgcaaattatatagtttaattactattacactagggagaccctatgcatgtctgatgcctcgttgtgaatctgtcctgctccttcaagcagacaaatctacgctgccacaacaataagcatacaattttcgacggtcaaagccatcaaaattaagctcttaaccgtcggaaaataagttacttctcatagcttaagccttattgctcacagtcgatttgtaaatcatcagaaataacgctactttcgacggatgcggaaataacttattttcgaccgacgttagcggccatcaataataaagtcgactaacg

SEQ ID NO: 33000 - DNA, 172 bp, Zea Mays
cctgcggcgctcgacgggccaccgctggctgccaacggcgcgcaccagacgctagatcgggctgcccagggcagttaactgcaatccgatgccactccttgagtcctccaagggggagatgaggcagatggggatgggaggatgaggcggcggcgagtgcgtgcatggagac

SEQ ID NO: 33001 - DNA, 1502 bp, Zea Mays
gctgcaaagattcttcaatctgattggtgcaaaagacagttatagctaggaagatacatgttttccttctcaacagctgcctcatactctgctgtgaagttgtgttgaatgttgcttgggcattgtggatggtgatgatgttgaattgaataatcttcatcgacagataattcataaagaagcatatgttggacaatctaaagtgaagtcagcagctgatgcttgccgattaattcctctatcaaggtagtagagcatcaccatactctgaagccatgcaatgctttggagattgcacggaaatatgatatagttgttgatgcaactgacaaccttcctactaggtatatgatcagcgattgctgtgttttgctgaacaagccacttgtatctggtgcggcattaggcttagaagggcagttgactgtttatcatcataatggaagcccatgctatcggtgcctctttccaactccaccacctgtggcagcctgccagagatgctcagacagtggtgtccttggggttgttccgggagtgattggttgcttacaagctctggaggctataaaggttgcaactggtgttggtgagcccctatgtggaagaatgctactatttgatgcactctctgctcgtattagagttgttaaacttcgtggaagctctccagattgcacccattgtggcgaaaactccgttttcacagaagaagactttcagaagtttgactatgagagcttcacacagtcaccaatgtctgataaggcagcagcaagcgtgaacgtactcccagagagcgcgcgtatcacttgcagagagtacaagaaactggccgacgatggtgaacctcatctactgctggacgtacgacctgcgcatcacttccagatagcttcgatctctccgtcccacaacatcccgctctccatgctggaagagaagctgcccgcgctcgaagcctcgctgaaggaagcaggggaggggtcagccttggttgtcctgtgtaggagaggcaatgactctcagagagccgtccagcttctccgcgagaagggattcgccaacgcgaaggatatcatcggtgggctgcaggcgtggggacaagacgtcgatcctgatttccctgtgtactagcgagatggaaatggatgcactaccttgtaacagtttggatgccgctagaacgagaactctgatactatgatttgagtactaattttgccataccgtgtacttgcaaaaacaaatatacaactggtatggacacggtattgtgatgaataatgccatggacaaaataaaatttgagtgatatttttttgcaggtttaaatttttagctttgtgtactacatttacgattttgtaatgattgttaaaacattgcgacatgttgagttaactatattttggctaaaggggatgcccgaaccccaggacaccaatgaattattgttgtttcaatccagagggcacactgctctgttccagttaacaggc

SEQ ID NO: 33002 - DNA, 2489 bp, Zea Mays
gaaaagttacgcatcttatttcactgccagccctctgaaaaaaaattaaaaaatgaggtcccagttccacacttccacccacctccagagccaaaagagccggcggtggccggcagccaaaacccacgtcggatttcgccgccgccgccaggagctaggggacaaggcaacgccggcaggtgcaacatttatgcgtgtaccgcccggcagccacgcgtacacttctgccgcagagctaaacgcgccactccgcggcaagctgatctgctgctcccaagtcccaccagccaccgcaccgagtgccaatggcgactgcagcgacttctacgccggcggcgtggcagtctactctggtctactctggtctacgccatgcagggacctgcccgtgcttctcgcccagccccgctcgctccccgtcatcgtcacctacaggccgaattgggagggaggccagtacgcaggcgaagatgagccacggtttgaggcgcttctactggcaatggagctgggagctgaatatgtcgatgtcgagttcaaggtcgccgacaaatttatgaagtatttgtctgggaagaaacctcaaaactgtaagctcatcatttcagcatacgactacaagaccactccatcggtacatgaacttctgaatttagtagctcagatacgagcaacgggggctgacattgtgaaaattgaaaccactgctgctgacattgtagacacatcaagaatgtttcaagtacttgcacattgccatgaaaagcaggtgcctatcattgggctggtgaggaaagaacatggttttatttctcgtattatttgcgcaaaatatggcggataccttacttttgcatctcttgaaaatggaaaagaatctaccactgagcagccgacagtagcagacttgataaataagtacaaaatacggcagataggcccagatactaaggtctttggtattattggaaatccagttagccacagtaaaagcccaattgtgcaaaatcaagctttcagatcagtgggtttcgatgctgtgtttttgccatttttgtcagatgacttggttcagtttctttataccttctcagcaccagattatgccggcttcagttgcacaatgccccataaagaaactgcacttaggtgctgtgacgatgtcgaccctatcgccagggacatcggagctattaatacaatcattagaagacctgatggaaaacttgtaggctacaatacagattattctggtgctatttctgctattgaggatggaataagagcatcacaaccaacagattcgatcacttcaccactggctggaagactttttgttgttattggggctggtggtgcaggaaaagcactagcatatggtgcaaaagagaagggagcaagagttgtgattgcaaaccgtacatttgcacgagctcaagaactcgcccacatcattggcgggactgctttgaccctgtcagagttggaaagctaccatccggagaaagggatgattcttgcaaacgcgacatctgtggggatgcatccaaacgtcgatgaaacccctttatctaagcacgcgctaaaatcctatgccgttgtcttcgacgcggtcttcgtgccgagagagaccagacttctccgagaagctgcagtgtgtggagccacagtcatcgacggtttggagatgctaatcaggctagtgatggttcagtttaagcttttcacggggggcatgacagctccagaaaggttgatgcgtgaggctatcctgacgaagacacattgagggtttgttcaaataacaagatctctacactacagatgtccctgcaaaaaaaaaggtcccagttgtacatgtcctccttcttgcttcttcctcggcgtctgggaagcaccgtatctcattttcaacccaagcaaggagaggaggtgcaggttgcaaaacaacgaatggtcatgttcaataaggaatggaatgtgatttggatcaacactagttttctgtcatatccattccacggtttggagataaaattggttggcaacccaacctgtgcagacgtgcaccagttccatattccccttcagatttggattcagagaagcctttcctgacatgagacgtctcattagacacgaactttcttttcccttaaaattcatttcagctggcccgaacttgtgcagtcttctcttctcctacactacaactgaaatgatttgtctctaaacaagtgttatgctataacatacaataaactgtatattattaactacgtttttgagaaacatagctcccaaacaggcccgaacttgtttgtcttgacttttctatctttttttagagatatttttagatatggattcagtgatcagtttgcctctcagccattgtaaaattagatgttccgagctcaaacattttggtttgccttattttgtatcagcataacgacatttgtgttcccctaccgtgcacatcaaag

SEQ ID NO: 33003 - DNA, 1698 bp, Zea Mays
ccttatctaagctactgtttagctatctgtaaccaggcctgatctaactgcaagtggatacgtgcattattcttactaacttcgatttttgattatcggttgtacatgtgtattcccatttcctttactgggtgtgctgctggtcaagtgttaccatcgtcgcatgggtgccctttttggatttactcgctgggatgctgtcttgaaattcagatgattctgctggtgccataggtgtgaagtacttagtggggactggggagtgggcggacaagattttcattatagccatataaaatggagtgttccaattcaactagttcccaagggcatcatgtaggaaagtggaatcaagtgcaaatcattgatccttccattgttgaaatgggaccaagtcaccttccactgagtttcatgagaagatgccgtggagtattgtgtttggtgattatgatattaacagcatttatgatgatggtatacctgtcccctgttactactttccttgtgaggttgttcagtgtgcattacagcagaaagtctacatgcttcctgtttgggatgtggttagccatgtggccttttttgtttgagaagattaacaagaccaggtttgttttctctggtgaaagtgtgccagcaaaagagcgtgttctgttatttgctaaccacaggaccgaggttgactggatgtacttatgggattttgcattgaggaaaggccgcttgcagtgcatcaagtatatccttaagaaaagtttgatgaagttacctgttttcaactgggcatttcacattattgagtttattccggtagagagaaagtgggagattgatgaagcaataatccgaagcaggctttctgaatttaagaacccaaaggatcccctttggctggcagttttcccagaaggcactgattatactgagaagaagtgtatcaaaagtcaagaatatgcagcagagcatggtttgcctgttctgaaaaacgtactccttcccaagacaaagggtttcaattgctgtttgcaagtgctgaggagtaccatagatgctgtgtacgacatcacgatcgcctacaaacaccggccgccgacatttctggacaacgtctacggcgtgggtccttcggaagtccacatccacatcagcagcatccaggtctccgacataccggcgtccgaagacggggtggctggctggctggtggagcggttcaggctcaaggacgagctgctgtccggcttctccgcgctgggccacttccccgacgaagggaccgccgagggggacctgtcgacggccgagtgcctcgcgaacttcgcggccgtggtcgccgtcacgggcctgctcgcgtacctgaccctgttctcgtccgtgtggttcaagctcttcgtggcgttcagctgctcgtctctcacgctcgctacgtgctactctgtacatctgccccagatggtaggttttggctcaggtacccctgcgagcatccacgcgaaggaggcttgagcgtagtagcgttgtgactgtaactgagagctgtatgtatgtcagcagagaatttggtactgctacctggacgcggcttttgtatcaccacgttgctgtgtgtagtatatgtgttggtcaatgtgtttttgctaccgccatcttttatctggttcaagtaattgggcgtattcgttgcctaaggttttg

SEQ ID NO: 33004 - DNA, 1466 bp, Zea Mays
tagagataaatattaatacttctatctgtgtatgtgtgtatatatacatatatttcatgagggtatatagatttatatgaacaatcgatgtgttaataagttttagaatttttaaatgaccaaaatatagttcccaccgcatattttccaatatttggcctaacctgaggtaaccctggctgtgggccaaattcttactgacaaccttgaggaggaagacatccgatgcccgatgccgagcccaaacccgcgagtcagcgtgcggcagcgctccaatccgacttcatccctgctcggctggccgctacattgctgctgaaccctagccgccgcgccgctacctgctaccatcgctccacccgccgtccgccgcgacgccgcccatcgcgtcaccatcgtccggaaactgggcaataggggttgcggccgcccgttgccaccaggtcctctgcgcctgctgctacgggctgtccgcggcaccgcgcgtcacagtcgtcggaggcgcgttgggcggccgcctggttggccagccggcgactgcgtgtctctgtgctccgtggtccctttccttctgcgagaattgcagagcaattggggtacacagcacaggcacatgaatacaacacaacagtttgctctctgattcgatcgatccaactagcctccaagcatggtgttcggccggagcaaatcaacttcgtcgacgacgccatccgcgccctcaaaggcggcggctgcgtgctccgagctgcgcaccgcgtaccacgactgcttcaaccggtggtacgcggagaaattcgctaaggggcagtggcagagggacgactgcgccgaccactggcacaagtaccgcgcctgcctcgaggaacatctggaagacaagcatctgaggcaaatcctactggatgcagaaacttctgcattttatgccatgcctgaggccaaccctcccacaggacaaggaactacaaaatgacaatccacctgattggttacccgcacggccgcaccatctcatcttggatcacctgacgtggtcactcaccctgtggcgggtgctctgtgcttggaggagcagcaggcagcagctaaggcgagtgctctgctatctggacttcttgtcgatccttgtaataactcttctgaagtttggtgagtgttccaattttttttatttgggtcttgtttcatgtttttttgcatattttaagtgtgaaaaactttgcgctgggtaatccaacttccagactacacgacatgttcaggtgctatgataactgtttttgcttgtcggatttcatgcctagctttgtcttgttttggagctcatgtacagacttgtgaaacaccaaattccgtaatgaatgtaatatattgctttttttcagactccgtatgtgatagtattgtcaatgacttctatcgggtaccataattagggatatctagattacatctctaaatgt

SEQ ID NO: 33005 - DNA, 758 bp, Zea Mays
ctctcgtcaaacctgcgctgcacttcagcttgaggaagaaggcgcgctggtgctggagtacctcgccggcggcacgctggcggacgcgctccacggcacctccaccgccgtggtgcacggcgacgtgtcggcgtccaacgtgctcctcttcgacggcggcgcgcggctctgcgacctgggctccgcctgcgagggcttctcggcggccgtggcgccggcgcgcgccgccgtgggatcgccgggctacgccgaccccttcttcctccgcacgggcatcgtgtccaccaagtccgacgtgtacggcttcggcgtactgctgctcgaggccgtcaccggcctgccgccggcgtccgaggcccagaacctgacggcgcggatcctgccgcgggtcagggagcgcggggtggcggggctcgtcgacggcaggctcggggacggcgggctcgacgaggaggaggccgccagcgtggccgagctcgccgtggagtgcctggccgcgcagcccgggctccggccgtcgatggcgcaggtgcgcgccgccatcgcggagaaagcggcgaggtccatcgccaaggcgggttacggccaccatatccagctcagcaagctgctggagctcacatgattccttgcattgtccttgatgtttattagttaggggtacaaaatttaggattgtaagaaaaatggattagtcccgagacactatcctttgcattgtaccatgacctcaaaccatcaagacactatcgcccctc

SEQ ID NO: 33006 - DNA, 1915 bp, Zea Mays
catggcccccgcgcccggtgcgggctgcgggacacggacaccgacggcaggccccatccaacatctcctcctccccgtccctctcctcaccttccttccctccccctccctgctcggtgctcgcacacgctggcgcggcttgcccccacgctgcgctcccaccaccaccactatataatccccgatcgcctcacgcacacgcaccgacccaccggccgacgaggggcgaccgccgcaacacaaatccacacgcccgccgccaccgccgccatacggacccactcctcctttgccctggtgcgagcaggcttcggcagcaaaccccgcagactgctcccggacgagggagaacgcgcggggctgggctagccgctacccgctagccaggggaccggggcggaggcagcgaggaggtacgtatggacaagtacgaggcggtgcgggacatcgggtcggggaacttcggggtggcgcggctgatgcgcaaccgcgagactcgagagctcgtcgccgtcaagtgcatcgagcgtggccaccggattgacgagaatgtgtacagggagatcatcaaccaccgctcgctgcgccatcccaacattattcgcttcaaggaggtgatacttacaccaacacatcttatgattgtgatggagtttgcagcaggtggagagctttttgatcggatctgtgatcgtgggcggtttagtgaggatgaggcccggtatttctttcagcagttgatctgtggagtgagctattgccattacatggtacaaaacgcacaagcagaaaaatttctgttcattcgacaaacaaaatcacaatctactcttttaagaacaaaagaattgtatcccttgtgtttattgttttttagaagaccacactggttgttaacgtaaaaggtgtactcaatgtatcaccgtgtatgtgtattattatttctcataattcattctgaggacaaaattttcaaataccagcaaatatgccatagagatctgaagctggagaatgttctcttggatggcagcccagctccacggcttaagatctgcgattttggctattccaagtcatcagtgttgcattcaagacccaaatcagcagtaggaacgccagcatatattgcacctgaggtgctatcccgtcgcgagtatgatggaaagcttgcagacgtatggtcctgtggggtgactctttacgtcatgcttgtgggagcatacccatttgaagacccagatgaccccaagaatatacgcaacaccattcagcaaataatgcaagtgcaatacaagataccagatcatgtccacatatctacggaatgccagcaacttattgcccgtatctttgttgccaatccaatgaggagaatcacaatgaaggaaataaagagccatccatggtttttgaagaacctaccacgggaactcacggagactgcacaaggcatgtactacaggagggataacagggtcccttcttattcagaccaaacgtcggaagaaatcatgaagatagttcaagatgcaaggaccatgccgaaatcatccagatcaggctatgggtggagcagtgagtattcggatgaagaagaagagaaggaagaggaacacagaccagaggagcatgaggaagaggaagatgaatacgataggagggtgaaggaggtccatgcaagcggagaactccgtatggacgctcttcacatatgaaagctagtggaagagaaagttgcatgtagataactgggttgttgcggatctgaaggatccagtgggatgtatgcagttttggcttgagaatttgcttctgtttgtcaattttcatgtaacataatttaatacaccgagacaacagactaccatgttcttatattggtaaatatgaagcatgtaccttctatctgcat

SEQ ID NO: 33007 - DNA, 803 bp, Zea Mays
aaaataaagggaaatacccataaatggacaacaccaacgccttcccccacctctgtgccgccggctccgacgccttccaccgcaccgacgccgctggctccaccgcctacccctcctcgacgccactggtcctgttcacgccttgagccctctactggacgtcaagagaagtgctgccctgcgagttcgaatccagaggctctccatgacttcatctgtctctggctcttcaaaatcacctcgtaagcctccggtgtcgtaccggaaatggatggatgcagataatcctgtttgttgcaagtgctcaggtgttatgttggagctgacctcgtggaccgattccaacccaagcagaggattccttcgttgccaaaaggataagatttatgctttgagagaggccaacaacgatctgagagacagacttgatgaatcgaacgaacgtgtggttgtgcaggaagctgagatcgccagactgagaatgcagctagagaagatcactagtgatcgccagactgaaaatgatttcagctgtagtgtttgttgtaatcttgtgtttgctcacgcgcttgtttcaacatggggctgtggtcgacagtagcaaatcttatgaactgatgtagttgttttggtcagcaatggatagccaagcagtggtgaactgatgtaggtattttggtcagcagtggttatgaattgatgtagttcttttggtcagcaatggatagccaagcagtggtgaactggtgtgtggaatgagctccaccggggcaagggtatttatagagggattagggatgaaa

SEQ ID NO: 33008 - DNA, 2238 bp, Zea Mays
gctgcggaaaggatccattgccatctaacccatccccgttcctaggtggcgtagggcgtagcatccatctatgttcgtcttcctcgatcctgaacgaaaaccagtagccaaccttccccgcgtgctccgtgctcattcattccccatcccgtctcctcccaaaccagaagacaaaaccctagcctcctcctccgtgtgatgggatgccgtccaaaccctacccccactccctgacctcctcttcctcctccgccgtcgcccccgcgacctggatgtccgcatccgcatggacggtgcccgagtcctgatcgccgccggtgccaccgccgtctgctgcttcgtctgcgccttctgggtcttccgttcctcttcgtcctcctcccccgcatccccaaagaagcaccaatccccttccaccaactgctgtggctgcgcctcctgcggctgccgcgacgccaagcccgccaacggcgagatggccgtgggtggggagaacaagaagaaggcgccggagccggatccgccggaggcgccctccatgatggagcagctcgtgcccgagatcaccacccacgcgctcagctacctcgactacaccagcctctgccgtctctccatgaccaactccgccatgcgccgcgcagccaacgacgacggcgcctggaaggcactctaccacaaggattttacggtggaacagggtactataaatcctcctaatggatggaaggcatactatgcagctacaaaagccatcattaatcttaacgcggagttctacaatatcatcagggaagggtccttgccagcaatgagtcgtttttggcttaatgcagactatgtcaagtgtattcatgcgactggggagttctgccctggcatgctttgtcgtgtcgtgcagttcagctaccagcgagttgattgagttttattctagaaccagaatcggtcgaagctcaagtcatggtgtggaagtggcaggtagctgatgctgtcgaatctggagcattcagacgcagtattataaccgaggtattgtcgcgagggacgaattccaatccaacacaacatctgtagtgcagcacaagaactgatggtttgtttttatataatattgatacatgtatcttacggaacgaggtctagtcttataataaaaacaaaaataatgggacgcgtgcctcatacatagccctttatcatatcaaacaaaggtggatagtttggtctgtccctccagccattttattgtctgtgcattaatggattggcactggcggcgagggggcggcaaggaaggctcaggcgtcatccttgtcagcgaagatgtcgaggagggcgagggtctcggcgacggagagctcgagccgaaacttgggcccgtcgtagtggtgaaggatggggcggaaggcgtcctcctccagtggatcgtagatcttccgcgttgccactcgcacctgcacatcacaaacatcatgcatgcgtcaccacttgggtaacaactacgagtactagatactccctagaggcctagatgcgatgaaacaacatgctacagctacaggttgcatcctcacgcctcttgcagttgcaccatctcgtctaaagatggcaacgggacccgttgccactcgaggaattactccattagagaactaagtttggtcgtaattttacacccacgagagacctgacgtgtcccgtaaaggttaggcggtcagccggtcactagcaacctacccaggcagaggcaggcagattggttgtttcgcacggacacggtgtttgtagacaattctttaaaaaaatgtttcttgagttgtgatccggggcctctaatcttttccagctccacacgtcgtcgcaacatgtgatgtgggaatgtgtgtgtgttttattttattttattttccgtcataattctttcttgagttgtgatcccggggcctctaatctttaccggctccacacgtcgtcgcaggcgcagcatgtgatgtgggaatgggtcgccacgctagccttttgtgattttgtctgtctgtcggtgacacacgtactgtttggtgttgttgaacttgaaccgttcaaacaagtgtaataaaagtcacgctagtggtgtggttgagctgatcgatcgtccgccatgacgggagaggagaggagaggagaggctggagctgcattaattggaagaaggggactggattgaagcgtactacctgtgcagggaagcgcgac

SEQ ID NO: 33009 - DNA, 1002 bp, Zea Mays
tgcactgcggggaggacacttctgtccatgctctttgtaggcagagcttatttgtccatttttggagggagaactatgggagatgatgatgatgatcttgatatggtgtttactgtgtccttggaagaaaaagaaaacttgtgcctgtatgggtttcctaatgagagctgggaagtaaatttgcctgctgaagaggtgccacctgacctcccagaaccagcattaggcataaactttgcaagagatggaatgcaggaaaaagagtggttgtccatggttgctgcacacagtgatgcatggttactttctgttgcattttacttcggtgctcgattcggtttcaataaaaatgacaggaagcgcctctacagtttgattgatgatcttcccatggcttttgaaattgttagtgggaagagtgaaaccaaggcaccagcaccaccaagcagtagtaaccacagcaatatcaaaccgaagtctaacaacaaaaagaaccaccggagcctaaggtgaagcagccaaagccgcgtgcccctgcagaggaaggcgaggaggaagatggcagtgcaagcgagggcgagcacggggagacgctgtgcggcgcgtgcaaggaaagctacggccccgacgagttttggatctgctgcgacctctgcgagaagtggttccacggcaagtgcgtcaagatcacggcggccaaggccgagcacatcaagcagtacaagtgcccgtcctgcaccggcggcggtggcgtcagcaacagcggcaccaagcgagcccgcccatcatagctgcgacttttagtgatgtaaactgcttagaaaaactgttgcggacatagcgcccatcatagctgcgactttttaaatggtggtgtaaacttttgtagtgcgactaggccgtttgtcaccctatcatacttggcttcaagtaggttttctgtttttcagttttcattatcatactcgcttgaagtagtgtgaatgaatggcgtaaaatatc

SEQ ID NO: 33010 - DNA, 5750 bp, Zea Mays
atggcagacgttggacggctggagcacttggagcagagacgtcggcaaaaaccagagaggacagaggagagaattagggtttactggcggctgggagggtttctggcgggtttgtggttagccattcatgtcatgacacaaattgaacatcgtgggcttcaaaagcagtggacttgggaaccaatgatgggagaaagtttgatcttggcgctagtcgataataatgatgatgtgcggcaagttggaagagctctcttggaacatgtatctcaagcacggggtttgacttctgggcttcaatttctgtgctcgagtgcatcttcactcactgctgtttttctgggtctaagatatgtagttcaactggtgggaacaagatcagttttggcagattttagtagttttcatcacttgttttttgtcatatgcaaactacttaaggaggttgtcgttcaaagaccccaaattgcacagccagcgaaacctccagaagggggtttcttgcgacaaccctattcaagtgtcctagctagtccaccagaacatgctgtggatgttagtaactgggagaagttctgcactttgctttctgcaactctctggcctttcatttccacatgcctaagagaaggaaaggagctaataggtctcaaacagtgtcagatatcttgcgtccgtttgcttgagttgcttcctctggtctatgagagggtcaactcaaattgccgcaccctatcttgcagtacgacgacagtgtttcagaatcctatggatatttcatggtttattcatttggttcactggggaaaatcatctctccttgtgattatcagacattggaaacaatgcatgctctctttattgaaagaactaaaatgttcacatagcggtaccattcaatgctacattgaagatcttgacaatatcatttcacatgatgcagtaaatatcaatgaacttgaagagagagtttcaaatcttgaacttgtactgtccaaggaggttgccacaaaaattgaaaggagagggttagctgacttaccaatgtttaaagaaccaattgttagtgttccctctccagttcatgagagacattctggcatggacagttttgtggatgttgaaagcacaaagtcctcccatccaccagatgttcatgaaataattctcctttcagacagtgaggataatttactggcacctgacgtgtccagtgaggaggttttgtcatcagttatggagaatgatgcatccactgcttccaatatgttgaaagatgctacacctctagaacaaagtacgctgaacgacaatagacactcacctttagaaccacagatatgtcatcctgttagtaatattagtgcctcttctaaacctgtatcaacagatagtagggacaacattgctgccacaaaaggattacttcgaatgaaaaaaccgagaccgccaatgaacacaaataataattccacttcacccaaaatggttaaatcatctgttactggcacttctcaacaactgcatcctaaattgttgtcagatacagaaaaatttaaatccatcttcagggatatatctgatgatgaagatgatcctttagaccatgcacttgataattaccggaggccacaggttctttcaagaaagccttgtatattagttcccaagagacaagttgttcagcttccagtgcctgttggaagaaaaccaggttctggcagtagggttacaagtactcgacgacttcaaccacctaaactgggtagctggtttagaaacatattggaaatggactacttcgctgttgttgggttatcttctcctgagatagtaagaaaacctgctttaaaagaagttccggtatgttttgattcaccagctcaatatgttgaaattttccagccattagttctagaagagttcaaggctcagttgcaaaatgcttatgttgagactccccctgatgacatgatgtgtggatgcgtatctattctcgcagttgaaagagttgatgatttccttattgtccgtgcccgtcctgagcatagccagtcgatcaaattcagaggttgcacagagaatgatttagtactactcaccaaagatccactgaagaaccaaggacaacaagtccatgtgcttgggaaggtggagcggcgtgagagtgataaaaataaggcattgatttttgtgatgaagttctttctttctagtgacaatgcacgcctaaataaagtgaaacggtttcttgtggaaagaacattagagtcatcatacaatgatagccagctccaagctctaagcattgccattggaccaacaagctctaaagcaaattttgatctgtcccttattcagggacctccaggtacaggtaaaacaagaacaatcgtagcaattgtaagtgcattgctatctttacatgcaggtgacccttacaagtcacagagaaatgagtacgtcggtagtactgattttacaaagccaagagcaaagattagccaatctgctgcagtaattagagcttggcaggatgcagcccttgctaaacaactggaaaaggattctcagaaagaatgtcctcgaacaacagagcggtttgtgaagggaagggctttagtttgtgcgcagtcaaatgctgcagttgatgagcttgtgtcaaggctcagtgagggattgtacagtgctgatggaaagctgtataagccttacatagtgagggttggtaatgcaaagacggtccattctaattcgttgcctttcttcattgacacacttgttgagcaaagattatcagatcagttgaacattaataatgatggcaaaaaatcatctgatgctgaatcctctagttcacttaggtctaaattggagaagattgtggacagaattagatattatgagtcaaggcaaaaactaattgagtctgataaaagtgaagatggttcttctgtacctggtgaaggtgaggcagatgaagtttccgatgaagcacttggtggaaagcttaactttttgtatgcacagaaaagggtagtttctgcagaactggccactgctcatgcccgtgaaaaagaaaatagctgatgaaaacaagtttctgaagcacaaggtacggaagtcgattcttggagaggcagaaataatcgtgactacacttagtgggtgtggaggtgacatttatggagtttgctcggaaactgcttcatctaataaatatggtactttttcggagcatgcactgtttgatgttgttattattgatgaagctgcacaggccctggagccagcgaccctaattccccttcagattctgaaatcgagaggaactaaatgttggtgatccaaagcaactacctgccactgtgatgtctggattggctagcaagtttctttatgagtgcagcatgtttgaacgactacaaagagctggttacccagtgattatgctcactaaacagtatcgcatgcatccagagattagcaggtttccatctttacatttctacgaaaataaactgcttgatggtgtggaggtggctgataaatcagcttcatttcattttcatgagtgtcttggtccatacatgttttttgatattgctgacggacgtgaacattgtggaagaaatgctgctacacagtcactctgtaatgattttgaagctgatgcagctcttgaaatactgtcatttctaaataacagatatccattggagttcacctctaggaaaataggaatcattactccatacagaagccaactctctatactccgttcaaagttcacttcctcttttgggcctgagattgttgccgagatggaaataaacactgttgatggatttcaaggtcgtgaagttgatatcttgctgttgtcaactgttagagcctcaaattcttcagatgatagccatcgcactggtgaagcacgcagcattgggtttgttgcagatgttagacgtatgaatgtcgcactaacacgtgccaggctttctctatggattgttggaaatgcaagaactttgcggattaattcacactggaattccttagtatgtgacgctgaagaacggaatctgtttgtctcaattaaacggccatatggtttgatgtttgaaaagggccaacctcattccagaaatactcataggtacactagtcatcttaagcagaaggataacaaaaaagctgctttgatgagctcaaagagagttggtgttaaattccaggagcaaccaacacatgctataaggaatgtagaaaaagaaagtctatcaaaagaacaatcaaaatggacatcattatgggaccaaaagattcctggaactcaagagtccgttatgagatctagtgaagacaagtcacagaagcatagtggtaatatgagagtcaccaagtgttcactgcaagaaaacatggatcaggattttgttatcagaaaacaaatggatgataaaaaattggctgtacataatgataaacatctggggctttctaaaggcttggttaaacgaggtgatgatggctctattgtcacaatgaagacagaattgaatatgactgtggagcagaatctttgtaaggaaactaataaagcttcaactgaccaagagttgtttcagaattcaaaggtgaggacatgtaataaaaagagtgccagcgaaaacagcaagaaaaatgatgtttctccaccggcagttcctggtcagcagaagttgatacaaaagtcaaaagcaccaaggacggtttctgagaagcctagatgtgataatttaaatcatgaaaattatgatccagcgaataagaatgatggtgcttatccaccaacagaccctgatatgaagaaagctaataaggctagaggagctaggaagttttctgagcaaccaagacctgggaatttaactcaagtggatcttgcacgtccatctcattttgatgaagcaagtagccatgtgccagaactcaagaaaagccgatccagcaagttaactagtcaaaaagatttggttgcagaaagaaaacgacaacgcgaggatattgacactctgctttcgtcatctcttatatcatctacgaaaccttcctcaagtcgtaatactaagaaacagaaatgagaagactccagcaaagcttttgtgaagcaattttggtagcaatggtgcttggatcacgagtttccatcttccgaagcaagtagaggaaagctaactgcctgtaatctgggagctgtatgtgcagcaactgacaaacatccagtggacccaaggagccctccctccatacggttgcaaaagtgctggaattttttggacggctgttaatggtttattacgtcattttatttcccattttcatccgtttggatgcgagcaaaatgagaccatacagacaaatagagcaatcatactgcttgttgaggcgcaagccaattttgcagtgtacataactgtaagtagcacccttgtagcaagaaggcagattagcatttgaacatgcctggtggtgtccttaaaatgaaatgtagcatgtgtggtgtgcagccaaattacagccgaagctctttggccctcacgtctgtctccatggggttcagttgcttctgttggtgaatgatgatgactttggacgtgacgacgcgtgaggttctcattgggatcatcgataacacgagaaagttggagagaagagaggaaaaaaaaactgttgaatttgtgttacctacgtgttataagccaaatttg

SEQ ID NO: 33011 - DNA, 866 bp, Zea Mays
tatggggatggaatacgatgaagaaaatccccgctctgtaactaagtgtgagcaccatttccatctttgctgcattcttgaatggatggagcgaaaagatacttgcccagtttgtgaccagacaattttggtggatgagatgtccgaatagacttggtaatcctggtggatcatcacttgaagctgtttgttactgaggaagtgcaggcaacaactactacactcttgatattcgtccattctgggtggctctcagagtaatgaattgatggggcaaaaattgaaaggatgaacgacatgaaatgtatttacgccccctcctttaccctgcattctgtgtcatgcttttgctgttcatagcaacaggtggactaggaaactgcttggttgaattatatatagagagagatatgtcggcttgcaggttgattcagttaaaagtgcaaaactatgccatttcgcttttctgaattcagagtttcagacatctgctggttcttccaggaatccagtcagctttttacatggtatattaggtggttgcaggtaaaaatggtctagatggaggtgggggtttctttgtataatccacatgctattcaagcttcctgtatataatatttcctgttttcttcgatttgtctagtcaggcaagtttcagggatatagttttctgttatgctgaatatttgcagatcctcgctgttctgataaaaaacttactgatcatcccaaatctgggccagacaaaacgtctcagggatataatataatacatctgacagctcttgttaaaacatcttcggggcctgctaaaatgttcacattatgttccggctatgaaaacttgcagttctctgcgatgc

SEQ ID NO: 33012 - DNA, 1285 bp, Zea Mays
ctacgcggctacgcccaggtcttcttcgggcccttagccgcgacgagcgccaccagggagtagaagaggttaaccttctggttggaaacgatgtacttcgaaggctatggcttccgtggaagtactttcgagcagacatatcgctgctatcctgcgtctttcatcgacaagccacaacttgaggccggtgacaaaattataatgccaccatcagctcttgatcgtcttgcatctctgcatattgaataccctatgctatttgaagtccacaatgcagcagcagaacggacttcgcattgtggtgttctggagttcattgcagaagaaggcatgatctacatgccatattggcttggagaaaactttgcggaacttttcttgtctaactacaggtgacagcattatggttgcatataataacaagaagtactacattgatatagtagagacaaagccctccaatgctataagtattattgagaccgattgtgaggttgactttgctccaccacttgactacaaagaacctgagccagtaaaacctgctgttcctgcaagcacggagcctggtaccgacgttccagctgaagaagaaccaaagttcatccccttcactggttcaggaaggcgcttggatgggaagccttccaaagataaagatgtgctagcctcttcccctgcaaagcgacaagctaatgcgaccaacggtgtacagccttcaacagccaccacatcacagggcagttcatcgcgtaaggccacaggaaaacttgtctttggctctggtggtaaccgagccgaaaaggcacctgaaaaggaagcagaggagcccaagaaagaagacccaaaattcgcagcattcacaggaaagaaatactcactgaagggctgaataaataggaagacaatgtattatcagtatttccggtgacggacattctcagggagaagcgcttaccaaccctgttatgtgggagggtctttcggtgggatagtggtctctgtttctcctgaactattacccttgtgtagttgtgtcagccacaccggagcaactgatgtataaagccgctcttgtccgataatggatttctgttgagcttgcatgtacattttctaaaaagataactgaaatcgccaaaaaaactacaaatactatctagaattctgttgaaattttagattttatttgcacttatctttgtttcactctagctttgtcactgagactatttcttttttttaaaaatatttatgtgtttagtatagctttgcttcattttag

SEQ ID NO: 33013 - DNA, 535 bp, Zea Mays
gtcagcagactgttatgtgggaccctggatagatggcaagtgggtggcatgtgtgcctataaaaagggagaacgtatagaccgagagaaaagaaccatttgaacaaactaaatcatctctacctttccattactgttatctttttatattctctcctctcatgtatcttgtttctctaccttctagaatactgcaaccgttattactctgaatttggtgcctcacgttgttgattggagtttgtgggatcagagtcgctaacatttggtatcatactactcgcatcctggaagattgcacgcatggaggcggcaatgcagcagattctcgacgcgatggcgcacatggagctccgcttgacctatgtgttggccggccgtggtggcgagcacagggtggaggacgcggactcagagctgcgatcctccaactccgccacctcctccatcaccgcgccggtgtacgacgccggcgtgttcgactcttcgacggccccagcgtacgacaacgagttcgcgacaagcgcccgctccgc

SEQ ID NO: 33014 - DNA, 534 bp, Zea Mays
ataccttgagatcttcgggcccgatattcagaactttcagagaaatttgatcagaggaagcgacagaaagttagtggtggtcagacaaacgggaagtcgggaaccattgtgcatctggtggtgaaggccatggagaacgactaaatgcaggtcataaagaaaggatgcggctgctggcgtcagctgaatttgatcgaggcaaaggcgaggacacttttggaatgagagacgaggattggttagtgttcaacaagatgagccattgctcccctgaagcttgttagagcacctgatcttgttttagatgcgtggaggggtgatgttgcctttgcggcatcaagcaagtttggtattgcagagagcacagtacaacattgtttactcaatataacctctcacagaaaatgacataatgagctattcatctcagttaggctatttatttgacagctgatacaatttgatgtagcaacaaaatttttcagaactgaaagtgatttttttaatgatcggatttggagggttcaaattacg

SEQ ID NO: 33015 - DNA, 1534 bp, Zea Mays
gaaaccttcgcgcggtgatggagcacgcgcacgcgacctcgacacgcacgcagcagccagcaggtgaccgccgtcacgcgaccgcttcccacactcccttccccaccagccgaaaccgaggctgacgctgcgcgagccaaccggcggtgatgcaggcggcagtcggccaccgcggcgccaaccttggctccccgtcactctcgcgcttccggtatggcttccgcctccccggccggtcccgcctcttctctgaaaatggcatgtcccaaccttctgaaagctgctgtactttcaaccatgacattgctttctgtacctcttgaggcgtcagcggagatgtgccagccacctagttctttcgccaatatgccaatttttattgttgtagcactaataggagctgctgttggcggattattagcacgccaaagaaaggcggaattgaagcggctcaataatcaacttcgccagatcaatgcagcacttagaaggcaggcacagattgagtcatttgcgcctggccttacttatgcgccagttgggagaacaaatgaaactgatgttattgttgacccaaggaagcagcagttggtcacaaacctgagaaatgggaagaattacatgaggaatcaagatcttgataaggctatagtggagttcagaacagctctggagcttgcagagagcataggtgatcgttttgaagaaaagaaagctgcccgaggactaggcgcatcgctgcagaggctcgggaagtaccgagaagcaatgagacagtacagcaaggttctggagctgtccaaggagacaggtgaagattccggctgcaccgaggcctacggtgccatagcggactgctacaccgagctgggcgacctggagcgagcggcgaaggtgtatgacaagtacatatcgaggctgcagcccggcgagtaagatgaaaacaacgagaagatggtggcgaggagcaaggacgccgccgccggcgtgatgaagcagcaggaacggcgcggcggcggatcagacgagtacggccacgcctgcgagtacggctgctgccaccacgtattccatggaggatgccagaagtgctgcccgccgccacccggcgctgcaggtggccgaccgcaggaggttaagaactagtagacgtctacacccgccggccggccgctgccatgcatgcatgacgccgggagtggaccggagctgtaccgtacgtaccactgcgccgcgctcgcgcgcgtgccaacaacgtacgtggcgagaataatcatcatctcctttaattttgttaaataacacgtacggctcggctgtagctaggtacgtaacagcttcccttaatatataccgtcgaccgacttgcttttgtatgtgtataacgggggcgtacgtgcgtgttatatacgtatatataggcgtacatgcgtacgtctttcgcgctgctggagtgctggttcgcacgagtatatatacacaacatgcatgcatgatacatgccgtagcaccttatcccaattaatatctatat

SEQ ID NO: 33016 - DNA, 1779 bp, Zea Mays
tggcatgccgtaggggcagccagatggaggtgtatcagctgaggttcctgggtttttttttcccgtgatgtgagatgagatggaggacatctgggagttgaactctcccagctggcgctgcatgtcggcgagcatcgtggtgatcaactccaacgatggcggcaccgtggcggaggccaaactatcgccggcgttggaccctggcatatccgataccagatcttctgtgagcaaaggggccaatggaaggcaacaacccaatctcaggagttccttcgaacccttcaacgctactacaataacgcctacactgatcacgagaagcaggatgctataaacatgttcttaggtcatttccaacctcagcaagggaaacctgcattgtggaagctggactcagatcagcattacaacattgggaggcaaggaactttaaaagaagagattggaagatcattcataaagaggtcactatcagatggtaacatactgttggagagcagcttgcctgtaactatctgtaacaatgaaacagacaacacagaattgctcccagtgcaacagctggatgatattagagaagcttctgattctgcgccagagatctccatatgcgaacctaacctgtgctccagtatgaactatggcacagtgcctggaagacactccatgtcagaagagcggcagagttatttgaaaagattaggttaccctgaattgcactcttcaaatttctttgaccttgatttgttgtcatcttcaggaaattcgtttgacgaggaagtttttgagaggtcattactgatcaattcacctatggatgtgatcagtcctgaatcatctatgtcatacagtgaacaaggacacactgatgagggaagagatgacacggatctttcccgttctagcagccagctctcagacattcgggactactctgaccactttgcgcagtgggtcgtgaatggagacacgctttgctactaggccctggacttttgtcttggtgacagctcagtagatgtgacacggcaggaaatggaagtctgacggatagagcagatgaaatggctgacgactagccgggctaggtgccgtgcatctacctgcagaggcggcgtagcagaagaggtggtggacatgggagaagtctcgcatcggcatgcttgtggtcactggaaggcttgaacgatgaacgctgatattcgtcggatgcagctttcggtggggtacatgattcaatttgctatggtgaaaattttgaccgtagcttagacaataaataggcaaaatatatctgttcttttagtttagcttaccttgcgtttcccttctccatagaaaagtatcaaaaggaaaaacaatggaaaatctattaggaaaaggaaaaaacaaacaaaccataggtaaagaacacttctgttgtaaatagttagtttgctacagaagtataaatatctggtacttgttgggtttcttggcggtgtctgtttcataattgtttctgtgaaaaagctgaaagaaactcggtatgtcttttaatatgcaccatttttgcttgaggactctccatgacattgcgcagagaggagtgcaagaacttgaatgtctcatgcttctcttgcggtggacatccacgtcgatgacaaaattctagtatatggtacgtagttcattcgaaaggtgcaaggtatccaatttagttttggatatctagagttcacaagatagtacttatctgaaaaatgaaatcaaattaccattgcaaaatataaataa

SEQ ID NO: 33017 - DNA, 6009 bp, Zea Mays
agacaacatccactagctagctgcagctggtgtggtgtatcttttttcttctctgtgctctagaagattagtattgtagggcttctgtgcagcacccaagcaggaattcagaaagaatgcctggaagcatccacatctcagccactcaaccaccagtcatcacccctctgtttctgcaagtcactgtgggcaacagagaatacagtggaaacatagaacaagatgctttatctttccccgttacatcacttcgggagagtatggtaataatgctgtacagtgcagacggggcattgatatcaaaatcagagctgaagacaaaagagattgtggagtcaggaactatggacacagtatttgctcttgatagcgggggagaaatagttcttcagattcagttcttgctcaacgatgatgaccgcaagcgaatccaagaaatgagaaattctgcgatgaagatgaagcagcaagggctgcttggggatggcaatgaactcaatttttcagacagcgcattgtctaaacggctgacggagaagatttccaacatccgaagcaaagcagctgaacgatctgagcttcagaagagcatgtcactggatgatttgcaagagcgggccgtgttccctggaatcgatgcggatccacgggtgaaggcctcaagggactcgttgctgcaagggggtgtaaggttggaagatcccggtggctccaagcagcggctgagccaggccgaagtcgaagccttggcatcgccggtggaaggggagaggcggcgcctaggcctggacgtagcatccggcggcgggcgaggggtcgtgggagaggcggagcaggaagtcagcgacggggcaggggcagtggatgcgatcagcacgtggccgccggacaggccgggccctggctccaagaaaggggacagcataccagagagcagcaaatcaagtagtgcagtgaagacgatgataagtagctttgaaggcaccaccaccccacagggtatcgtttcagaaaccgactcaggcagccgcagcacgcaggcaggcaaaacagccatcatccctgttgatgatcaccacaaagcttcaaatcacaggtctcagcatatactagtagaaacgatcgcacctgcacaactacaaactattaggacgccaaaagcagccgaaagcagaagccgacgcagagcaagcaagcagcacaacgagctgcatccaagaactaggaggaggtcacaggcaaagcagatgcagatgcagatgcagccaagggactacgtggagcgtcccttgaactatctggttgcgacgtcgagcacctggatacacccgcacatctgcgtcacgggcgcgaccaagcaactgaaagacctccttgagcttgagcacctcaacttccaacgcaccgctactaagggacagcaaggtacccgagagagaaaaagcgacgaatccattgccgccgccgctgctcgggctcgcagcggtggtttcctgatgataaacgggtggctgatagttcagggggtgcgtgctgcagttgtgctcacggtttgctgcggggccatgttcttcagcagcagcagcagatgaagaaatctagcagtgcctacccctaatttttgcatacacaagccacagccacaatgtaattgtcaagttttactgatggatctggctagcactgtaacttacttcaccgaccgacatattatgggtcccacatgcagaatacgacgacctctcctgctcctccgaatcctgaaaccaaccagatcacacgaaccaaaccaccgcctcctcccccgaccggagaggagcctcaccgccggcgcccatggcgacacgctacttgatcgtgtcgctgcccgtgcagtcgcccggcgccaccgccagctccctgtggtcgcgcctccaggactccatctcccgccactccttcgacaccccgctctaccgcttcaacgtcccggatctccgcgtcggcaccctcgactcgctcctcgcgctcagtgacgacctcgtcaagtccaatgtcttcgtggagggcgtgtcacacaagatccggaggcagatcgaggacctcgagcgcgccggaggggtcgagaccgggaccctcaccgtcgacggcgtccccgtcgacacctacctcactaggttcgtgtgggatgagggcaagtaccccacaatgtcccctctcaaggagatcgtcggcagcatacagtcacaggttgccaagatcgaggatgacatgaaggttcgagcatcggaatataataatgtaaggagccagcttagtgcgatcaacaggaagcaaagtgggaggtaaattgcgctgacatactttgtgtgttcagactctagaggaagtgcttgattccaggactttttccttgtttattgtaaaaggaacaggagagcagaaatgaatggcttactcattttatctgttgcctttcctatactaattagtttggccttttattgtgtgaaagcttagcggttcgtgatctttccaatctggtaaaaccggaggatatgatcacctcggaacatctcgtgacacttcttgcaattgttcccaagtactcccaaaaagactggttgtcaagctatgagaaaattgacacattcgtggtacctaggtcatctaaaaagctctatgaagacaatgaatatgctctctacactgtaacactgtttgctaaggttgttgacaattttaaggtccgtgctcgcgagaagggttttcaggtccgtgattttgagtacagtcctgaagcacaggaaagtcggaagcaggagatggagaagctactgcaagaccaagaagccatgaggaccactcttcttcaatggtgctatgccagctacagcgagttcctggatgcacttctgtgctgtgcgtgtctttgtagagagcatccttagatatggtctccctccatcattcctgtctgctgttcttgcaccatctacaaagagcgagaagaaagtaaggagcatcttagaggagctctgcggcaatgcccatagtatttattggaaatccgaagacgacgtaggcgtcgccggtctgggaggtgaaacagaggcgcacccttacgtctccttcaccataaattttgtctgagaccggcatgttcctggccgtctgcggcccaggcaatatttcgagcagaactgccataaattctttgttgatttgtcggttcatgtgctcctgtaattcacatcacagagagaccagccgatcaataatgtagtttctgaggacatgtttccctgcagtattgtaccttgggagcgcattgtaaatggcctggaacagttgtctactggatttgtttatttatttacaataaaagccatgtgaaaataagtaactaaaatttggattgtcagttgatgaaaaatggaatgtggagctagctaggctctgggtttgtggcgcagacgatttttttccagtggaatgtgtacgttctggttctggagagcttcctatcctaccggccaggccatctctaccttgagccccttgcaattgaacatcacgaaactgggtgaaccagaatagattggcgtgtttggaacgcatggctgacaaattaaacccaagtcttatggaattttctcagttcccgaattctcgagccaagaggagcgagcagtactggatgccgagaactgccagccgtcgtccccgcgccgccgcggcgtccgggcgtttacaccacccatgcacgcacggacgaggtacccttcatcgtcgtcgtcgccgccgccgccgcccgctccaaaaccagaaagcggatgccactccaaggaagggcagctcctttccacactagtctcgctcgggccgacagcgatgtctccgtgcgcctgctcctcctcctgctgctgctcttcctcctcgcgcgcgctcacacccacctaacctataacccgctccgcctagctccttcctacccgttacctgctgcggagcggagacgacgaccacttccacctcctcccccccttccgcacccaatcccatccccctttccaaattccaatttccagcaggccgcccgcgatgcccaagccggcgacggcgaaccggcgccggaagcgcggcggcggcggcggcgaggggggcgccgccgatgaacaggccagcagcaagaggaggcccgccaccagcgtgctcacctccctggacgtcaacgacgccccgcgcccggagctccccctcttccagctgagccgacctcgccagcaggcggaacaggacgacgaagaggaggaggtgaccggtgggggcggaggaggaggagcggggtcgtcgttgtcatccgtggtcaacggccacgggcagagcccgcaccagcagcggcggctgtgggtcaaggaccggtcgcgcgcgtggtgggagcagtgcagcagcgccgactacccggaggcggacttccggtccgccttccggatggggcgcgccaccttcgcgatgctgtgcgacgcgctgggcgcggccgtggccaaggaggacaccgcgctccgcgccgccatccccgtccggcagcgcgtggcggtgtgcgtgtggcggctcgccacgggggagccgctccgcctcgtgtccaagcgcttcggcctcggcatctccacctgccacaagctggtcctggaggtctgcgccgccatccggggcctcctgatgccgcgcttcctccgctggcccgatgacgccgccgccgaggcgttcaagtcccggttccaggcggagtccgggatccccagcgtggtgggcgccatctacaccacccacatccccatcatcgcgcccaaggtgtcggtgaccgcctacttcaaccgccggcacacggagcgcaaccacaagacgtcctactccatcacgctgcagggggtggtggaccccgacggcgccttcaccgacgtctgcatcggctggcccgggtccatgcccgacgaccaggtgctggagcggtcggcgctgcagcagcgcgcggcggccgggatgatggcggggtcctgggtggtgggcggcgtcagcttcccgctcacggagtgggtgctggccccctacgcgcaggccaacctgacgtgggcgcagcacgccttcaacgagaaggtggcggaggtccggcgcgtcgccgtggacgccttcgcgcgcctcaagggccggtgggcgtgcctgcagaagcgcacggaggtgaagctgcaggacctcccggtggtgctgggcgcctgctgcgtgctgcacaacatctgcgagtcgcgcggggagggcatggaccccgcgctccgatgcgacatcgacgacgacgagacggtgccggagaaccccgtgcggtcggacggcgccaccaaggctagggacgacatcgcgcacaacctgctccacagcggacgagccggcaccaaattcttctgaattctctcagtcggttcgttcgttccatcagattcttctactatgctgctgctgctactctgtctcccgactccctctcctttcattggattggaaccgtccatggaattgatcattcgttgggttgtttgaactgtactgggaagtgggaagatcacccgcaatccgtcatcctcatcctcgtagaacgctgaacacacggagagaaaggtagatcaaagacaaagagtgggttgggtttgcttttgatcataggatttttagtctagtagcacgtggtacagttgttgaacaaacctacgtatccaagagccaagtcaaagaaacagcaacaagaagcagtagcacatctcaatccgtgcgttttccttgtgttttacctatggcattggcatgatcatgtaaaacaatattttgggatgaccgtatggccaaaatgctgaacgtgttgccgatcgggccgatccgatcgatatccactggtcgttaacaataacatgtttggatgagctggtcgaaccggacgttaatgactgactttcgatttttatttatgaattatttattttt

SEQ ID NO: 33018 - DNA, 1398 bp, Zea Mays
atttcaaacccgaattcatgtccaccgggtacgaaacccgtgggtatccatacccacgggtccaattgccatccctatgtgggtggagctcgctggtgcacggctggaggcagttgcagccttgcaggtgatgatggcgtggaaccccaggacgacctcatgcagtcctgcttgcattttgagtgggccgtattttacttgttgagctggacctagacacgtgagaaccaggtcgtgaagagatgaagacgtatgggacacactggccattggatttgcagcggatggcagtgatcgcgtgactgcagaggccagtcgatgagcgcgactgcagacaatcttgttccccgtccgcgaggcgcggagccccgactccatcgccgggagcccgggacccctacgccgcgccgctgccaccaacagcgacagccgagagggcgagccgcctgccgcggggccgcgacacgaccggcaaccggccgaggggcgaagcaacaggccagcgtggacgccgatcgtgccaagcgcccagtcccgattccgccctgtctaacagtacgagactctaagtccgccctggtgagtgtgcttcactgcttctccggttcttcccctcgcactggtcccgatggaatccgacgccgaggaggcggcggcggcggcggcggtggacccaggcgctggacggctgaaggggagcccggagctgactgtggacgcggacatgcgggaggtggcgaagagggccgcgtggagcgtcagttccttcaaggacggcaacggcgtcgcagccctgcgcgacgacaacctcgacgcctactggcagtctgatggggcggagccgcacctggtgaacatccggttccagaagaaggtgcagctgcagcttgttgctctctacgtggatttcaagctcgacgagagctacacgcccagcaagatctccatccgggccggggatggcttccacaacctcaaggagattaaaactgtggagcttgcaaagccagttggatgggttcatatatcattatccggggctgatccacgcgaaacattcattcacacatttatgctccaaattgcggttttatccaatcatctgaatgggagggatactcatgtccgacagatcaagatctatgggccaagaccgagccctgtcccccaccagccgttccatttcatttccagggagttcatcacgtactccactattagatgacagtgggtgcgcaaccaggagaaggaaacactgaggatcagtcggcagctcatggctctggatgatggtgcgcagttagggagtgtttggttaaaagaaccacttcatcgaagatgagatgatggacacattacatcattcaccgtactagccgcgatccaacaatatacacg

SEQ ID NO: 33019 - DNA, 233 bp, Zea Mays
ccgagtgtcacaaggaccccagataaaccacttacaaccaggatcgcaagattaagtaacacaaatcacacacaccaacattttgcagtggaaatcttattaccaaattttacaagttacatcaagttttacaatgtaaatgatcggagtgattacaaaaagtgattcaaagaagtaactttgaaatgttataaattatttgtagttttgaaatatatgctagcttaagtgac

SEQ ID NO: 33020 - DNA, 4628 bp, Zea Mays
ccgctccaccgcgcccgatctctatcgtcgacaccaccgcctccggcgaggccttttccgctcttgaggtttccacaggttcattccctgctcaatcgggcgccccatttggcaccctctgcccccccacagacccgtagggttgcatttcaggaaacagcgtgtctcttttctggacttgggaatctgagaggatactgtgcagtttaatggcacacactgctgactatatgcacatataatgatgcatgggcaaaccatgcttctctggtctagtggctattgagctgtgctctatgggaggtattgctgaatgtggtgtgagcattgacactaaagcttcaccacgtcgagcagccatagagaaagctcaggacgagctcaggcaggaatatgatgttcgtgaagaacgaaggagagagcttgaatttctggagaagggaggcaatcccttggatttcaaacttggccatgtagcttcccttagtgtacagtccacttctgtgacagaacagatagctgaacaaaatgtgataagtgaggccaaaggtagttctgcatttgctacatcacctcatggggattctgttgaaagtaacgacaagccaggaaattcattgtgccgtgaaggcaatacagccgataatattacgcttttggatggagatgccagcagcatgggtgtggataaaattgtgaaacgtggaacaaagagaactaattcagctcaagctgagcagttcctgcactgtgatggtcagaacaatgcaaaagaagaagattctgggttgtaccgtcttggtccaaagagccaagcgtatgcacgacgtaggtcaaagcctatcagagagaatgcatatagtgtatctgttaggtatccaccaattcctccattaagttctcagcaaaaagatgtgacaggattaatcccagaaaccaagactgaggataatggtgtttcatccattggtgattcaaaaccgactagtcctaactctaaaaatttggtgacaaatgcatcattactgaatgataaggtggaaatggagacagaaaatgttcaagcaattcctgaaggcaatcaagcaccgaaaaatgagttatcaaacagcaacaatggtagtcctgctattgagatttcaccaaacagtgtgccggataattctcgtcttactgtaagtgatcagatggttactgcatttgtttctgtggaatccccagatgctatttcaaaagtagctgcttcaaggatagtttgttctctcccatatatatccaatgaaatattgaaagaagcacaaactcttgagaaggcaggtaataacccatctatggtaagtgtggttgacgttcatgcatatggtatggataacaatggtgcagcaccttactctgctgtgaaaagtgctagtttgaatgaaaatgaagttgatccaattcatgaatatgctgccaaagctgttactgaacatccagaccaaaatgagaatcttgtaccagtgaatgcagatgaaatggctgatgaaggcttgaataagatcctacctgatgacaaggatgacaagaaagattgtcaactggaagttagtagtgggcctgtcattttgaatgacagttctactcctgtctatcctgaatttagcaattccttttatgcaagagatggaacagaagtttctaacaatgcagtagattcaaaaaataacgcagaacagcttgcttcttctaatcagggaaaagggaacatggaggaatgcaaagattctgacggaaacaatgcaagtgaattgagtgttgcccaaaagctagtgtctgttattgtgccccctgcttcagacgcaggcgatgtgagtaattttgtagaaaatgatgttgataaatctagcagagatcaggagaaggtagcaaagaaggaatatgaagattctgtcgtggcaaagaaggatcacgaagatgctatcctcagaagggcacggtatatagaggcaaatattaagagggctggtgaatggtctctctgcaatatttctttagagaagaagcagaagagccactgggattttgttctggaggagatggtctggatggcaaatgacttcacacaggagcgtttgtggaaaaatacagttgcagcacagatgtcccattggatttcttctagaggtcgagcggtatttgaagaagcaagcattcagagaaagcagaaatctgttgctagagttctagccaatggtattatgaacttttggtgttcagtccatactttacgagctagtggtggtattcctaaaccaataaaaatcgagcaaccgaatgagctagaggaaaataagcttggtgggttcaaatccggaaaagcggatgaggagtgtttggagcaagaaaagtcgcgccagtctcctattcagagctttgcacttaggtttcttgagtataacattaatgcatctgaatttctgccattagccgaagcaccatcaactcctgacaggctaaatgattttggcattttgaaagcaaatctcttttatggcgtagcacccggtgcaatgcaggcatacagggagtctatggaccgtctccttatttataataacaagaaaattggtgacactgtactcaaggatgattatgagccatcaacatatgcatctgtcacagatgtccctatggagaatgcatatggagatgacgaaagtgaggcacacacctacttattgcctggagcttataatggtggtttggcatcaaaaaatagtcacaaaaagaagcaccatttgcctcagaggatgaatggcgcaaggtcatatgaaattggtgttgacagtccttacgaaccactgtatttggaaagtaaatcaggaaaccagcaactcttatcgaatggcaaacaaacagacttcctctccattcctataaaacgcatccgcacagcagctaggcagcgggttgtgagtccatttcctgctggtgcttctgggacccctcaattcacaaataaaacggacgcatctagtggagatacaaactcctgtcaagatgatcaaagttcattacatggagggtcattttctaggaagaatgcagatatagagtccactgttgattttgacaggcaattgttgtatgatggtagtgaggtgtcgacaaaatctaaaaagaagaaaaagactaagcacccagggtacaaggcactaccaaatgtgtccgaatcttgttcgttgagggctcctggaaagggcaattatgatcatagatctcagatcgatatgatagctcagtatgagcagaaggattatattaaaaagagacaggagacaaatgggaattttggtgttattgatttatcaacagtggttaatggcctacatgctgctaagaagcctaaattgttgaatcaagcaccagatatttcactggaagctcttaaaccaattggtccaatggcctctcttgctgcatcacaaatgagcaacatggcaaatcctacgagggttataaaaatcagcacccgtggaagaaaaagtaaaggactcaagatgcgagctggtcattcaggtcctggaagtccatggtcaagttttgaggatcaggctcttgttgtccttgtccatgatatgggtgaaaactgggaattggttagtgatgcccttaacagcatcatccaattgaagtgcatatacagaaggcctaatgagtgtaaggaacgccataaacttctcaccgatagaagttgtggcgacggtgctgacagcgctgatgactcaggctcatctcaacactatccttctgcattgcctgggattccaaagggtagtgcaaggcaactgtttcagcgccttcaaggaccgtttgaggaagggactctcaagacacacttcgagaaaataatattgcttggtcaaaaattgcatcaaactcgtagaaaggatgagatccatgagctgaggcaaaaaaatccacttcatacttctcatggttttgcactttctcaagcatgtccagggaacttatctggtgtcattttgacgccacttgacctttgcgatggaccttcgaactcggatgcacttacaggatccaatacaagtgggttaggtctttcaaacaataactgctctgttggtcctactcttcctacatcaaatatgaacttaagattaccaggttctcctggtatggttttgggaagcaattcaccattgcctttgaatgctccctctagggatgttcagaggtatggtgtgcctagaccaacctcgatacagggtgacgagcaatcaagaattcattataaccagatggtaaatggcagaaaccttcagcaacctggagttcctgttcctggtgtgttgccatctggtgttgatcggggtgcccgaatgatgccacctgcccatggtgttggaatcatggctggactaaatcgaggtacacctattactaggccaggttttccaaggcttggttctcttggaaacatgtcacccaccgatggtcaaggcttaaaaaatactgtaaacgttcatcctggtgccatactgggacctggaagtactatgttgaggccacgtgacccaatgcagatgtttagacatgattggaactacccgccagctttaactgat

SEQ ID NO: 33021 - DNA, 2242 bp, Zea Mays
ctgccttcctgctccccccacactcccccacttcgccttcgcccaccccctccgctgcgagcgcgaggcgcggagggaggggctagcgctagcgctagcggctgcggcgccatggccctggccgacgccaccgcgttcccctacggcctgcgcgtcctcgtcgtcgacgacgaccccacctggctcaagatcctcgagaagatgctccgcaagtgctcctacgaagtcaccacatgcggtttggctagcgttgctctccaaattctccgagagaggagaaacaagtttgacattgtaatcagtgatgtcaacatgcctgacatggatggtttcaagcttctcgaactcattgggcttgagatggatctacctgttataagtaccaaattgctccaatctgtttccacagtgatgtccatagacggagagacaagtagagtgatgaaaggtgtacatcatggtgcgtgtgactatctcctcaagcctgttcggatgaaggaactccgaaacatttggcaacatgtgtataggaagaaaatgcacgaggtgaaagagattgaagatggattggatgagaggggcctatttatgagagctgacactgataccatgaggaagagaaaagaagtggataaggaccatgcagaccaggactcaagtgatggagctactgctaagaaggctagagttgtctggtctgttgaccttcaccaaaagtttgtaaatgctgtcaaccaaattggatttgacaaagtggggccgaagaaaatacttgatcttatgaatgttcatggcctgacaagagagaacgtggccagccatcttcagaaatatcgcctctacttgagtaggttgcaaaagcagaacgaagaaaggataatgggtgcggctaggcaagatttcaatcaaaaggggccatcagataatcttaacctccgaagttccttccaagagcagccaggaaaccttaccaatggatttcagcatagttctcagaaggtccaatctcagaccaacattctcgatcctcatctggacgacacgaagacttcagtgcccttgaaagtgccagataaaaatggaacttcagcaagtgatgctgctgaccatcagaacatcaccggtgtttcacctttaggtgggggtggggtgttctcttttgaaagaatgccagtgaatcaggacacgaagctatcggaagccatgatcttggaatgtcagtcctggagtggtggtgtgccaccaaagcagttcatgcagtatccaaagcataaccatgagcgctgcgaccttctaggagactattcttgcctgcccaaaccggacttagagcacccaattgcgcctagccatctttatgccccaccacctgtaatatcgatgagttgcagtgtggagggagatgtcagagacttctcagatgtaaaaccagatcttcttggctgtatgaagtccttatcaccggcactgacatgtacagttgagtcagtttctgctcaactcagtgacagtgttgtgagctcaactaacaatgacaagaagatttccagtgtggaggggttgtccagcgttaaagattgtgactttgatcaggaaaggaaccaagccattttgcttacttcagaagaggcaagtatattatgcagcactgatttgacttgtctacctgatgaactgtccggctatcaacttcaaggcgtctccttcggggatataggactgaatagcatcgatttattccagtgcaatgatacaatggtactacctggactgcagaataactggtatgatgatccagattttagcaatgaaactatggagttcccgttgctagacggaggtctgtttgcataaatgcctcagcgggccctatcttttgatcatgcccttatgtgagttctttggtatgttcccgtatagtgcctcctgtagggctatactaatctaactttatcatgtggtggaagggtttaatttgtagtctctccacttttgataattgtctgtattatagaccgtgccatggtacaatgactgcaatatatactcttcacaatgatcaaaactacatatgaagactgtcaaatttttgccttgaacaactgacttttgcagtaaattcttactctgatgcagcattgcacatatgtgagacttataaatttcactgaaaaattttagtatgaggactcctacaggggctgcagaatgtgaagctatttgttgatctaacctgaaaaaa

SEQ ID NO: 33022 - DNA, 4586 bp, Zea Mays
cttcttcagcgcgcgcccgcgccgccgaaaccgccggcggcctcctaccaggtttcaactgaagcacgcagtccacaccgaagcaacgcttcgctcctcttcgccgtagtctttctcggccctccgctcccatactggccgctgttttttctttgccaggttgttctacttattcaacgcgcgcgacatacattggagttgcgatccaaactgctggtgcagttttacttgtcacaacccttggtggttcagcataaactccatgagcgacgacggcatggcctccgctgcggtggagccgcccaagcgggagcaaaattttctagtgaaggtggggatggaggcatggacgcagtcgttcgcggttgcacacaaagtcaggttggtgcacatcctcaagaatctccacacctcggaggtgaaaatctactccgacgcgtccaaggagttcataggagtactggatggtgagtctggcggcgaggtgctgcaggagtacgtgcaacagtcaccgcagcttggggagctgctcgaggcatggcggctccaccgggagaacccggggatggcgcacatacttttgctctttgcagctgtcctgggccaccctgatggtaagctgcggcgacatggttcggttaagaagagcttggacggtgtcgctaggatgatactggaggataaggagaagatgggggatgtgtatttggagctgaatagtggtgagttccgacggcagaatgcagcactggatttgcttgctgcaattgtcaggcgtggagggggtctagcgtctgaggtcgctgagagatttgattttaagatacctattttgccgcagctggctgggacaatgaagaagaaggggagcagggatggaaggaatcggcggaagggtgccgactttgggtccacaaggcggtcgtttattgggtttgccatgtcatttttggaggttgggaatccaaggctgcttagatgggtccttcaacagaaggaggtatattcaggggtgcttcgtgggattggaaatgatgatgctgagactgtcatctatgtcctctcaactttgcgagacaatgtcctggtagatgagtctcttgtcccaccagggctcaggagtgtcctctttggaagtgtcacattggagcagctgagcttgatctcaggaaatcttgaatcaggggaagcagctgacattgctcatgaggtattggtcatggtgtgcactgatccaaaaaatggattgatgccaggatcaaatttgagaggtaatgagaaacgcttactagatctcatgaaaaagttgaaagctactgaggttgttcatcacaaaaaattgttactggccattgtgagtaatagactgtctctttgttcggcgtacatgaatgagtttccttacaatattgaaccacgttcgtctccttcatggttttcagccatctcccttgcagctgatgtcatagcttcagcaaaatgcaatagcattgttcaaactctttcatccagttcacatggtctggtatctgtagatgatgaagaagttcaggtagtcttgaagtgcatggtgcccaatgtatgctctcgagcaatgataaatagggggttgctgcattctgatgatcttgtgaagcatggttctctgaggcttgtttttgaatcagttaacctgctttgttatatcactgaatccatcaattgcatggtatcaaaagggagactgaagtcagaattcattggctcagagaaagtaaccatgaaaatagatggtttcccagtattaagctgttctgatgctacagatgcatccttagttgatgaggttcaccagggagatgaaatgcaggtcaagaggtggacatctctaagagaatacatccaagatgaagttcatggagctatgcctgatcctcaagtctttctcaagttactctcttctaccagccaaaaacatcaaagttattctcagagcatacaaaagaataatgctcaactttctgagcctcctcaaaagaaacgaagatgcagtccttcctgtgaagttgatgatattattattggtggcattgatgttgagcaggataaggacgcatctgaagaacaaggcctggaattaaaaaatgaccgcacaaccaccttgtgtgagatatggagcttagataaacaagatccaaagacgaaagatgcaaatgttgtggaaaatgtcttccactcgaagttgctggatgttctcaggctttatttgggggtgatgcccagctcttttgatggatcatatgacttctttaagattataccacctaacccattggatctgtccatggatgagcaacagtccctgttatcttttttacttgaatattcaggccaatctagaggatgtttggacccagaaagagttccagaatcaatgtacaagtatctgcaacccttggtttatatcatgttgcattcacagattaagaacatccgtgatcaagcatatattttagttaaagctgctatggcaagttcgggtgcttttgatcataacttcacagagattgatgcatggttggttttcttgcctggttatgaggccaaatggtgtgtaagagagaacctaagaattggagcacctaataaattatcacacattgtgatcccttttctgtgtgatgctatttcggtagttggtaataacctgtataaataccaagagcacacacacaagcttatctctaaatcaggccagttggaagaaatgccttaggctactcgacacagcatctagaagtacaaagttacacgagaagtctacaatttcattgtatgtgtgcaacacgatccaccttattcttcagtctcaggttgaagaattgttgaatcaagaacaaactaattcgctggatgatgtagcaaccgcattcttattttcaatcatatgtgcacctccaaaagatgttatcagtgcctttccagatcttcttgatttggtgaaagcacattttccatctcatgttgctttcttgtcatcggttctttttctacaacatgattatctggctaaagttgctagttgttggccagatatattcttcagcagcatcagactgttcaaggatgatatcaatgctgaccatgcaaacacagttgaggacgaatgccagaacctctctgtttcaacagaatcagctccgctaagtacatttttaagtgtcagtcccttctgtgcgcttttaccttcagtattgagccttgcatgttcttcgccagatgaaatcatggaagcacataaggatgcacttctaagactccttgaagttaaattgtctgactgcacattcagtgagcttaccttgtatctgagagtcatcttgttctggactcatcacctactgtcatcatatactattaaggattcaaattcagatgatcttgagcaagtatgtcatttgtgctttggtcttcttgatagagtatttgagcgtattcaagttttgactgctgacccttcacagtcaaattctgaatacccgtactatcccgctcaacatatccaagacattgttgattctgttcttcggcatcctgttattaccctgtctttgtcatgctctttatccaattgccaaaatttagcagatgggagtttggaacatctggaagaagctttggctatttttgcgacggaaaatctgcaccttatagaccgtttcgttctaaaccttttgggtaaattgtatgaccttttgctaatgtttggtagctatggtggtaactactctacagataatgggccatcccatgagtcactgtttgctgctccaaatcttctgctggagaacataatattgttgttcaaggagaagtttgagctctgcgtggacaaactaaattttgaattgcttttgccaaatttctacatggttcgcacactgtcaaagttcttttctcctttcaaactcctggagcttgcaaattggatgttctcaaaattggatggtcacaacttcagttcacctgcttttgtttctgctgttttgatgtgcctatacattattgatgtcaccatggaaatgctgtgcttttatctgcaaaaaactgatcagagatcacaatcctatctatttcggcacttggagattcacaattctgatatcaatgccattcagcaagcctatcacatcattcttcattttgctactaaatggaatgttgagtttgctgatcattgcttgctgaagatgctgtgccatattcattacacagaaagatgcgcaggatggaacactgactatattgcattccatatggtattatctacaatggccatcaatactcccattgacattcttcatcactgcattttccccacatctaaggttaaagcaaaagcaatcctgttgcttttggaagcaagtcctatgcatctgaacctttttagccagatattcttggaaattttaaataaagacacttatgttttgcaagtcaaggattctgattccaacaatttgtgggctcaagaagatggtgctatacttctgttgcctgccgctttatcatgcttgaaatttcacagcaatgacaataggcagtgt

SEQ ID NO: 33023 - DNA, 930 bp, Zea Mays
gaaagctttaggtgtgggaggcgttgaagggataacggaagattttaaggccacacgacgccgttgaagggataaagaagatcccaaagccacacaagctagagaacaatgcagaatggaagcggtggcggcggcggcctcgctgccggagtgcggctccaccggtggactgctcatcagcagcagaagtgcttcactgcagctgcccccgccgacgctcgcgcaagaaggcgttcgtggcgcgcttttgcacggcctcgtcgaagtgatcaccgagaatgcgaggccgccacggagaccaggtccaattctagaaagaaaacaatgtcgttatacctccaactccaaccagtacgtcatgctacaccactctctgttggttcgtatcgtgggtttgtgcagcacgaaggagacgtacgtgctgatggaacccggcatggacgaggcgttcgtgtccagagaggagctagaggagagcctcacaagaactggcccgtggacaccctatccctggacctcgccaggttcggcatggtcgacgaggccgtctcgtacctcgtcaggtccgtgtgtgtgctcgagatcgatggagacgttgggtccgtggagtggtaccaggtccagttggactagttgccaccctagcttggatgtatgtcagtgagaaacccattaagagcctttttcacgcccctcagcttctcgcctctagacggccaccccacgcagatatggcgacgcgaaccgtgagcttcccctcctttgcggtctcttaccagtgccgaggtgcgaggaggatgcatttacgttgcgagggacatgagaagttgcgagtagccgtcactgccaatgcgactttcttttaaagaagttactagcttttatggacacttgaaagtcaacttataaaaaaaatccatgagaaataag

SEQ ID NO: 33024 - DNA, 377 bp, Zea Mays
tattagtatacttagccttgcttgtggcataatttttgtaggtacgctctaggatatggttgatggtgtgacttggcctaccaccctgccaccgagttggacggtcgagtgggatgctgctccgacaagagaggagcaggaggagtagtgggataggccctgcccaattcctcgctatcgacgatatcgattatccgctgcattttattttgtgaactcatatcagctacttgaaaaactccgatttgtgtaataactcctgtactttaatttaaggtttcctcttttattgtatttcttctctgactcaccttcgagtgagtttgtggtatttgatcctggttaagtggctttatcagactagatctgagggactg

SEQ ID NO: 33025 - DNA, 2215 bp, Zea Mays
acacaatacgcacacttcgcaaagcgtcttcctccgaccccatcgcctctgtggcttcctggctgtctgactgcgtctgcctggtcgtacgcgagcgcgtgcgtcccttcaccgtcacgagcggcgcacaccgtcaccgccacgctccgtcgccttccagaaaatctaaaccccagcggagccggccacggccagtcagccctcacacggactccgacgcgctgcccgctcgcctgccaaacccccaccccctcgccggcgatgctgccgcgtcggtttagcaaccacccgggctcctcctcacccctcccgttcctcgtcgtctgcggcctgctcctcgctgcggccgtagcattttccccggtcgctgccgccgaggccgctggccgcggcggcggcggcggcggcggcggcgctgggcacgagggccgcgcggggaagccggaggtcgaggcggaggcggaggcgcgcggggatggggtggccgtggcggaggccggcggcgaggtggtggctcagggcaatgccacggaggccaaggagggcagcctcgccgacatgatcgaccgcgcgctggagaaggagttcccggagtccgagagcgagcagggcggcggagagaccgatcctggtagcttcaacaacacggtagctgagaagcagggagttcttgaaactgtagctagaagagtaacaaagaagaatgaaaccaaagataacaagtcatttccttttaaggaggtcttcttggatcgatctgagcaagaagatgttcccacattgattgatcggaaggtgcaatcacatccgctggatggaattttctgtcaagttactgcacatgtggcatacatgttgggcatagtgttgtggacatgttgtgactgttttttaattacagttttctgttaatccaatctttaccccaggacaatgtttttatcatatcaaacccaaagtcaaaataccctgtgctgcagctggaccttagattgatatcagatcttgttgttgttatcgtgtctgctacatgtggtggaatcgcttttgcttgccttgggcaacctgatctataattgggcctggaggttttagctttgtcaatgaaatggtgcaagtaaggttgaaacggtagcccagtttggtgtgatatttctcctgtttgcattgggacttgagttttctactgcaaaacttcgagttgttcgtgctgttgctgttctcggaggaatgctccaaattatgctgttcatgtttctttgtggtattttggctacactatgtggaggcaaaacaaaagaaggtgtttttgttggtgtgcttctctccatgtcttcaacagctgtggttttaaagtttctgatggaaagaaatagtatcaatgctcttcatggccaagttacagttgggacacttatattgcaggattgtgctgttggtctgctgtttgcgcttcttccaattttgagtggtacatctggccttcttcacggagttgcatcaatgacgaagtcgttggtggtattgataacgttcctgaccattctctctatcctctcccgcacgggcgttccttggtttcttaaactgatgataagtctgtcatcacagacaaatgaactataccagctggcagcggttgcgttctgcttgttatttgcttgggagattcggcttattttctggcttttaccgaagtacccatcccacttggaggatcgctggcatttgctatccacaacggcataaccaagaactgagcattgctgcccttttgccacccacaactacttttcccttgaacacgcaggagagctgctatttgccaattacctataagccagcgtacaagctgggttgccaaacaacaacaacaacaacaacaacaacaacaaagcctttttgggctagagttgaaatccaacaaaaaccacaagtcaaggactcaaggttgccaaacaaccctacaactttgggtctgtttggcaacaatgtttctcaaaaccatggttttacaatactatacttcgcaagggtttggagatcttgggctccaccaaaatgctgttttttcatttggttggtggcccaaaatagatgttggacagttgatcgcttggcaaaaggggattgaatcaccctatcagatgtcctttatgtgaccagcaaggggaaaccctgaaccacttgcttgtgaattgtgtcttctcaagga

SEQ ID NO: 33026 - DNA, 1716 bp, Zea Mays
gcggccggcccatcctgtcgtcgaggcgaaccacggaagctagctagctgcagctatagaagcctagaacagaccgctgctcgatggcgcctgctgctaggacgcgagtgtgcttggtcgcgctggtggtggctctagcgtttctcttcctcttggacggcggtgtgcatgccgcgtcgtcggcggcagagcagcggcggcgacaggttcggagcctgctcaggcgtctcaacaagcccgctgtcgcgaccatcgagagcccagatggagataccatagactgtgtggacatctcgaaacagcctgcgttcgaccatccttccctcaagaaccataccattcagatgatgccctcctgccacccacaacaaggcggcctctataacaagtcaaacgacgttgcgcacagtgctttgacgcaaacatggcatcagaatggcaagtgcccagagaacacagtgccaatccggaggaccagagaagaggacgtcctcgacatcgtccagagatatggcagaaagaagtggccatcgtcttggagcaacgaccctaaccgttatgacgacgacgtcccggacgcagcgagcgtactaagaggccaccagcatgcaatagcatctgcaccgggggatgacaactactatggtacccaagcaaccttcaacctgtgggaaccaacggttgagaggaaccaaggattcagtttggcccagctgtggattaccagtggatcctacgcaaacaacgacctcaatactatagaagcagggtggcaggtttacccaggtctgtacaaggatagccatacaagactcttcgtctactggactacaagcaaccagatcgccatcggcgctagcaactcctatttttcccctgtctccatctatggtggctcacagtatgacatcactattttagtttggaaggacccaaagcaaggcaattggtggttgcaagtaggaggccaggatttgggctactggccatcatcgatcttctctaagttgtcaggcagcgcagcctctgtcgactggggaggtgaagtggcatcgtcgccggatgccggccaaacatccacacagatgggtagcggacacttccctgatgaaggtttcagcaaggccagctacatcaagaacatccaattggtagattcgaccaacagtctcaaatcggctagtggtgtgaagttgacagctaagtggcccatgtgctacaatgttcaaaacggtactagtgctgattggggcacttacatcttctatggaggacccgggaagaaccctaactgcccatagtaaaaattcaactggttgccgcgcccaaacgtctcattgatacaggaatagatctacgtacttgtgaaatgcattatgtcctagtcggtgccgaataattataattaggatcatgtcaatggatgtcgtagtatagtatgcattttcactcgtgttgcaaaggtaaattgatacatatacgtctacattgtagctgtaaacaaaaatggatgtttgaaggatataaccaccaccagagaatgggacatcaataccatctggaaccgattacagtatcggattccaaacgttgctaggcaaccggaactaaaggtgtcaatctttaatcccatttgcattgcctagtacaaaggagtgacctttggtaccggttcttggctcaaaccggtattaaaaggtctcaccttagtatcgg

SEQ ID NO: 33027 - DNA, 618 bp, Zea Mays
ataactccgaatcgagcgcataagtactcgttggaaaggtatgacaaagctctacatgattctcccactgatccccactaattgcccacgaaaaattcccagaaactgctaatactactgctgttcacccacctgaaaaatctgtttcttttggacagcaacataaccggattcaaacaatgatatctcctaaattataactccgaatcgagcgcataagtactcgttggaaaggtatgacaaagctctacatgattctcccactgatccccactaattgtccacgaaaaattcccagaaatccctagaactactgctgttcgccctcccacaaaaattctggacagcacctctaccgattcgcatagataaacatataatcaattgaattttagcgcaaaaacatagataacttcaagatcaccttgagttccacctttttcctccttccttcctcccaccaattctccaattgaaacttgcacccacatgaagaagatccgacgaggaagaacgacacttggagaagaggagatggggggtggcggctagggttgaggagatggctgctgcaaaaaacttgagaatggagagggggcggctgcagcacttggggaa

SEQ ID NO: 33028 - DNA, 2760 bp, Zea Mays
gtagtgccgtgctcgtgctcgtgctcgcgaggtacctcgctctctcctgacttcccgcgtcggcgtcgccggcctcctcgtataagaaccgacatccgacacgccgccttcgcactcgtcaacctctccgctttgcctccctccctcgcgtccgcgttccctcccgcctccagatctcgatgcggcagcggctcccctgacagcggaggcgacgccggcaccatgtcctcctgcgacgacgaccacgcctcgctcctcagatcccacgctggggcctcgtcgccgtcctgcccctcgccgcgcggttcggcgggacatcagcaccacgccgacgtcgaggcggacgaggccaccgtcaccgcctccccgaggctcgccagcggcggcgggggtgtgcgcggtctcctgcgcaacctcgagcgccgcatgtccgcacgcggatctgggcctgggcgtcgccagcaccagcattatcagcagctcgatcgctccgtggcgatcgagtcgccgccgtctcagcggcagcgggagagagcggcggcgggggatgacgacgagctcggggacggggcgccgcccgagtgggcgctgctgctcatcggctgcctcctcgggctcgccaccggcatctgcgtcgccgcgtttaaccgcggggttcatgtcatccatgaatgggcatgggcagggactcccaacgaaggtgcagcatggctccgcctgcagaagatagctgatacttggcacaggatactgctgatcccggtgactgggggtgtggttgtaggaatgatgcatgggttgctcgatatatttgagcagctaaaacttgtgaaatcagggcagaggcaaggaatcaactttgttggagccatcttcccaaccataaaggctgtccaagctgctgttaccctagggactggctgttccctgggacctgaaggtcctagtgtggatattggcaaatcgtgtgcaaatgcatgctcagaaatgatggagagtaaccgggaaaggcgtattgcacttgttgctgctggcgctgctgctggcattgcttcaggcttcaatgcagcagttgctgggtgcttctttgccattgaaactgtattaaggcctcttaaagcagaaaattcacctccatttacgactgcaatgataatattggcatctgttatatcatctactgtttcaaatgttttacttggagccagaccagcttttatagtgccagcatatgagctcaaatctgctgccgagctaccattgtaccttatcttaggaatgctatgtggagcggtcagtgtggtatttgatagattggttggatggttttcaagattctttgggcacataaaggaaaagtttgattttcctataatagtgtaccctgctttaggtgggctgggagctggtatcatagctctgaaatatccagggatcttatactggggtttcacaaatgttgaagaaatattgcataccggtaaaagtgcttctgctcctggtatctggttgttaactcaactggcggctgcaaaggtagttgcaactgctctctgcaagggctctgggcttgtgggaggactatatgctccaagcctgatgattggggctgctgttggagctgtttttgggggttcagctgcttatttaataaattcagctttacctggtaatgctgctgttgcacagccacaagcttatgctctggttggaatggctgctacactagcttcagtctgttcagtcccattgacttcagtactgcttctctttgaactgacaaaggattacaggattttgcttccgctcatgggagcagttgggttggcaatatgggttccttcagtagtaaaccagccaaacgacagtgagccttctgggtttagaacatccagacgaggttattcttcaatgtcaccagaagaaagaaatggcagcttaaggcaaggtgatgttgtggatgatcttgagctcagtattatacaaactgacatgagtaactatggaacttataatgcagaaatgcttctggatgatttgaaggtcttccaggccatgtcaaagatatatctcaaagtgttaccatctgctacagtaacagaagttcttaatctgttgcatgatagacagcaaaattgtgccctggttgtggaccctgaagattttcttgaaggaataattacattaggggatatacggcgcatgggatatgggttacatgtggaaagtttcatcaatggagatcaccccaaggctgacgataactcttcttccatttcattgtgtcttactcgaggattccagtatcgtgggagcgaacgtggattgttaacatgctttccagatactgatttgaccactgcaaagagtcttatggaggccagagggataaagcaactgcctgtagttaagcgtggtgttgcccatagaactgcaggaaagcgcaggccgattgcccttctacattatgattctattggttgctgcgtgcgggaggaaatagagaactggaagaccatatatcagagactggcttgttaataatatgaaactacttggacgatatgattattcgtttgattgccgagggagaatattgtgaactgaaggtcatgtatcagcgaaaagcaggctttcctcttgtagcaattgtgcactgaaaaactacagtgcccttatgacaccacaacagtaagcaagactacaggacatctatgcgaaatgcagctagccaactacaggacatctatgcgaaatgca

SEQ ID NO: 33029 - DNA, 2614 bp, Zea Mays
ctttggaagaggccctatgtggttgcctgaacctgatcgtttttttttctgtgtccagggctccagcgcgctctcctcgtccctgttcttccctagccgccgcaggctgcagagcccccggcgagctgccgcccctgccacatatactcagcctccgtccctcgccggtcccaataccctgtcgtccccagacgaagccgacgagcgtgaccctcgcttgcctgaatctgacgcctccgggctcgggctatagttcaatcggtgccggcggggcaagaggaatggcgtggcggatgatgcgaaggaaggattttcacacgggccttgtgactttggcgttccgaaaggatcttgggttcaaaaagtttttctccagtggaaaaatcggaaatctgtcccaggtctacggcagtgataagcccaaatactctgctaattgcatgccctctaaccatttcactatcagcatggagtcagaaaagggaggatgttgtaggtctgaaagctcccaaaaaggagaagcgagtgaagaaagaaaatagaacacaacctcctgtagaagcaccatatgttgcaccaaaaacgaagatatctatcaaacctgtaccagataaaactgttgagatttttgacgggatgactttgcttgacctttctaaacgaactggtgcgtatattagtacacttcaaggcatacttgcagatcttggtgaaaaggttgaatctgagtttgactctatcagcattgatcttgctgagttggttgctatggaacttggcgttaatagcagaagaatgcacactggtgaaggcaagaatgagccacgccctgctgttgtgacggtaatgggacatgttgaccatggtaaaacatcacttttggatgctctccgtcaaacatctgttgctgccaaggaagctggtggtatcactcagcatataggtgccttcgttgttgagatgtcgtcaggagcatctataacattccttgatactccaggacatgctgcatttagtgccatgcgggctaggggcgctgctgttacggatattgtagtccttgtggttgcagcagatgatggtattatgcctcagacactagaagctatgtctcatgcaaaagcagcaaatgttcctattgtagttgcaataaacaaatgtgacaaatctggagctgatcctgagagggtcagaattcaacttggttcagaaggtttacttttggaggatatgggtggggatgtgcaggttgttgaaatctctgcagttacaaaaactggtttggataaattggaagaggctttgctccttcaagctgagatgatggacctgaaagccagaatagatggccctgctcaggcttttgtggtggaggcaagggtggacaggggcaggggtccactcgcaacagctatagtcaagtatggcacattagttagtgggcaacacattgttgtgggagcagagtggggaagaattaggtctcttagagacacagcagggaatataacgcagtctgcaaaacctgcaatgcctattgaaattgaggggttaaagggccttccaatggctggggatgacgttgtagttgttgactcagaggagagggcaagaatgctaagtcatgggcggaagaagaagcaggagaaagacaggcttcgaaaaattgatgaggggatggcagaggagctagaaattaaagaagagactcctgaaagagttgaaatgaccattattgtcaaagccgatgtacaaggcagtgttcaagctgtcacagatgctttaagaagtcttaatagcgcacaggtgttcgtgaatgttgttcatgtaggtgttggcccaatcagtcagcatgacattgatctggcacaagcgtgtggagcatatatagttggtttcaacattcgcagtccacctagtcctatcactcaagcagcagcaagagccaacataaaggttttgcttcacaaggtcatctatcaccttcttgaggagatgggaaaggccattgtggagaaggcaccgggaactgctgaaacccaggtttcaggagaggctgaggttctgaacatatttgagctgaaagggcgcagcaagtcaaaaggaccggatgtcaaaattgctggctgccgtataactgatggccacttcagcaaatccggaaccatgagactgttgaggagcggagatgttgtctttgagggtccatgcgagtctctgaagcgggagaagaaggacgcagaaacagtcgaaaagggtaacgactgtgggctggtgattcaggattgcgatgatttccaggtaggggatatcatacagtgcgtggagcaggtgattaggaagcccaagttcatctcgacgcagagtggttcggttcggattgaatgctgaaatgtagtaatggttgtggctgacactactgttccatttccctattaattcagctagttgtgctttactgaccaaaggtttcgagtgtaacaagattttgttggctagcaacttgttgcaactgcaaccaaacccctttctgatatgagataattaggacaaaacaacagagttaagttgcttttttttggggtcatgttaaacaatgtatgcagtattgctc

SEQ ID NO: 33030 - DNA, 1696 bp, Zea Mays
cttgtatcacttcaacaatctgtagttcgtttttatagaatcatttcatggatctcaatattagcggccatagtttttagctgcatataaatgtcatttgtttgtaacccaataaagtattttaggcaaattttgactgatttaaatgttcagcctggacagtgacttcagacagtatagatggtaccagtgtcagtccattacaaggttttgcattatactgcattttctgcaaaagtagcagttaccaagtgccatgtgccctcgttctgcatcatcactttgctcgttcagaagtactgaagtagtaattaacacccctttctataatgattagatgcaccaaactataaaacacatgacaccagtttgtaaaaatacctgcatcctaaggttattctgctctactctgctgctaaattcaacatccagattacttggtagaggtagcaaggccttgatcctagcacgaaatgagaaaaaagttgacgtcaccttcttgtatgaactatacactttaggatcccttcttcctaaacgcgggctggcagtgttgggttcttctattgtgcttttgtgcattggacaagacaagaagttcttgggacaaactggaggtttcatgtgcccattggcgcgggagtccggggaagagagcgtcggctcctttaggatcgggtcgtcgatgctgctgggccacggggtgacgatccgtgtgctcctcttcagctcgatgtggcacctgcgggggcgcgcgtacgccgccatctcgcgcgtgcgcagcgcgacgttgccggtggcggcgtcctggctgcgcttcaagaacacccacgtcctcctcatggtcgtcctcttcgccctcttcttacggaagctctctggcgctgatcttccgagatgtttgcaatgttgtctttgcgatgcattgccagacgccacctcttgctcacagggacctaaaggtagaaaatgttcttgctgctgatggggcatggaaactatgtgattttggtagtgtatcgacaaatcataagtgctttgataaacctgaggagatgggcattgaagaagataacatcaggaagcacactactccttcatataagttaccagtgagaaagtagatatctggactcttgggtgtctcttgtatagaatctgctacttcaaatcagcattcgatggagaatcaaagctccaaatacttaacgggaactatcgcatcctagaattgccgaagtacagttcttctaattcaacacttaccaaagacatgcttaattcttctacagatgccagacaggacatcacacaggcaagtgagtccaggaatgaggattcacgaacactgcaattcaattatggttcattcaaacataaggcattggataaatccttaactaaaaagtttatagttttagtccttaagcttcagagaaaatatcttctcagggatggtttcagcttgaaggttcgagctttgcataaaaacaatgtcaatacttctgcactaacacaatctgaaatgcgagatatcatccttggtgctgaattgctccaccatcacagcaacagtcgagagactgctcagttagctgctgtaatcacaaggatagcgaatgtgcacggagatgaactcattatcacaaccacaagtccatatgagcaacaagcattcgcatcgaagactgattga

SEQ ID NO: 33031 - DNA, 2188 bp, Zea Mays
cgcgcgcgcccgccgctacctgccagtcgcgcgcctgccgccagcgccccgccgccaccccacgcgcgccccaccgcccccgcgcgccggctcgtgtactccgctgtccgctcccattccactatggcctagctgcgtgctgctctggcatcggtcggtggataagcccagcaggcaagcaggcaggagactaggagagctcagcactgcacgcacgctcccctccccttactggccaaatcgatcgtccccttcaggttccaggctccggagcttgctttacttcagggacaacaatgacctcagggacaacaatgacctccaagacgagcggcagcataaccaccaacctgagcaccacggggaagctctcctccgtgggcagcagcttcatggcgtctgccggcagccgcagcaccagcggcggggtttgacaagggggccaagtactccgacgaccagatcctcgaggcgcccaacctccgcaccttcacattcatagagctcaagacggccaccaagaacttccgtccagacagcgtcctcggcgaaggagggttcgggagagtctacaaagggtgggtggatgagaagaccatggcgccgaccaagaacgacaccggcatggttgttgcggtcaagaagctcaactcggagagcatgcatgggtttgaggaatggcagagatcgtgagtcagagcgcaaggatcctgattatgacagaagctatgacagatcaatcgagttgagtttgttcattccaagtcattattgcatagagatatcaagcctgataattttctcatgggtctcgggaaaagagaaaaccaggtttatgttatcgattttggacttgcaaagaagtacagagatacatcaacacaccagcacattccatacagaacaaagccggagggatgacatggaataaaaaacaaaagtattcgggaaggttggtttaatacactgtcagccttccatggtagggcctgaaagctgggaacaaaaaacaaaagtatgaaaagatcagcgaaaggaaaattgctacttcaactgaggctctctgccgtggatatcctaccaaatttgcttcttacttccattactgtcgctcacagcgtttcgaagatgcaccggactatcagtacctgaagaatttgttcagagacctttttattcgggaaggttttcagtttgattatgtttttgactggaccattctaaagtaccaacaggcatagatgaccactgcaccacctcgtgcaattgtctgtacaaggaataaacttaccctcctaccttaagtagtagtagagattgtattgggtatagaaatgtacttcttttgttatgttatatttcattgccccctctctattttggttcctggccttggtttttgtttcttgtattttttttccatgtcgtctagctactgtagttgcccatcgtcaaagttttgtagagtggttagtgtttttggttgacagacattggtgctagatttgggatcagccttcctaaacagtaccatttactttagctcaatgatatgaataatgcttgtttgcaggacatattgctaagaatctgccacattatgtttgcttgaggtattaatttatccaggtgtttaatgctggagtacagttagaagatccctaatcaattgcttctcatttcagtcgtgtaactttattcatgctacaacaacgactttgagcgaacatgagaccactgagctctagagtgaatgaaggacgtcgtctttggaagtcagacatcacctagagctagggtgtccattcttgacatgtttctcttagtgataggtggatactgtctagttaggaacagagtcttgagggattgatggacgcatgcatcttcaattcctgtgtgttgtattactactggtacaatctccaattcttgtgaacttatgtatttggacttgtgtgaatttgtgatatgaacatatatccatgtgtttgaaatctatattgtatgtgatattttgtgttgcatgtgatattatgtttgtctaaattttcatttctgtattttttattttttctagaaaagggttaagaacgtgggtacccacgttcttaacgttaagaacgtgggtaccgtcgaacttattgtgcattcctcgcagacccacgtaggacacataaggtcgacg

SEQ ID NO: 33032 - DNA, 1450 bp, Zea Mays
agttttggcttcccctccgccactctcgagagggccacacacaaaaaccccaatgcgagcgcccctggcttgtcggcgtcgcctccttcagccaaaaccctagcttgcatacgcgcccgaacaaagcttcgtctgcgaggggcgtcctcctgccgccagaagctttcaggagcatcagcgatggtgtggttccaatgcgaggactgtggcgagaacctcaagaagcccaaacttgccggccacttccgctcctgctccgcgtacaagctgtcatgcatcgattgcggcgagttattcagccacgacaccgtgcaggggcacacccagtgcatctccgaggccgagaagtacggtcctaagggacagaccaaaccatccaatggtgcacagggtaaggcagataagccaaagccaaatgcagatgtcgatatcaatgttgggctgtcgacacggcctccttggttctgtagcctatgcaagaccactaccacaagtaagcaaactctcttactacatgctgatgggaagaagcatagggcaaaggcgaaagccttccatgtgtctcagaaacaaaaagatggtgcagaacaaactccagatgtgaaggaagctggagttgtacccacaaaagaatctgctcaagtaaatggtggcgtgagtggtgatcatgaaagaaatgaagataaagatgctgggaaaaggaaacgaatggatgacatgaccatagagccaggtaacacaaaaagacagttgacacagtctggagatgagaagtcagaaaacaaagcgaagagtaaggccgatgaactagcaagtggtaccgactgcaaaagtgttcaaaagcaaaagatcaaatggaagaagattattactaaaacattgaaggcgatggagttatgaagctaaagaagctacaaaagctagtctccaaggagcttcaggaatgtggtgtctccaaagacaaggaggagctccgtgctaccttgatggataaaatagcttcaagttccagattttatgttgatggcaagaatgttagactggtggccaagaatgaagaagaatcttagaaagaggttgtcagtcatttttttggcattgttgctggtttcattctttggtgtcaactttcagatggcttatagccaagtgttggttaaattgagtccatgaaccatcaattatatccatgacgtgtagacggtatgggaatttagcatctgaattttctcgacaaccgttcaaaagtgaaatgtttactctttatgctgtcaagcaatggcaatgatggttgatagtggcggcgtagtcgcaggggagagatgagagatgatacaaataatgttcattggatttgagtaagggagaagatgttatgtagtgctctgaaccatcgattttgatggtgtgataattctgggtgcaattcgtttggtggatttagtagata

SEQ ID NO: 33033 - DNA, 4381 bp, Zea Mays
ccgtgaatcactccctgccccacaacccccaagcaaccctagctctccctccccctccgcgtcctacagccatcgtcgctctgccttccgcccccgccgtcgccgcagacgcagccggccacccaccactcgcgcctcccccaccgcgtcgcgtgtgggccacagctacagctgcctcctcgagcaacccacactcctttcttcccctgcctgtcgtctctcttccaccttccaccacaagcgccgtcgcagccggtgcctgctccttcccgatccccgaggcaaagctgcgactccgcaactgccgccatggcgttcgagaagatcaaggtctccaacccaatcatcgagatggacggcgatgagatgaccagggtattctggcagtctatcaaggacaagcttatcttcccatttctggacctggacatcaagtactatgatttggggatactgcacggtgaagcaactgatgacaaggtcacagtggaggctgcagaggctactctcaagtacaatgtggctattaagtgtgcgaccattactccaggtacatttgattcttgtgtagatgcaatatgtactcttaatctatactactatattaaggctgtaagggggtagcctgcctcctctggttctgcctcccgttaatctacgtcgtccacgcccgttaatctgcaccgttcgtcatgcgtacgttttcgacgtccgtcgcccgtgtgaatcaccccctgccccacaacccccaagcaaccctagctctccctcccccctccgcgttcgcagtcgtcgtcgctctgcctcctgcccccgccgtcgccgccgcgccacagacgcagccggctacccaccgctcgcgcctcccgcaccgtgtcgcgtgtgggccacagctgcagctgccccccgagcaaccctagctctcgctcctccctccatagttgtcgccccaaacgttgcagcattgatggcagcgagctcgttctccactctccagcatgtcgatccagcgggagcaccttcgacctcaccggtgaaactagaagaacgtatgaagctagacttgttgcaatttatagacatgtaagagaggatggagttgagggacaacctatttctgtttcaacagaacaatttgcaatgacttgtaagttgacatgtcttgtgctgtgaacttgcagccttgttgataacaataattgatctgggcctcttccaccagaattagtagatacacgtagtcttcttgctatcttgacttcaggctgataataacaacttcagtggaagctccatcctgctgaatacaacaacatacaaacacttctaaagctgtgagtgtaacaaccttttcgctcatgttctctcttttcagaatttgaggtagatgagggcaaaagaatttaacagctattacaacttctgttattgagaacaatcattaaaagcatgcttattaaaacgacgttaaaacgacgtttaaacgtcgtttaaactataaaacgctgacaggaagtgaaacgacaaaacgttttacgattcgtcgtaaaacgttgtttaacgtcgtttaaacgtcgcgttttgacgtttaaacgcggtatagagtgaaacgccgcgtttaatgcgtctgctgctagtaattggcccagcccaattagaaactcccgcccagcccacccagaccgccgctacaagccgcactttcaccagcccaattagtaactcgcgttctcaccagccgtcgcactccagggcgcgctccagcctccaggccgccgctgctccaaccctcctgcgccgcccgtccggcgccgccaggcccgcctctgcgtgccgctgctccaggccgccgccgctccagtcagctgctctccaggccgtcctccctccaggccgctgctctccaggccgctccaggccgctgctctcaaggccgtcctccagccccgcctcagagcctctgcgtgccaccgctccaggccgccgcgctccaggccgtcctccctcctgcgccgcctgtccggctgccagcccctccagccccgcctctgctgtcccactgcggcaggactacagagtacagagactgactgtcccactgtttggtatttgacttgatataattgcctgaaattatgatatattgaaatttccctatgttgtttaaaactacatttaaactttgtttaaaccgtttaaaagttaaaacttacccatgagcgtttcaacgtttcgtcgttttaataaccttgattaaaagtgtaggcattggtgagtacaaacctaaggttaaaagaagaatattttgaataaaagtgtttgtatttgccaaatggcttatgcttttagttgagataggtagtatatcaaagttcagggcatcacatagataagaacgaatttgctccgtgtgcaacaaaaagctcgtttttacactgactcctcttctattgcagcctatagctgccaaatagttggatgcaactggtccatttatctggaaatatttatatttaaaaaaatatcgaaaaacattacatttaaaattttataggtagtcttctttcattctgtggagatcattttcactgataactgaaacaacaattacttcattatattcattcaaggacaagcaccacacaatcaacatcatgtttaaactcaaatcaagacgtgttgagtaaaccatccttttacatgttaccaggagtctaagaaactatagtttgggttgttccagatttgagtgtcatacctaaatttgggtacttgtaagtccagattaaatgcaatgtttcctttctcggtttttggacatcttacaatcataaattatccttttacattaacttgcagcctttcaaaaacatatgttttcccaatattatttattaaatgcttttagtattgtatcttcattttagagtgagaaatccgctactcaattcacatcaggatattagttgtcaaatattttagtactaatattgagggggatggcggagggcattgcgctgcggggttacatcgccgtcaccttcgacatgcgcgacataggtgggtccacagggcgggtgtcgctcacgtgctccatcaagaacatcgagtgaggtggtgtgctgctgctctaaagaagggaggagaggaagtagcgacaatgtcgccaagaccacctggcgcgatgtctcctaccagatcaccaagatcaacatgtacaaggatggtcggcatgtacaagatatgcttaaggaatgagccacaaaatctgagagaacttatgctcttggtgctgctgacaacacaactgttgctattagaaagggatttgccattggttcaggtgctcttgtgtccctggtgctgtttggtgccttcgttagcagagctggagtgaaggttgtcgatgttctctcctgaaggttttcattggtttgattgttggagacatgtttttgtactggttctctgtcatgaccatgaagagtgttggaagtgtcgccctaaagatggtggaggaggttcgcaggcagttcaacaccattcttgggttgatggagtgaacaagcaagcctgactatgcaacctatgtgaagatttgcactgatgcttcttccatcaaggagatgattccttggggtgctctggtcatgctgactccctcattgatggaacctctttggcatcgagactctctctggcgtttttgctggtgccctggtttttggagtgcaggtgcgcactttgccttctactctctctgtgcacttcaatgtgtttgcttgttctagggtttatggagatttctgctttggacaaattgccatctctacttccaacactgtgctgcataggataacgcaagaagtatattaagaacaaggccatctcagataaaagtagatgtagctttcataggacttaattccagcaaagcaaaggttggcagtgcaccaaacaatagcgtttatacttcattcttatggattggagaagcctatgcaacatgtcaagccagatgacatgcagatgagaaggttctgcatcaatagaaaccagagaaaaatctgtatgtgtctgtatgacatctcagataaagcctgatgatcagcatgatgaaaggtggggagttctatagctggtttaagctggagctagcttctgaagtccggtcaggtgtctgtatgtgttgcccctttttatttcatttcatgagaaaagattgttatttgttccttgaactgtacttggtcgtacttgtgaataaatattttagcatggttgttcgacttctcataatgtttattcgacatcagttcatgatattagtgttacgtgatattttatcatatgaattttgaatatcatagtgatgtttatc

SEQ ID NO: 33034 - DNA, 1985 bp, Zea Mays
acgacaatcccctcgccgccgcctcggcctctctacctttccacctttcccacccgccgattcactcgctcgcgcggccgcgactccagcctcccctaaatccgctcgcgcccagcgaggaggcggggtcgcagcgagcgaagattccctccgaatcctctcctccaaaaacttccgatccgcttacgatggctacgcagcagcagcacgcggggccggcgtccgggtcggcgtcggcgtcgagctctagctcggggctgcaccttcccgcctcgccctcggccttcggggacaccacccacaccaaggttttcgtgggcggtctcgcctgggagaccaacagcggcaggctccggcgcttctacgagcgtttcggggacatactcgaggccgtcgtcatcaccgaccgccactctggccgctccaagggatacggattcgtcggtgcctctcgatttcacttctttttcgctgttttttttttggcttcccgtgtatgtgtgtgtgcgcgctggatgagctgtgaggatgtgttggtttttttgctctccctccttccacaggtgacattccgtgaagccgagtccgcgaggaaggcatgcgaggaccccacaccagtgatcgacggcaggcgggccaattgtaacctggcttcgttgggtcgagcccagcatcccgtgcaccctgggcggccaagttcagctgggtcctactttggtgtcccagttccaagggctttttatttaggaggttatggccaccaccgaccgtttccacttgggtattaccaaggatttccggttccccagtacagttatccttcatatgggaccgaatacatctctccacagggtacattaaatccatatcccgctcagcaatatcttcctatttatggagtctcagctgcagcaaacacagccaaccaaacatttaaccagttgaatccatacatttctggtgggggcaatggttatatgtcggttcatagttacaacatgcctggaaatcaatatgtgcagctcactggatcaaacttcagcagtgcgtcaccaacagctcaaccttcctgtcagactccttttttagtagcgacacccgttcctgcacatccacacctaataattccagccccctcaccccagtttacacaagctagtggttcagaccaaagagcaagctgaactgtgcatccaagcatttgtaccttgagattgcagcaggactaaaaagagcagtgttgctgtatccacagcttttgttcttgcctggcaagagatcatccttgcattcataaggttgtcgttatcatggtcaacagatgtacctggaaatcgtgaagttgtccctatggatggggcaagtgatccaagagcaagggttgctcttgcctttccactcggtttaaatcgtatacgtgtgatggagccagatgcagccttaatgatcctgtatctgacaagctcgtggaaatgtagcctatgctggaacggagtccagcatatgtaagatggattgatccaacgggggattagccatcatggccttcaggtgattgttcatctgaaaattcatgttgtgtgcggtcctagtcccagtcactgcgcacagggtctggtgaccaaaagtgtatccagttctgtacaagcctgcagtcatcgtgttgtctgcgtgactgcatccatcagcctttggacctaatatgcagtcatcattgtgttgtttacactactggttgtagccagtgatggtcattggtttgccccagtctcccaatttaaggtgtgatttatgtgtgtattgctctgtgtttggtggttccaagcatagagcggttctcttgtacttcaaaataaagccatttaatgggaatcccatgacgctggtgccagtgatatgtgctagactgacaatgtgtacctgtgatttatgaattatgacccttttaccgttccattttatcaaataagttatatcaatgccta

SEQ ID NO: 33035 - DNA, 2279 bp, Zea Mays
ctgcggcgcccctgcgctgtgctcctgccaccaacgccaaatcctactcgcggtcgcgggaggcgaaaatcccgttagttgcccagacccagacccagagaggagggcgacgaacacacggtgacggagagccgagtggacaggacaggagcgcggagggaggaggaaacaaagcagaaaagcaacccccgtcttccatctttgcggagcgacgcgcatctgccctgcccatctctttcgtgctcctaccccccgccttcttccgcccgccgcctcagccctcaaggcttttccttctcatcttcttctcagaccggggacgggcccgacggggacagggacaaaaggtggtgcgatcttgttgggcacactccgcctccgcgcgcgggaagagagagagagagagagagagagagagagagagagaaggacggagggtggcagggccgccgcgccggtgagccgacccccagccatggcattgccggctccccccgtccgcctggcgctgctgctgctcgtcgcgctgccattctgcgccgcgcatcccgggccgggggccttcaacgctcctcgccacttccagacgcccgcgctccactctgatggatttggcttggtggcaagaaggtcgattgctgaagctcctgctgacatcaacgtcactacgaatagctcctttgtgctggcggcagataggacatatcgaagggaccctttgaatggcttcaggaaatacccgggcggctggaatatcagtgaagtgcactatttcgcttccgtcggatatacagccattccgctgttcgccattgctctcgtgtggtttgtgatctttttcctggttatgcttgggatttgctgccgtcattgctgttgcccgcatcacacctacaagtattcacgaacagcatatgctctatcattgatacttctaatactgttcacatgtgctgcaattgctggatgtgctatgttatacgatggccagggaaaattccacaagagcacaacaactactctgaagtttgttgttagccaggcaaactatactgttgacaaccttaggaacctatctgatagtttgtctgctgcaaagaagataatgccgcgaagatcaaaaaggtgctaaacagagtgcggcttgctttagttgtcattgcagctgtgatgcttcttctggcatttgttggcttcttgttatccatctttggtctggaattccttgtctctgtcttggttattattggatggatattggttactggaacgtttatcctgtgtggtgtatttcttcttctgcacaatgtcgtttcagatacttgcgttgcaatggaagagtgggttgctcatccgacagaacacacagccctggacgaggttatcccctgcgtggagcctgccacggcgaacgaatccctgtacagaagcaggcaggtgacgttcgagctggtgaacgtggtgaaccaggtgatcaccaacgtgtcgaacaggaacttccccccgcagctgacgcctttgtactacaaccagtcggggccactgatgcctctgctctgcaaccccttcacgcctgatctgagggaccgcaactgcagcagaggagaggttaccttggacaacgcaacccaggtgtggaagaagtacgagtgccagagcaccaccgtctcaggaggagccgagatctgcgcgacggtggggcgtgtgacccccagcatctacgggcagatgaccgcgggcgtgacggtgagccaggggctgtaccagtacgggcctttcctcatccagctgcaggactgcaccttcgtgcgcgacaccttcacgaccatcaaccagggctactgcccggggctggagcgctacagcaagtgggtgtacgtgggcctggtgatggtctcgttggcggtgatgctgtcgctcatcttctgggtgatctacgccagggagcggcggcaccgcgtgtacagcaagcagcaccagccgtacccggtggaggacaagccggcggcgacggtcccgggcgcttgaattgatatggcccgcccgttccagtgctccggcctactcccgtgccgctgtgcatactgtactccgcgcgctagttgggttttacgtggtggtgtaggtggatgatgtaccctggattgttgttcgtttgcttggtgttgctgtatgtttgctgattttaagttgttgtgcattctcgtactgacggtagctggacaatgaattgattgtgttgggattggttattattaggtgttcttcagttcgtttct

SEQ ID NO: 33036 - DNA, 235 bp, Zea Mays
ccggtcgcggctagttcgcgccgccgatatctggcacctatgggagatcaatgaatgtgccggcgaggatgacgtctggtggtcgtggcttcgaggttgattaatcgccgtggatgaaatgtgcacatgatcagtaattggcgttattggaattccctcagtgcctgatgcatactgaccagcgtgagtgcatagtgattatattaaaaaaagcaagttctaaggttaattttac

SEQ ID NO: 33037 - DNA, 2289 bp, Zea Mays
cattgacctagtacacgtacacgcagatccatcgctcctactccccttccctatcgtatcgcgtcgtcctcgtcgccgccctacgccccaactaccttggtggctagggttcccaaccaacgcgcctccatcctgcacctacctagatcacctcctccacttgaagcattcgtgccggcgtgtggaaggacgccacgaaggcgactcgggggatagcggcctatgcggctcggtacagtcttcccatccccaacaaccagcttagaggttcggttcgagcagagatcgccgaagcgaagacctagagtcgaagcggcccaaatcgccgcttggcagattcatcttggtggaggatggactcaggattcgtcagggccagaggaggatgccagcaccagatccagcaagacctaactcagaggaagcagcgatcaagcgtagccgtcagatagacaatgacaaggacgagtccatgtcttcgcctactcccccgctggacgtaggtgctggcgcgctgtgggtggaggtgctacaggagtgcctgaggtccgctgtcgacctgagcttcgcccaggtcgtcgctaccactgataatcggcctccagcccactgctttagctttagtctttacttttggcgatgagttgacgactaggcaactgccaccgcccaaggtcaggtgctcgagtatccgttgaccccttcgctagtccattccccgttgacagcaagcattaggtatgccagcctcttgactagatttttaaaaataatattaccatttatatgcttaaataagtttactgcaaaaatatattttttgattcatctactgctatttgtttagggatcataaacattaagttttatatataaagttggacaaacttaaaatttgtgatctgcacgcaagccaatgatgattagatattacatctggaattaccttcagattcgtttatgacgaggcatatgcattatacatctcctgttttggttatgtactctctcagtttaatctgattatgtggacgtcgttgtagttcaataattccaataaggatctcaagacctacagttagggaatgctatttgacaatgtaagtaacaattggttattttagttgtaggtgtccatcctgcgacctctggtttggtctgggatggagcacccatatgtatttgatagattcaactatggtgtgtgatttaaattgggtctttgagttgttttaataacaacctaaaatctttcagtttgtgaactgtaataaaatgtaacctgggcctgatgccatgtctctgtttgtctacatagtgtatggcgatgatgacaaagccaagacttgtttcttgacatttgcagtagccacccaagagctttctccctgctaggtttgagagctagtcctactaattccttcatgggatgtctgagccatacatatttctgtttttttagatttcaattgcaagtaatgttcaaatcagagcttgtttctctatattcgcagttgctgctgttgctattgttgtgtatcctgcaactagcagccctcaatctttatcacaggatatattcatcgtagtaatccagcaacactatttttatatagcaacttgtttgtctcttgccaaagaaagttattagtcaaagggagggtttactatgtgttgataatgggcatttggctgtgcgtcactattttcatatagttatctttgtagccaaagttttagacctactacatgtaccttttttgttgttcctacacttgaaagattaaatgtatgtttggttcgtgtctaactatgccacaatttgcttaaatgcctgtaatttttatttcctaaatatgtcttttcatgctaatttgaatacgctattacgcccaattactagatcacgcgtatgctccgctttgtaaacacgtagaccaccaatcctacattgttcttgttcttccttttgtgcttttacgatgatttgaattggtccttttcagaacaatgcacccccagtacctagtccactcttgagcagtatacgacagatacgtccagtacccccagtatggacctcggtggttttctccacattaggaaagctggaagagccttttgaactcagtttttttgctaacagtggtgttatggtgaaacagagttttgtgtgtatgtaccaacaactaaaatgtaaacacgacattatcatagttgagtacaggaataattaccttagatcacttcttgttgtatcttacaccaatttacgaaatttcttgatgc

SEQ ID NO: 33038 - DNA, 2988 bp, Zea Mays
caccgttttgcctgcgtctgcgtgcgtgagcttgcccccgctcccatccgctgctgtagctgtactctctctctctctcctctctctcctgctccgagctgtgtatatagaaaaatccagtgtattttccccggtgtgcatatataggctttggaagggggcgcaggggtggaatttcgggaatcgatttgtagtggggcatgtaagcttgtgggagaggaaagcagcaggagacgaaggtagtagacaaggaaaagtatgccaaagaaaatgagagaacaaccttcttagcttctcctccagtctctctccaccaccgctctatctcctcggtaggaagaagagcaagcaagagaggagcaagctagctagcggtacaagggagagtgagatcaatcccaagcacgtacgtatgagaaggtatagccaacccatatcaggaattttgggggctctcctttcggtctgctttatctccttggctctgtcgggctcctccccgtttgtctccggatcggactcggaggaacagcaaaatctttctagtcacgccccccatatgcggcgaaggggacggacgaattgaagaacacctgccagtccgatcgagctggtggtgccgccaggataaatcgggaggtatatgatggcgtcgaattcaccggcggcggcgttctttggtgttagggatggggaccagcaagaccaccagattaagccgctgatatcaccgcagcagcagcagcagctggcagcggcactgcccagcgtggcgtccggccaaggcgcgccgacggcggcggcgcagccaccgcccaagaagaagaggactatgcccgacccagacgctgaggtgatcgccctgtcgcccaagacgctgatggcgaccaacaggttcgtgtgcgaggtgtgcagcaaggggttccagcgagagcagaacctgcagctgcaccggcgcgggcacaacctgccgtggaagctgaagcagaaggacccgctgcaggcgcagcggcggcgcgtgtacctgtgcccggagccgacgtgcgcgcaccacgacccggcgcgcgccctgggcgacctgacggggatcaagaagcacttcagccgcaagcacggcgagaagaagtggaagtgcgacaagtgctccaagcgctacgccgtgcagtcggactggaaggcgcactccaagatctgcggcacccgcgagtaccgctgcgactgcggcacgctcttctcccggagggacagcttcatcacgcaccgggcgttctgcgacgcgctcgcgcaggagagcgcgcggctgccgccgaccagcagcctcagcaacctcaccagccacctctacggcgccgccaccaacgcgggcaacatggcgctcagtctctcgcaggtgggctcccacctcacctccactctccaggacggccaccaccaccgcccgtccccggagctcctgcgactcggcgctacggccggcggcggcggtggcagcagcatcgccgcgcgcctcgaccacctcctgtcgcccaacggtgcctccgccttccgcccagcgcagcctccgtccttcttccacaacgcgggggcatcggtcggccaggactttggggatgacgcgggcaatgggccgcactcgttccttcagctgcaggccaacaagcctttccatggactactcatgcagctgcccgacctccaaggcaacggtgctgggggccccggcgcctcaggcggacccagctctctcttcagcctgggtttctttgctaacaatggcaacagcagctcggggtccagtcacgagcatgcaagtcaggggctcatgaacagtgaccagttcagcggcggcggttcggaggcacaggcggcggcagggatttttggcgggaacttcgttagtgctggtggagatcaagttccaccgccggggctctacagagaccaagcctccatgctgccgcagatgtcggcgaccgctctgctccagaaggcggcgcagatgggcgcgaccacgagcgccaacggcgccagcgcggcgtccatgttccgaggcttcgcgggctcttccccacaacacgtgcggccagcgacgccgcacatggaacagagcgacgcgaacctgaacgacctgatgaactcgctcgctggaggcggtggcctcggtgccggcggaggaatgttcggcggcggcagcaacggcgccggccacgcgggcatgtttgatccgaggcagctgtgcgacatggcggagcgcgaggggaagttcggcttcggccagggtggtggcggagacatcacgcgggacttccttggcgtcggcggaggcggcctcgtgcgcgggatatcgacgccgagaggagaccaccagagcagcagcgatatgagctccatggaggctgagttgaagtcggcctcgtccttcaatggaggcaggatgccatgacagagaccgacccatcgatcaagattatacagacataagctcgcgcacagtaatccagagacttgatcaaccagatgcaatgggagagcagtaaggtcgtcgtcatgaagttagaaactgagtcgcatgagtgagttcatgcatgggataaagctagctagctagctttcatcatccgaagggaccttgggtgagaaagatgcgtcttctctgactaatggagcagtaagctggagtgcgagttggacgcatgtgatcacccatttgctcgtgcatggcgggggttggtgttcattctgctggtctcgttcttgttggttttcccttcctttgtagttggataatctttgttggatcaagtatagtttttctagtgatagtatctataaggatgttatttgtagctagcttataaaggggcgtgatttgcagcttaatttgctccattcccctcctcctattttttatttccttttctcttgtatcaaaacaatacccccccttacaatgtcattaatcatgctagctgaaattcatcatgttct

SEQ ID NO: 33039 - DNA, 780 bp, Zea Mays
tgcgatatgagtatatgacactctgtttcctcctcccgaatccggttgcctgcattgccagcaaagtcaacggcgctacaactgcattactgcaggcaggctttttgcttgcttccgcgggcctcgcatgccataggctcaataacctcgccagcggatcccttccttgcgaggccggaactgagctgccgccggcgctatggcgagcggcggcctggcggctgcgtcggaagtcgccgtcgttttcctcatccgccctgtccttgccatcgccttcgtcttcaccctcatcctcctcagctggtacgtggcgtggaggacggtgctggtgcacgtgccgctggtgcaggagatcgccggcctgcgcccgaaaaagccctctaaacccaagccagccaaccgcggccgcttcgccaagttctaccagaaccaggccgaagccgcacaaagcaaatcagaaggggcatcatcttaagagaaatccgtcaccaccttgtaatgagtacctgccgcagactttattatgcagttctaattagaatgcaagtactaccagtgacggcgtctttttaggagagaatgtataccagcatgtgatgggagcatccctgcctgcctgacgatacatcaggcttatgatagtagcgtatcaactgtttattgcatgaccttgtaaagttaaggaccttatgattgtacatatatatatacacctgtatacaagaaataaagagaagcacatgtcctttggaataatatcaacgtaccttctcctgcgcg

SEQ ID NO: 33040 - DNA, 1806 bp, Zea Mays
ggaccaagaaacagttttacacaaagacccctcctcctcggtgctctcgagtctcgagagtcgagactcaggggacctgatttcctcgtccggccatggcgaccggtggcaagtccgctgcccctcagccacctcccgccgcgtcctcctcctccgaacgcgcgctggagtcagtccacttctcttccggaaaccctcgcatcgaggagacccgcggcgtcgtcgtcctccaccccgacccgcccgcggccgcctcctggtctcatgtcccgttggggaggaagccgcgggtgtgcgtgctcgccgtgcccaaccacatgacctacgccgacttctgccgtttctgcggcgccttcgtccctcacacactcgagatgcgcatcgtcagaactgatggagcagaggaccagtacagcgttcttataaattttgacactcagagctccacagacagcttctataagcacttcaacgggaagcagttctcttcgctggaggggggtgtctgccatgtccgttttgtggaagaggtgcactacactgaattgattgagcatgcacatacctcagttacaaacttggctgagcaacctacatgcccaaacgacttgaccaagatcctggaggtattctcacaacaatctgcaaccattctttccactgctcgtgcatatcaaaatggacagactcctcatgcccggtctgtagatattgtcagcagcaaccagagaaatccatgtgttctatttgcggaacttcggagaatctttggatatgtctaatctgtggccatgttggctgtggaaggtacaagggtggacatgctattgaacactggaaggaaactcaacattgttattcacttgagttagagacacaaaaagtgtgggactatgctggggacaactatgtacatcggcttattcagtcaaaaacagatggaaagctagttgagtacaatttccatggtgatcacacagcagagagcacgtgttcactatgcagtggtgatgccgcaatggatgaagctctactgaacagtaaatttgaagctgtaatgtgtttaagtaaagaatttgttatgctaactgttaccaaatagcatcctgacaaacttctataccttgcattacaccattaacttacccctattttagattgttgaagagtacaatgatctcgtcacatttcaacttgaaaagcaaagaaattactatgagtcacttctactagaagtcaaggaggaaactgagaaagaaatttctgctgctactgagaaagccatgagcacaaaactccaaaagttggaagtaaagtttgacaagtgtatggaagagaaaaaatttcttgatgaagtaaatggcaatcttgtcaagaatcaggagatgtggattgaaactatacgaaaagcacaagcaagggagcaagctgcgctcagattaaaagatgagaagatcgaaaaacttcaggaagagctaagaggtttgatagcccatttcgactgccaaagtgacactgcacaagcttcaaatgcgatctcgagcgatataccagggggcatgattcttccggtagcatcagaatcgtcctcgagcggcggcgttgttggtggcactggaaacggggagcaaaattgagtaaactgcgccctgtataaagcacgtttggatcttagggacctagtctttggctgttgagttcattaagggggtgtttgttttctagggattaatgtttagtccctacattttagtccattttagtacctaaaatgctaatatggtaactaagactattttagttttc

SEQ ID NO: 33041 - DNA, 4408 bp, Zea Mays
ccgacactccaccatcctccatggccgttaagcccacatccatcatcgccgcctccgccacagcacgccatggagaccagcaagtcgccaccgctctactcggcgccgcgggagccctctgccacgacagtgatgctgtgtccgtgcctggcgttcttcctcctcgctctcatcatcacctccatcgcactcactgtccactttcgcctctactgccacactcctcttgcccacctcatctccccgcaccgctgcccccaccacatctgacctccgtctccgcccgcatcgctggcgtggtcctgcttcccagaggcgtgttccctctgctgccgccgagatcccgatacgttatgggttcccctctcctcgcgacgccggcatgcggggcttacgacgtgctctggggcttcgcagccggaaggttcctctccatcttggctgcctccgacgaagatcagggctcgtcggagcaggaggcggctgcgagcaacccggagggcgtggaccgcgtctgcgcggccatcgcggacgtcgtcgcctccggtgccgacgcgaacctggaggcggcgctatccgcgctctcgccaccgctctgcgaagcggtcgtgctcgctgtgctccaccgcttcaagcacgcacataggccgtcctaccgcttcttcaggtgggccacagtgtccggtggctttacccacaccaccattacctactgcaagatgttacacatcttaggcaagacgaggcagttcgagtcgatggttgcgatgatccaagagatggggaaggcgggggccctgtccatggacgccttcaaggttgccattaagtccttcgctgcggctggtgagatcaagaatgcggttggcgtgttcgagttgatgagaaagaacggtttcgatgatggggtggaatcattcaattgcttgctcgttgctttagccaaagagggattaggtagggaggccaggcaggtgtttgacaaaatgcatggccagtactctccagacctgcgctcttatactgcactgatgctggcatggtgcaatgcgaggaatctggttgaggcggggcgggtttggaatgagatgctggagaagggaatggatccagatgttgttgtccacaacacaatgattgaggggttgctgcgtgggcagaggcgacccgaggccgtgaagatgtttgagctgatgaaggcaaaggggcctccaccaaatgtgtggacttacacaatgttaatccgtgaccattgtaagcaggggaagatggacatggcaatggagtgctttgaggagatgcaggaggctaaatgccaaccagatgttgctacctatacatgtttgctggttggatatgggaatgcaaaacaaatggacagagtgactgctgtgttggaggagatgacacagaagggatgcccccctgatgctcggacttacaatgcactgattaagttgctaacaaataggaatatgccagacgatgctgcaaggatatacaagaagatgatcaagaagggacttgagcccacaatccatacttacaacatgatgatgaagtcatatttcgttggtgatagcaactatgcaatgggttgtgcagtgtgggaggagatgcaccagaggggtatttgccctgatgtgaactcttacacagtgttcattaatgggcatatacgacatggcaggccagaggaggcatataaatatatcgaggagatgattaataaagggatgaaagctccacaaatagactataataagtttgctgcagatttctcaaaggctgggaaaccagatatattgtttgagttggctcagaaagtgaaatttgctgggaaattagatgtatctaatgtgttctatcagtgggcagatagaatgaagagtcgggtgaagagaaatgtaccttcagattggtaatagaatgttctaagattactatgctgccagcaggaatgtggcatgctgtgatggtgcttgaaatttgattactaaggagaactgctacctttttcagtttgccattgtacggtcaactttaatataattgtgacctgacattcaaaaaaaagtgcaagatgcaaggcctaccatgtgcttatttacggttgatgtcttttaacaatcttcaaggcaaacctgtgacatgcaaaatctttcttattatcactcgttttgacttttgtgattgatgcatttatcacatcgtgttaaacatagcttgttattcacatgttgatatgtgtagctccttccttcttgtttacgtttgtttgtttctttgattaaacaagttatctgagctatttctttgtatcttttttgatgccatgacatagaaaacactacattatcaaatattcaaatgcgtagatttggtaaaagtttgactatgatattgatgatctttcgtggtctgagtggtggagtttttgcagctattcacaggctggaaagttcatgcactgccctccttgtggatacactttctgttaacaaaatgctatacagtttctttctacttaccttgtgattttgatggagctctgttcctgtggttctttgacatttgttggtctcttgagcattagttctgcaatatgcattatgctcctctattgaactctatagcccatattgtggagatcactaacatatttaaacaagggtacaagacaacaaaccttaataaatgtattgcatgcagcacatgcaaatcttttggtctaccatgtgctgggtgtttccagcatggcactctgctggtatgaggctaacaaatatctactattgagtttgttagctcccgtgactctgggcactgcttcaccattttgtgactttggtatggttattatgtttggtgaactcaattttctatgttccaatccctgctcttagttaattcttatatctgcagtctgcaaatcttgttttctattgcttcgctcataattaatctgtttggatcactagattagtaggataaaactgaaagaaatgagaatgacatgactctgggcctgaattttgcacaagatccgactgttcatttggttcgaatctttgcgtctgaactgcatctgctggtcattgagttctttacttcttttagtactcccgtggtccttcgacagactgcacttgtgtatttcacgtgaataaatacataagcatgtgaaacctgacctggattaatgtattatcctaatttatgtcaaaaaatatctgacatcctggacgcatgatttttctaacacacagaaactgtgtgtccagagtacaagcgagatagcagtaaattgtttcttccctgtataattgactgacatcattttattatttgaggttgtcatcttgcttagtttctccacttgccactggaatggagatgaagcacggtgctctattagttatgtttttcttttcttcgttccttgaggttatattaggattttccctctaaattattgacttgctagattaaaatcatctccttgataccaccaatatcatctgtgaaaaattgataaatatgaatgtgttaacttgactccattttatcttctccttatttgagcctatattcttctttttctactgagaaaaaccaaaagcaaataagtgtaactttacattcttattgaagatatgcgataatgttctgtttgaacattccctgcagcacctacatagcaagggatattttttttcatgcaacccagaatctgaacgccattgcgaaaagcagggataaaatgctgctgtttcactgcaccaactaaacagagaaagaaaaggagatgagaaaactcagcatgttttgattcgactacagtctgcgcccccaagaaaccagggaacaggagtcaggactaacctccagcagctgcaaccggtactgcctctgcccactttggacgacgccaatcattcgcatgacaaggtagagcggcagcaggataccagcagcacgaatgctctgctgcttcagccgtcgccactgcaaccagatgccatgcgagcgtcacaatggtgaactgcacaagtcagaatccaggggacagcatggatcaggactcgtcctaaaggatggctatttttcaattcgctgcatgacttagaaccactacataccgtgatcgccagcgaccggcaccatgtggcgcattgatctgcggcgtaggagcacctggtgtaatctgcaccgtcaaccaagccctccggaggttccaaatgttgcatgtcctcgtgttcactgcacgatcacttgagaaaatttagatggttgccaatttgactggaacccagttacaagcctacttgaaagctttttttattttagattttctttccgaactttatgaaacttttgcaggttaacggttttttttttgaaagaa

SEQ ID NO: 33042 - DNA, 408 bp, Zea Mays
taacatttgaaatatatctagatgtagccaggcactgcggctacacgcgtggcagctgccagaagtccgatggcaacagctgctattactactttgctaggacatggagtcacgtgcttgtcttcttcgggcgaccgcacgaagctaaatgttaagtcgttaacttcgagagaccgagataactaagatggacatggtagactgctccactgctgctggattcttgaatgataaaacttttttattttatttttttgcaaatacatgagtttttaattatatgcatttattatttgtataaaaatcttgggtagacccgctcctaacagacataattgagttttagatgcgtaacgtacgaccttatttaatatgttatcctgatgggtctataaagattaatttaaa

SEQ ID NO: 33043 - DNA, 352 bp, Zea Mays
gcaatgctcagcttcaacctttatttttttatcacccttacacttcacatgaactcccacatttggtttgttcatgcaaattattccccacaacttgttgaacgatgaacatgtgttagatcacccttgctgtctcacaccccccacaggagaagaacaggtggtcgaggaggagccgcctaacactgaggctttctacttgatctaggtggcgtctcccagtcagctttgtggcgccagggaataatatttagttcgttttattttatcatttattttgtaagacttccactatgtaataagtactctgatgatattgtgacatttatctctatacgctctgttattatat

SEQ ID NO: 33044 - DNA, 4282 bp, Zea Mays
cggccggcgcctgcacggcgcccgcggctccgcgcgctcgtcctacttgccatccgtcactggacgggccacgcgactgcgatccctgccacacgagcgcaacgcgccatgggtccggcgtgccagtgagagcgggagaagctcggacatctccgtggagggacatcttctccagcgattcagcgcgggatcctgctggactggcctgatccctccgtgctggtgtcggcgagcatgcaaggaaggatgcgaggcgcgcggcggagcgcgcgcggggaatcgtcccggaaggcggcgggccgcgaggtggagccattcacgctgtgcggcgagatgtcccatctcaccagggccacgtcagagccgtgccgcagggctcgcggcgccgccttcgcccgccgggcgaggcccttctcggcgtacgagctggtgtcggcgcgggaggccggccgcgcgggcggcgccgggttctccgcggccgatcgagcctacctcggcaggcagcacatccccaccaaggggccgtggggcgtcgacgacgtggaaagcgaggcctacgtctcgcagttctccgccgatggctcgttgctcatcgcggggtttcggggaagccgcatcagagtctacgacgccgagaaagggtggaagatccacaaggatataagctgcagaagtgtgcactggacggtttcagatattgctctctcacctgaccaacgattccttgcctatgcaagtctgacacctattgttcacattgtgaatgttcagaatgctggaaaggaatcacatgctaatattactgaaattcatgagggattggatttaaccggtggtgatgaggatgaggactttggaatattttctgttaaattctccaaagatggtaaagaagttgttgttgggaacaatgaaaagtcaatatatgtttatgacctttcagcaaataaagtgtcagcccgcatccgtgctcataaagtatgtaaccatctgattaacactacctttttcttgaaaaacgcaggagaacaatatcttatttgatatgcattgttatgtttgttttctacatcagatggaaaaaaataatagttagccgtgtctaattttatcaaccatgcacaaatgccaatatagacagctactctattccagtgcttcatcatagaagcatagaagtgtctggtggctcaagaatttcatagactaaattggatgtactctctaatgatgacatacaatgttagtgccattggaatctatacataggccgcgaccttagttgtccacgatcctcttggactagattagaaaccaactctaattagaggttagagataaaacagaacaagattgcatgcatccaattcatttagagttagagtcgattggaatattgtaactaagtaggattcctcttgtaataggcggctcccgcctgtacaaatatacaatcccaccgaccctagaggtcaaggcaagcaattaaagattgttgtgtttcttcaatggtattagagcaagtcgacattgacctcatcaacgacaagattccgtagcatcatccagctcagtagtactgacgactctcttaggtcaaagcattgttgtaaagctcaacaagaccaacttcgctctttgaattcatgagctctgaggtgcgcaactacaaggctccctagatggcatgattgtagcgtccgacaagatctccgtcaagcaagatggcaagatgattgacgatgtcaacccagagtacatccaatgggtcgcgcttcagcagcaagtccttagcttattcatgacattcataactcaagaaagtcatgggtcgggttgccatctacgagacaccccatgaggtgtggtcagaactgcaaaagacctacgcgtcgtagtcatgagcccggaccgcgaacacacggattgccctgaccacaagaaaatgtaatatgataatggctgaatacattaccaagatgaagtcttttgcatatgagctgacatttgcaaagacgaatgttgatgatgaagaacttgtacaaaccactcaacacctcaaagttctacaaatcatgtctctaatgcgcctgatcaccatgctgctgcagcatcgagcttttggtccctcaagcagcgagaaagcagtgcagtggaaccttcacatgacttgcatcatcagagtgctcggtttcatcaagacctgcaactccatcacctcaatgacgtcatgttcccattgtttacatagatcagcgtcctcagacaagattacaagatgaaaaaattactcatactgaatatggctattttatcatcactggtgaacctcaagaatgctatgaatgctaaatttgatacgcgatgagaaataacacttgacatctagttgttgctgatgagaccaagaatgttattaactgcaagtagagatgacaatggggccctgatttacgactccccgttgggaattcttccattaggggatgaggatggggatggggaagtttctccccccacggggatgtaaacgggaaaatttttccactcgacgggtaaatagagatggggacggggaagtattccccatccccgttccccgcggggaccgctaaacttgcacgtgaagatgttttcatataatagttaatgataaaaataaatatttaccttgccaagagattactcattgtacaaatgtgttcattttgatgtacacataattatttttttacatctgacaatatatatgtgacaatgttttgtgttaataataaaggacgtacatcctaattataatttaaggggggcacgaggatccccgtcagggatttattcccacggggacggggatgataagctattccccaacggggaattccctgttgccatcactaactgcaagtggctatatagaatcaaatggaagacagatataacactgaacaaatataaagcaggctggtggtaaatggttttaaggtagattatgtggagacattcagtcttctggtcaaatcatctactatcaggatcattatgggatagagccagtgtgggaggctctcgcatgagtgtgttctagggaaggataaaccgaggaaaccctttcatcagcaaatgttgtacaaccacagcttaatcatttaatagatttcctgtgagacaatttttttttctaattccatggtgtggttcgaacttgtgaaaagtacaaagctcatattgcttaatgatggaaaaaacacaaccatgcttgagttgggtgctataaattcatgatatggtttaatgtcataggactggactggcagatagaagtaaatcgatatttatctcttgtacgagttgtgctaggaaaatcatttttgtgatcatttactttccactgtttctctaaggctgatgtcaatgctgttaccttcgctgatgaaactggaaacgtgttgtactctggaagtgatgatagtctctgtaaggtgtgggacaggcgttgcctttcaggggaaaagtcagcagtcgcccagtgagtctagtggactgggactataggtggatgccatttccatcagaagctcataatcttaagcatccaggtgatcagtctgtggccacatacagaggccattcagttctgcgaacacttatccgttgctatttctcccctgtgcacagcacgggtcagaggtacatatacacgggatccagtgacaagtctgtacatatttatgacgtggtaaccggggaggctgtcaagaggctttcgtggcatggctccatcatcagagactgcacctggcatccatactacccaacgctcgtcagctcctcctgggacggcttcgttgcccggtgggaggcctcgggcgacgacgacgaccattcggtgctcgtcgccgacgagatgagaggaagcccttactaccggagatacggcgatcccttggtgatgtagagatgtctgcaaagtggttaacaccaaatggtagtgagcatgtactttgctttgttgtttgggaattacaactgagcagcatgtacagtgccgtttggctcatgtggttgtatagccttacgataaataatatgtagggatacagaaagaacacatgagatcgaagcgactttataaatcctatggaatttatagaaacagacaagatcctctttccttgtttttaaaaactttataaatactttttcgaattttgattggattggaatacaccgttgttggattcagaaattatccattcatctcactcactatgggacaatgtac

SEQ ID NO: 33045 - DNA, 6241 bp, Zea Mays
tagagcgttggctgctatggcgccgcctcgcgtcaccaggaagaaggggaagggcgccggcggcaagaccgacctgcgtcccgaccggaagcagttcaaaaggcaccacaaggaggatgcagccgctgagcagggggatggcaacggagagcggcagcagtcggcagcgccgggttctgcagcgctcctcgccgcagcttctgacgaagctgactttccaagagggggacacagcctcctgagcaaggatgagatggcggaggctcgtgcggaggcggagcaggatttcgagagggaggcgaagaaggggaagggaaaaaggaagaggagtggcggcgagtcgtctggttttggcgtggatgacgacttggggatactcttcggtggggccaccactgggaagctcccacgctttgctaatcgcatcacagtaaagaatatttcaccaaatatgaagctctggggtgttgtaattgaggttaaccagaaagatattgtgttaagtctacctggtggaattagaggctttgttcgctcagaggatgtttgcgacattgctttgcaggaaaatcgtaaggatagtgggaacaatttatgcgcagaagttgttcatgttggtcagcttgttccttgtatagtcctacgagtcgacgatgatagtagagaaggaaaagtaaacaaacgggtttggctatcattgcgattaagcctattgtacaagggacttgccctggatggcttgcaggaaggaatggtacttactgcccaagtcaaaagcatcgaggatcatggttacattcttcattttggagtatcttcctttagcggatttatgcagaaggatgacaaagaagatgtgaagactgagcgccgacaactgatgcaatgtgttgtgaaggcgattgacaaaactcgggccattgttcacttgagttctgatgaagacttgctttctaaatctactattaaggatctgaaaggcctttctattgatcatttgattcctgggatgatggttaatgcacgtgtccattcatttcttgaaaatggactcatgttatcatttcttacttatttcagtggaacagttgatatttttaatttgttgaattccttcccctctggtaattggaaagatgattacagtaagaataagaaggtaaatgctcgcatcctgttcgttgatccatcaacaagagcagttgggcttacattgaacaaacatttacttcatcttgaagtaccccctattaatctaaaagctggagatatctacgataaatcaaaggtgctgagggtagataaaaaggccggtctctttcttgaaataccttctccaactccatcacctggatttattagtatacgtgatgtgtcagacaaggatgcaaaaaacttggagaagttcaaggaaggcagtagcttacgtgtccgtatacttggagtgcggaatcttgaaggagttgcaataggcaccataaaagacagtgcttttgaagggtctgttttcactcatgatgatgttaaacctggaatgttagtgagagctaaggttgctactgttgagccattcggtgctattgtacagttttcaagtggcgtgaaagcactttgtccgcttcctcacatgtcagagttggaacatgttgttaaaccaccaaagaaatttaaggttggagctgagcttcttttccgtgtgttgggctgcaaatccaagagagttacagtgacatacaagaagtctctggtgaaatcaaaacttgatgtgctttcatcatatgctgatgcaaaaattggtttagtgactcatggatggattactcatattgaaaagcacggttgctttgtaaaattctacaatggagttcaaggttttgttagcagatctgaccttggattagaggctggaactgaagcagaaaatgtttatcatgttggccaagtggtcaaatgtagaattatcaatgtgatccctgcttcaaggaaactaaatgttagttttgtcatatcccataataggattgctccaatagacactccaaagttgggcagtattgtctctggtgttgtggaacggcttactcctgcagctgttgttgttagtgtaaatggcttctccaaggggacaatactgaatgaacatttggcagaccatcatggtcaagctgctcagttgaagaatgtgttgaaacctgggcacgagttcaaccaactcttagttctcgatggatatttgatcacattgctaatttttccaactgattttctaataccggtctgcagatactgaaggtcaaaatttagttctttcggcaaagcactcacttataaattgtgcaaatgacattccttcagagatatcacagatgcatcctggtgttgtagttcatgtaatctttctctagttatttttacttagcctaatgtgagcaactgagctgacatttaatttatcttagggttacatctgcaacattattgaagctggttgttttgtccgtttcctcggacatttgactggtttctctcccaaggacaaagcagttgataggtggatagaaaagctttctgatgcgttctatgttggccagtcagttcggagtcatatactcagcgtaaatgcagaaactgctagagtaaaactcgcacttcaacagtcaatgtgctcctcaatggattcttcatttattcagggatactttcttctggatcagaagattgcagcattgaagtactcaagcaatgactgggctcgccattttggcattggtagcttagttgaggcggaggtgggagctatagaagaatatggtattatccttaacttcaaagaccatctggatactgttggtttaatcgagcaccatcaacttggtggcagtagtgtggaagtgggatcttctgtgaagggtcttgttttggatttatctgatggagttgttaacttgtccgtcaaaccagagctaattgacagtgtcagaattgttggaaaaaagaagaaacgccaaagggccgtagttgcagacttggagcttcatgaggaagtgaatgcagtcgtggaaataatcaaagacagctatatggtcctttccatccctgagtacaattatgcaattgggttttcaccactgatggattataactcacaactgcttccccaccaccactatgataatggacaacgcattactgtggttgttggaaatatcccaagttctgactcttctggaagacttatcttactaccaaaagcttcagcacagtattcttccctctctgattctaaaagggctaagaagaaatcaggctacaaaattgggtcacttgttgaagcagagattattgatatcaaaccgcttgagcttctactgaaatttggtggcaatcttcatggaagaatccatattactgagattcttgaagaggattctgctgagcatccctttagtgaactcagaatagggcaaaagcttactgccagaattgtttcagaggctgaaccttctggaaagagtggcaaaaaattcaaatgggaattgtctattaggccatgtatagtcaatggagagtttgctcaaaaagaacaaaatcacaccacaaatgggattgtacgtgcttatgttgtcaaggtggataaggaatgggtctggttaactgtatcaagaaatgttatggctcatttatttttacttgatagttcttccgagcccagcgaactgaaagaattccagcagcgctttagtgttggccaagcagtgaaaggtcgtgttatcagtgtgaaccaggagaaaaggttacttcggttgaaggcacttgataaccaatgcacacaaccgaatatagatgaaacacaagaaccaaagtcctctgtgtttggacaaacaaaacaaggagatatcattggtggacgtgttcaaaaaattctacctggtgttggtgggctcgtcgttcagattggacctcatctccatgggagggttcattatactgaaattgttgactcttgggtgtctgaacccttgtctggattccatgagggccagtttgtgaagtgcaaggtcctgtctgtgagccgctcatcagaaggatcacttcgagttgatctatcactccgttcatcaaacctgatcagagactctaacaactcaagactagatgatctggaaacctgtacctcccggattgagaagatcaaggatctgctccctggaactgagattaagggctatgtgaagaacgtgaattccaaaggatgttttattatgctttctcgaatggttgatgctaggattactctatcaaatttatcagatgaatatgttgaaaatccacagaaggatttccccgttggaatgcttgtacacggaaggatcctgtctacagacccatcatcagggagagttgaggcatcacttaggaagaccactggttcaaaattggaaaagctggatgatattagttatagtgacttgcatgttggggatatcgttgatggccaagttaagcgggtggaatcctttggattattcgttacaattcggagaagtgaattggttggtctgtgccatgtatcagaactttctgatgaacctgtcgttgatattaactcttgctataaagctggtgatatggttaaagccaaaattctgaagattgatgagacgcggcatcgagtatcacttggaatgaagaagtcatactttgattctgatctgactgctgacacaaatgatgatgaaagtgctcttatggacatcagcgttgcccctcagatggttgaatatcataacagaaatttagttcaccgcaaagcagaaccaagggcttctgttctgcctcttcaggtttccttggatgaatcggaaggttccgacctagaggataatattagtaatacatgtcttgaaattgctaatggaactgaagcaaatgctaaaaagagtgataaacagttaaagaaggaagcaagaaaacaaagggaactagaaatcagtgctatggaggaaagggctttgcaggaagatataccacaaactccagatgattttgagaagttagttaggagctccccaaatagtagttttatctggataaagtatatggcaactttgttagatcttgcagatgttgagaaagcacgtgcagtagctgagagggctttaaaaacaataatccccagagaagaagaagagaaactaaatgtttgggtagcatatttcaatctggaaaatgaatacggtagtccaagggaggatgctgtgaaaaaggtattccaaagagccttgcaatattgtgatcccaaaaagctgcacttggctcttcttgcgatgtacgagaggaccgaacagtatgagcttgcagatgaacttctagacagaatgaccaaaaggttcaaaacttcctgcaagatatggttatgccgcattcagtttgctctcaagcaaggcaaggatgttgagtacatcaaagccattgtaaaccgtgcacttctaagtttgccacacagaaagcgcataaaattcctctcacaaactgctattctagaattcaaatgtggggtgcctgaagaaggaagatccagatttgaactaatattgcgggagtacccaaaaagaacagacctttggagtgtttatctagaccaagaaatccgccttggtgacgtagaagttatacgggcattgtttgagagggtgacttgtctgaccctacctccaaaaaagatgcagttcttgttcaagaagtatcttaatttcgagaagtcactgggtaaagacaacgaaagaattcagcttgtgcaacagaaggcaatcgaatatgttcagagttcactgccgtcacaagacaactcttgaactacatggagacttaataagcccacaaacaatcattaggaaataccagtcgtactgtagatgtgatctctttgatgactccttgaacattattgtgaaaaggtcaatgtaaaatgtgggctgttcaaaattttgtttgaaacctttatataagttatgagtctagtatgtcatgtttcacccaattttttggaaggaactattctaagccggatctggttcgaatattgaccttttctatctgtggtattgactgatgaggcacaattgaatgggtaactgtctgtgctactctgtcacacccgggtttcggacaccaagacacgggcgcgaacataatcacctggtgttgctgggatcaggtcttacacatatgatgaatcatg

SEQ ID NO: 33046 - DNA, 2124 bp, Zea Mays
gagaaagaaaaggggagaggtggcaagagagagaagagaagagaagagaagaggggagtcgaggtcgagagcagcagggagagggaaaatccactaatccccccaccccggctctctcgaaacccgccattcccctccgccgcaaacacgcgtcggagctcgtggcgagcgccgccaccccgcactcgggctggggggcgtccctccgcccccttcgatctagagccggcggccgcgatcccgccgcgggtcctcgcggccgccgcgaattgggtttgtactgacgttaccggtgggcggaggcgctttgatcctgtagctgccgggttgggttcagtagatggcgggcaaggagcagggcggtggaggcccgccgcagaggcctcccatgcccgcagcgtccatgcagccgccaatcaagaagctggtaaggcagctggacttcaactcggcggcgttggcggggaaccccgcgatggcggcagcggcggccgccgtgtctagggctcttcagccgagggcgttgcccgcggggttccagcatccgcagcacgtgagggctgccgtgccgatggtggtgccgcagcagctgcaccagcgggcgctgccggtgatgcgcccgcatccggtggtgggtcatgtgccgcggcacgcggtgccgctggcggtccctgtaccgcagctccgtccgatgccgccacagccagtccagcgtcccccggtcgccgttcccttgaaaccagactcaccaaaaccgtgggcaagactttacgaagggaaagatagcactcccacgaagaaaaagtgctgcaactgcaggaactccagatgtttgaagttatactgtgaatgcttcgcttctggtactcactgtgatggttgcaactgcaccaactgttttaataatcctgagaatgaggttgccagacgtgaagctattgaagctacattggagcgtaatccagatgcttttaggcctaagatcgggagcagtccacatacgaataggaataatgaggtgtctagtgatctccctttagtagggaagcataataaagggtgccattgcaagaagtcaggatgcctcaagaagtactgtgagtgcttccaagctaatatactatgctctgaaaactgcaagtgtatggattgcaagaattttgaaggaagtgaagagagaagaaatcttttccaaggggatcataaaaatgcaattaacattcagcaggcgacaaatgcagctgtaaatggtgctattggaaccacaggattcccttctccctccacgtcaaggaagaggaaacatattgatccttcacttgaccattcaaacaaggaacatgcagcgcacaggaattgtcacatacctcagaaaaatgcagtgcctgatggttcaattccaataagccagtctgcacatcctccaactctgggcccctttaaagttacctacaggccccttttagcagacattgtccaagcagaggacgtaaaggagctatgcaagcttttagtggtggtatcaggagaagccgccaaaacatatgctgaccggaaagcgaaggaagagagggttggcaagaaggaagatgaaagggcagaacaaaaggaagatgacagggcaggttccctagcattgacaaaccatgacagagaaggaaataatcaagatccagataaaaaagcatcaatcgatgaccattcaagcagaggaactcatacgggcaaagctaatcaagaagaatccagacctaactgcgctgatgatcagaagtccaatagacctatgtctcctggaacactagcactgatgtgtgacgaacaagcgttcgagaaaatgtgtgacgaacaagatacagtgtttacggcttctcaaaatgctgttcctcagcagacagttactgtcaaccaaaaccaatctgcactgtacgcagaacaagaaagaattgtgctgacagaattccgtgattgcctccgcaaacttgtgacatacggaagaatgaaagaggaaaggtacgccatggaaatcaaatctgaaacatctggccatcctggacagatctttgtagcaccagcaggtgctacaccgattccatggctttacaacttggagctgccattgtg

SEQ ID NO: 33047 - DNA, 2318 bp, Zea Mays
cccacttggaatctggaatttgactgaggggatgtagaccgttcgatttccaatcgcacggtccgcgttcgtttgacgtccttctggcggttatgctgctgcgaccaagtcgagggctttcgtgccttcagcccttcagtcttcaccagtcgcgcgccgccatgtcggagaccgaatcggcggcagcggcgccggtggctgcggctgaatcgaagcctcggcgactgcgggggcacaagaagggcgccgtcacctgctgcgtcgcctcctccgcccgccccggcgtcgtcgcgtcctccggcgaggatggatgtctttgctggtttgatctgcgcaccaaagatgcacttttgaccatggaggcagcaaataaaccaatttcttcaatttgctttaaaccaggaaatgaagattttgtgtatatctctgctggaaatgaaatattgtcctttgatgttcgtatgggaactcaatcaaagccattagagacatataactacaatagagatgaaatcaatcagattgctgtcagctctaaaggttttctcgctgctgcagatgatagtggggatgttaagattgtcaataccattcagaaatgcctgtataaaagattaagggaagcccacacaagtatttgcagcagcgtgcaattcattccttggagaccttggacagcaattactgggggccttgactcaaagctcgctgcatgggatttctccaaaggacgaacactgttttctattgattatgtagcagtttctgaagagggtattttgggagggctctacaaggtttgtgctgttgcaaggggggatggtgctgttgatgtggttgatcttgagtatgaactggcccctgcgaaatcgaagggacctcctcgggcagctattttgacaacgagatcaaaaggcgctgaacttggagatgggagctgcaatcaaagtcgagcgaaaagaatccatcttgactacaccatgggcggccatactgcagctgtgtcttgtgtagcattttcagcatttggtgagaaggggaagttcctcatttcaggtggcaatgatgcatcagtgaagctgtgggattggtcgaaaggattttactctgaaacaaacagcaaagttgatttggttttggatattgatgtaaagaaaaagtctgagactctcagtggctgcaaactcttgttgtacccattggaacaggaggaagaagaggggagttcaaagcttgcctctttaccagcaatagctaagaaagttttatcttacgaggagggtatttatgcaaaactttccaggaagtggatagaagaaggcctcagaaccgtatccattggaagacaggaaccagggggttttgctgctgttctttggaggagaagagaaatgggaggcttgctcttgccgcatcaccgaacctttccaaattctttgcaagcttccatcccgggacctctctctcttcacaaaggcgaccgcaaaaaccttcattactttgcacctgatgtgcacctcttctgttccctgcggcaaggctttccacgctcatcttggtcggccgtcatcagatcagaagccagcggcaacgcggtggcgtcgccaggcacggtcatcaagcgtagcaaggaggagctcatcaccttcttcagagacatacagacatccattgccgagtgctcgcgtaaagcttccaagaggacgaggaagcagccgcctgatctgttccaagaggtccgcaggagggaggaacagtcacacggtggaggagatagcggcaccgacgacgtttcagagggaccgaggaaagtgaagagtcttgaggacatgaacgtggctggattgagagagttggcgagggccagaaggatgaggggttactccaagcttaagaagggcgagctcattgatcggttgagaggggctactacgtaataaactaccatgatgcagagcagcttcgcagttaatagggacacatgttcttttcgaacgtatgatgagattaccgatcaaaaaattgtatgatgatgagattaccgactttccaaacgatctagtcagttcattgataagaactagaacaatgtgtgtagttattatactatagaaccggtggagctgtattgttgtactacgccgaaacttttgtgtaggcatggcaatctcctgttgttacgtaagttactttgttatgtacggaattagtttctctaaatctaccatggattgtgtatttctacaacatctgtttggaatttgatgtacattctaactaggtggcaattggcaaataaagaagtttaaaatggccta

SEQ ID NO: 33048 - DNA, 3980 bp, Zea Mays
atggcgagcgggggaggggggattcgggcgacgacttcggggaggatgaagtcgcgagggtggggagattcaagcgacgactttgggacaccggctattgcgctgaggcgtgggggcgactgtagtggcacggcgagttcagactccagcgccgtcttcttcgcggtcgccttttgcgctccatcccctgggctttccgtcacggcggccgcagccatggtggagatgcggcagcggaggaagccgctggtgctcgcctccacgcaggcgctcctcgactcgcttccgggggatcgcccgccgccaccgccgcagaagccggtgcgccttaaggccggcgtcctccgattcccctccggaggtggtggcgccgagttcggggagctcgcgtctttcgtcggcatccctgcccctgctctccgacggctcgcggtcgtcacgggtactcctgtgcttgtcaagaatactgacaataatgttgggaggattgtcaaagcagtattgtttggtaacccgtcccttgacaagtcctgctcagaacatactgaccaagtggtctctgcctctctctctggtcatgcaatgggcttcttaccttgtcgcacgttccctgctattggttttacatccatggatgaagatgttggttatgttagcccacttttggcattcaacttgggattgcatgtttcttgccttaaacttcttattcaaagagaagggcagcctttcaagttctgttctcgagctgaagagattgatgcaactgccagttctggaagtgatctttctcttcacttagaccttcttccatgccctcaagtgcctaaatatgcattgcatttacgagtttctgttgtgaggattcctgattgtggtgtgcttgcttctttaaagatatattcatcctttggaggaagtgagtaccaagacatggtagatcaagctttgaacgagtactttaagtttgataggttcctagcaagaggagatgtttttggtatacaaaacagttggaagtgtggctcaagctgctgcctggcatgcaataagcaggataataaactgaatccccgtaatatgatctactttaaggtgactggcatggaaccatcagatgaacctatacttcgtgttaattgcaatgaaacagcccttgtacttggtggagctgcttctgctgcaatccccccttattccttttttgcttcttctggtaattcagtaccattgcacagtgaagtagtggagcatttagcatctgtcattgcaccagcattgtgcccttcggatattttaccaaaaataaagttttccacttttttatatggcccgccaggatgtggaaagcgcacagtggttaggcatgttgctaaccatcttggtctgcatgtggtcgagtgtagctgtcatgatctgatgacatcatcagaaagtggggcacctgctgcacttgcaactgcctttaaagaagctcagaagtattctccttgtataatacttcttcgccactttgatgcaattgggaatgcatcctcaaacgaaggtccacagtctgagcaatctgggattgcatcgaacattgaatctgtcattaagcagtacattggacaacgttgggttgctaaggattcactgccaggaaaagatgtaaatgggagctcatacctcgtggagcctgaatgtgtaagctctcttcaaatcatactagttgcaactgcggacagttctgaaggaatgcaacagtcaattagaagatgcttccgctatgagatcgacatgaagactatgaatgaagaacagagaaacgaactgatatctgagacacttcaaggcattcctaaagttgctgatgagagtatttgtgacaagttcataaaagatttagcagcgcaaacgtcaggtttcatgcccagggacatacttgcattggtcgcagatgctggtgtgtcttttgcgcataaaattgcagcagggaaagatagcaaagcaatcagtaagcatacggaggtccttccagaaagctcttctgccactcaaaatgaggaacaccatttcagcaaagaagatattatgtcttccttggaacgagccaagaaacggaatcgtgctgcactgggcacacccaaagttcctaatgtcaaatgggaagatgttggtgggctagaggatgtgaaaaaggttattctagatactattcaggtaaattggacttgattcaactgtaaatatcgacagcctcaatagtactcgcaattatgggtgaaaacaagtttttccccctacagtagtttcagcactagaagctggctcgtcaattttggccttttgcaggatattgaccttttcttttatacttgatatttcagttgcctctgatgtacaagcacctgttttcttctaaattgcgcaagcgatcaggtgtcctgctatatggacctccaggaacagggaagactttactcgcgaaagcagtagcaactgaatgctcattgaactttcttagcgtcaaaggtccagaactgataaacatgtatgttggagaatcagagaaaaatgttcgggatatttttgagaaggctaggtctgcacgcccatgtgtcattttctttgatgagcttgattcccttgctcctgcacgaggatcctcagcagattctggcggtgtcatggacagggttgtttcccagttacttgtggagatcgatgggttgagtgacaacagccaggaccttttcattattggggctaccaataggcctgaccttcttgattctgcccttcttcgccctggtcggttcgacaagcttctttatgtcggtgtaaatactgaggcatcatacagggaaaggatccttaaagcacagacacgcaagtataagctgcacaagaacgtttctctcttgtcagttgcgcagcgttgtccaccaaacttcactggtgctgatatttacgcgctgtgtgcggatgcatggtttcatgcagcaaagcgatcagttgaaacattcgaaatcgatccttcaagaagtaatgaagccagtgccgaagaagtcatcgtcgagatcgacgattttatcacggtgttaggagatatcgcaccgtcgctctctctggacgagctacaaaactacgaacagttgaggcagaagatcgaaggaccttctagatgaagttgggtttccactccctgctgacattcttaaactgctaacacaccaaaacattccctgtcttacattttcgttcgtacacaagttttcctccctgaaaacttgggcacttctatatccattcctgatttatacaatcacatccttgtagcagcatctgtattgacatcagaatgacattttctctgaagagaaacatcctgtcattctttgttagcagctccgcaactattctgaatgagcccgtgaagtcaagcactcaaagccttacctgggaaacaaaatgctattcctgacctgaaggaagcatccaccaatacagctagtttgggtacacacgctgaaccagctagttcgcctgggagaggcctctgtctcgtttagatgccatcgtctagaagttgtatcggaaaaattataagcgaatgttgcaatgaacagagttccttgtactgctgtgatttgtcattggtcaaagagaactaactgcagcgtttgtctacctacaatacttgtttttttgttgttgctatcttgtagtgccagcagcgatgcctccttgttggtgctcggcaagtcggctggtgtgagcaaaatccgtacgtcgtcgtctccagtggtgtcattctaaactggatctgctgctctcgagaccgaacaactgcaacaaactcaggcagggactcagcatctacacatcctgttctacggtacggtacgaactgaactaaactacccccatgcatatgatgatacctttctggtgattgtgacacaaatcggctgcatgggaaccatactagctgccaa

SEQ ID NO: 33049 - DNA, 2629 bp, Zea Mays
aaaccaacaagatgttgttcgaggcgttcccctcctccacgcaaccttctcccctccagatccaggattgccgggctccttgactcgttacctcgcgcgccctcggtgagctactttgtttcgatttagcgacaaatcagtttgcttcatgttgcgcaggcttagatctgaatgccggattcttcgtcttacggcttgaatcgagctgggaggctgtggatctgagcacgggaggttctagagctagcgaaatcgcaaggctattagggttcctttcggagcgcgtctgaagcgatgatggctgaagtcggcggtgggatcgggatcttctctgccctgctccactcgggatgatgaatctgctgcgctgataattattggatgaatttcgataattattagatctaagagatgcgccgacttgaagaggcgaggtaaggtgcaacatgtataagacgtgacatgctatagaggcctttgccatggtgggtgcgctcgcatggcaggccacggtaataaaagaagatatttttgtgtcctgggggtggagatcgcacgggggattgttttttggccccgggttctcctccctcgtggtgttccgtgtccctatgtgcattggtctttgcgtggtttgcgatctcagctcacctacacgcttcggatttctgcatctaacacggagatctacaacaaaaacaaacatggagctacaacgagattcttaaggtacaatcgttaatttactgtaacaattaagtttcttttctcatctctgacgccacacttgtatccttatgttctctctctgcacattcaaagaaaccgttaaacccccatgaataatgacattcgacgtccactttgcccagctgtgttgaatttaatagttcaacaatttcagactcccatgaactcagtgaaacaagcgttactgatgtcctaagtgaaattttatgtcgcacttaagatggcgctgcgtctttatttcgttgtatattttattttcaacaactccaatctgattatgtcgtggcatttcatttgtatttatcatgtcaattgggatatttggtccttgtaagcttttggcatgtttgttagttaagccattgcaattgttggacttgtggagggttgcaaaatcgcagtgattctactattcatcatgtcatcatgtgaaatcttctaccacggagcacgtcaatcgtggctgggctgatggacgactgtgctgatggaactgattcgttacgtgggttgaagattttgtgccaaatatgcgatctggttggttactccgccctgctgacgttgttttagcccaggtgtttctgctgctcattccttgcattttttatggcactgtacatacaattggacaacctaatttttggcagttcaactcatttagaagttagaagggtttgagaaacattctcccctagaaatacatggaggtgtatctgatgattgttttttttgttacaaagtttcctagtttaatttgtatgatattctggaaattcattgtgctgtagggaggattttcagtaagcgctagtttgggttagatatatagatggattatgataagggctagctatatagattatgataatctatatactggtaagggcttatggattgtaataatctatatgtctagcccttactgaaatgtaatatagattatgggtttaggcctagcttatggattatataagcacctattatgtagattacagtgtttacagattgaaacggtagaatgggcgagttctgcatttctattaggactagtttttaaactcgaattctttttggaattaccctcaaatcaaacaagctcttagggtggttaggagtggattgaagagaatttgaggctagtcaaaattgaatagaaaagaatttaattttcttcaatcttctctaatgcacatgcaactgaacacggccttgattggtgcctcaaattttagaccatattggccatcattgtattctatttttagtagattatgcatatgcatatactcagtggagtttgaaatatgagtgagataggtaatggatatgggaggtgctggagatatagcattaatacctaaaaattattctcataagttaaggctcctgaatgttgatgcatgtgtaaagggccgttggacccttcatttcggaggaattagagtgcacttaataaagtaggctatttagtgtaaaatttgatattccatcattttcaaagttgaaatataagcttggagggataaaaattggtctctatatttttatactataatttatagtaaaatttgatactccattttccaaagttcaaatataagcttttcttcaattcattaagtggagggataaaatttggtttctatatttttatactacaatttataataacgctccaactaagggcctatgtggttcttggtgttaaaatttagcactacatttttaacacttagattgaaatatgagtgttaaaaggtgctacaagtgaagtgctaaattttagcatctaatagaactttagctccaaagtgtgctaacctttagtacttgttaaagtttagcatataacatccaagcatgtcttcagtatttc

SEQ ID NO: 33050 - DNA, 372 bp, Zea Mays
gggcacgtcggtgaacccccactggcaattccgcgcgccaaactccgattacccaggtgctaagcgaatggaatgaccgcgcgaatatagaggaagggtacaaaccggtgatcattcagcagagcagtgcggcgatgttggggtaggcggatcggctgctccgtgaagtccagcgacgaatcccggctagagtcggccagattccgactggatcatgcttcgcgcgcctccccacgaatcaccggagtttcccccaccacttcctcaactgaatcgatggcgccgatagaatcgcccccacggccgcgcacgggattaccttctaccccgtggtctctctctcacccttcgattcctctctctcatctcgac

SEQ ID NO: 33051 - DNA, 3068 bp, Zea Mays
cccctcgatgaccgccacatttgtctgcccaccctcgtcccctctctcgtctgccggggtctgtaaaatcccagcttctttgttgggaagggtttgtcgtcccacaccctatcttgcttccctttcttcttttatgtcaggtttggtcagcttcttggttccattgtcagtgggaagcaagatagggtgtgggacgacaaaccttccaacaagaagctggattttacagacccggcagacgagagaggggacgaggtggcagacaatgtggcggtcatcgagggagaaagcatgatggataaggatgaggatctgagcagcgacagcgaggacgaagaggtggaagatggacccaaaaagaaaggatggttctcatcaatgttccagagtatttctggtaacaatgtattggagaagtctgatctgcagcctgcgctcaaagctctcaaagataggctgatggcaaagaacgtggcagaggaaattgcagagaagctttgcgaatctgtcgcagctagccttgagggcaagaagctaggatctttcactagaatatcatcaacagtccagacagctatggaggatgcgcttcttcgtattttgaccccaaggcgctctattgacatactgagggacgtgcacgctgccaaggagcgtgggaggccatatgttattgtttttgttggggtgaatggagttggcaaatccaccaatcttgcaaagcatgtgacaccttcagatctggtgctgttgagcagctgagaactcatgcaaggaggcttcagatacctatatttgagaagggttatgagaaagatccggcagttgtagcgagggaggctattcaggaagcaacccggaacaaatcagatgttgttctggttgacactgctggacgtatgcaggacaacgagccactcatgagggcactctccaagctaatcaatctcaatagcccagacctggttttatttgttggagaagcattggttggaaatgatgctgtggatcagctcactaaatttaaccagaaactagcagacctatctgctgttcccactgctagattgatcgatggtatcctgctcaccaagtttgacaccatcgacgacaaggttggagcagcgctttccatggtctacatatctggagctccagtcatgttcgttggctgtggtcagtcctacacggacctgaagaagctgaacgtgaaatccattgtgaagaccctcctgaagtgattgcaccaccgtgttgaagtgcagtctgttatctattgtatccccagtgacctttgtcatcctcatgttggacgtcgtcgtggatttgtaactgtcggagttgcaacaaaacttgtgtgcttgcgtcaacgtgtgccgtcttgctctaataatgcactatctgcattttgaatgggtaaaaaatggatgagtatgcgagtttgctatcatctggatgttaccagattattgctcctgcctctgagcatgcaagcgaaaccagtcacgagctcacttcatgtctggatgtgttggcaagctggaagctgcatgaatgtctgacatgatttcattcagcgtacacggttgcttgcaacattagtaatgagtagcgtgttgtcttgtggtgttggcctctgttcatacgtaagggttctgatccccttgtgtgcaagtctcacacatacaaaaacctgatacatacgcgtcccgcaaacatgtgcccttccgtattcagcttctttattttttgtggccttccttgtcatgtggaatgcaattatgcaggcaatacgtattgcatgtcattctccggtgcacctgcccagttgtggtggactggacctagcaaccctatcaatcaaacaaacaatgtgcatgtcttatatattacctttagccccattatctacagctttttctttgcctgagattcccatccttcaatatatctgtatataaatatattatctatttattatatctctctctctctctctatatatatatatatcagtatctgtacatatttaatatagatgggcaagcgattgccgtgcttaaaataggagaaaccttcgtcgccaaggtaaaagagcatctccttttctctcgtttgtcagatgcctcacggaagacatgtggtttagtgtagatatacagctgctgttacatcttttgagggatcccctatatattccccactccccatcctgctttactgatgtatactgctaaaatatggtcgcaatgcactgccgatcatttccatgaatcaaatgaaaccagaatttggttgctcaatcaggatgcgacattaagatacctatataaaaaaaatcatgagcctttctcttcttgtataaaactagtgctatatatatatatattttttttttcaaaaacaaagcaatatcttagtcgattccatggtacagttactgtacaggagagaatttatcatgtcggttcctggttctctcatctaacttttaagcaattggtatccttgtttagggaaggttcttcatgtattggcttaccaaagttttctcttttctttttttttagctttcttattatatataggcatgttcgttcagaccagatacgatagatcacatcatcactgtttgttatttttctttttgtcagatacagaaggtgagagggagaacctctgaagcttaggtctgcgatgccacctattccagttctatatagattgtagtgtattagaatggatcgggatggattttgaattgctattggaatggaattggtggtattgagtcggtttaaatatatagcaattcaaaatctatccagacctatttcaatacactccaatccatggaattggaacgtctgggtttccttctcttacttccatcgacctggagcctaagggcctgtttgtttacccccatggattatataatctggattatttttggaggattatataatctggattatataatctggattatataatctgagtagtcctgtttgtttacccagattatttgagttgttaataggattcttttgtatgaggaagacaag

SEQ ID NO: 33052 - DNA, 2707 bp, Zea Mays
gatccttgagggctgtgcgggcatacctggtctctccgaattgtccagttttttggtgtctgtccgccgggttcttgagctggcttggggatctgtagctttgagagcttcatcggggaattcctgcggcttgggggggttcttgcggttgtgttgagtggcctttcttgtggaagtgcagagtgattctgcagaagtattcattctactggcgtgctgagcaggtgcaggagctctaataagcctagtgcgcacttcagtcatcagccaagtgattgaaaagggcaagtcagctgaaatattggttccgagggctctgtagttgcttatccacgctcgcctatgcctttgcgctgatcttgacaactcaaagcttggatatggctacttattactcgagccctggcagtgaaagagattcacaaacaatgtactcagcagagtcaggcaatgtatcatatcccgtgccatcagccctagggaactttctttatacgaacaatgcatcttctggaccttatacagaatttagtggaattgtccagcctcagcagaatttcatggaacttactggccatccttcagcaatgtcacatgattcgtcatccaatgaagctaccaacatgggcagttcactcactgaacagcgctcttttggtcctttgaaagatatgagaaatgagatgttgatgcatttgatggatggagcacacagcagtggcagtgatctcatccacaatgatgctcatagcactgtacagctcgaatttggcatgttaaacaaccacaactcaacaagtgttccattagcaccaggccaagggctgtctctgagcctcaatacacatatcttggcgccttcctatccacactggtctgcaaagcaagacttactaacaccaaattcttaccagggtgatgacaacagaatgaagaatatgcagtctgaggcctcacaggcaatccggaactctaagtatctgaaggcagcacaggagttacttgatgagattgtcagtgtttggaagtgtgttaaacagaaaacagataaaggccctgctgaagcaggaaaggctgatggaaaagagactgatggggggattaaaagtgagggggtatcttccaatccgcaagagtctggtgccaatgcagcagctgagctttcaactgctgagaaacaagagctccagaataagatggcaaaacttatgactatgttggacgaggtggataggaagtacaaacactattatcatcagatgcaacttgtaatgtcatcgtttaatatggttgctggtgctggagctgccaagccttatactgcagttgccctccagacaatctcacggcatttccgatgtctaaaggatgctatcaatgatcaaattagtgttatccggaagaaacttggagaggatgacaatacatccggcaaagagggcaaactaacccgccttcgttatattgatcagcaaataaggcaacagcgagctttccaacagtatggtatgctacagcaaaacgcttggaggccacagagaggactacctgaaaattcagtctcgattctccgggcttggctttttgaacatttccttcacccgtatccaaaagattctgaaaagctaatgttatcgagacaaactgggttgacaagaagtcagatttcaaactggttcatcaatgcccgtgtccggctgtggaagccaatgatcgaagacatgtacaaagaagagattggtgaagcggagctagactccaactcttcctccgacaacgggcagcgaaacaaggacaaagcaccatctcccgaagaaaatgaggacctgcagaccccaacaagccaggcttgccaaaccagccagctcggccagtccaaagccatcgttggtggagtgatgggctttagtggagtgctagccggcggcttccacaccgaggccaaccccgacgacagcttcatgagcctgatgctaaaggcccagagacctggtgaaaccgaaggcaccggtctcctccacgatgccgtcgctcaccactcggacgacggcgcccggttcatggcctaccacctggcagagttcgggaggtacgggaacagcagcaacgtctcactgacgctgggcttgcagcacgccgagaacagcctcgcagtcccaccaaacactcagccaggcttccccggcgtcagagaccaagacatgtacaacgccacggctcctcctctcaacgtcgcctccacatcttcagagtatgattcggcgagccaaattgatcagcaacagcaacggcagcggttcgagccgtcacctctgatgcatgatttcgtggcctgaatttcagctcgcccactggaaaacgtgggggaaaactactgccaatttgtagtgtgtgccaggacgaataacttgcctggactgaattttcaggcgtgggactgttagctgtagttaacgattggggatttggggggtacagtacaggaggtatatagcgtaaatgtgatgtaaatttagtgggggtgatagcggtaaagaaatcctgtaaagatggaatgcatttatacgtgtatttaagggccatgctgtaaaaatagatttacctgtaatgagtacttatgatccagtatatatactgtgcacgttgttgaaaccaaaaaaaaaaaaagaagaggggggtgggggtaaactgaaatggattgcaggag

SEQ ID NO: 33053 - DNA, 824 bp, Zea Mays
gacggaagtgcgccgtgaatgggggaaggctcgttgccccttttccagaccgtgcggcccctataagctgtgacggggtcccgggtctccactttccctatctccgcgaccataggagcacagacgcaactgagtggggggccaatcatgggtgtgcgggtcggcggcgtggaaagcttggagtcgtcggcctcaaccgtgcctgcggagtctggtggtggtcggggagcttcgcgagaccacgtggaacgtgtacagatcgtcctcgggagcgattacctgctggcgtggaaggaattgctcaccatcgaccacgggcggccgtggaatcgtcgagcaccgtgggcggaactcggtgtgccgccagtgttggtaagattttccccatcagattcgtgattgttccttctgtgttttagaatcattagataggtcggggaaggctggggcgccgctgcaaccagtcatcgacgagatgctgtcgtggctgtttttgcgcgggcgctgtcggcaagcgggaggtagaagatgaagtcgttgccgtagatggcggcgtcaacggtgcagatgagtgcagcgaggtagtgtagcctggtcgggtgcctcggccgttgatcgagcaagtgacggtcccgattagatcgagatgctaattcgaggaggctgatctcggacgagtgaggatgagttgagggattttaaatctggaccatcagtcgggtaatggtcggcatggattaggcaaagcttaccccttcgcgtgatctaatctaagttgtacaactcggatcggacgactgagaacattctataccccttcgctg

SEQ ID NO: 33054 - DNA, 1794 bp, Zea Mays
ttcagatcagctcaacaaagataaccttgcgccgcctcctaagaagatcaagactacccagccaggttctacagaccctcaaaaccttaatcgttagatcatcgccgttctcatgaagaattccggaggaggcgccgcccatggcgatggcggcgacatctacaatgtccgggccgccgagatcctcgccaacgaggccctcctgctccccatcaatgaggccgccccaatctacgagaatctgctcgccactttccccacggccgccaaatactggaagcagtatgtcgaagcctacatggccaccaacaacgatgaagccgccaagcagattttcagcagatgcctgctcaactgccttcacattagtctatggcgctgttacatcaactttatcaggagaattaacgataaaaggggctctgagggtcttgatgagacgaagaaggcttttgatttcatgctcaactacgttgggaatgatgcagcttctggccctgtttggatggagtatattaatttcctcaagtccatgccggttgtgacgccccatgaagagtcgcatcgcatgactactgttcgtaaagtgtaccagaaggcaattttagttccaactaatcatgtagagcagttgtggaaggattacgagaacttcgaaaattctgttagccgcaccttggcaaaaggcttgttatctgaataccaaccaaagtttaacagtgctaaggctgtatatagagagcgaaaaaagtacattgatgatattgattggaatgtactggccaccccccctacaggctcgtacaaggaagagcaacagtgtatggcatggaaaagactcttggtatttgaaaaggggaaccctcaaagaattgatgctacaacagctaataggcgtatcacctttacttatgagcaatgcctgatgtatctatatcatcatcctgatatatggtacgattatgctatgtggcatgtgaagaatggttctatggattctgcatcaaaaatatttcagcgagctctaaaagcaatccatgattctgaagtacttaagtatgcctttgctgaaatggaagagtccagaggggcgatacagactgctaagacagtatacgaatctcttctaggtgaaaatgctagtgagacctcacttgcaaatattcagtttattcgatttctaaggagaactgaaggcactgaagcagcccgtggcacaaagtgtttttgaagcaggtttaaagaggtttatgcatgagccaggatatatccttgaatacacagacttcttgtgtcgtttaaatgacgatagaaatgtacgtgctttgtttgagagggcactgagcttacttcctcccgaggaatccacagaggtatggagacgatttgcacaatttgaacagaactatggggatttatcaagcatgcttaaggttgaacaaagaaggaaagaggctctatctaggacatctgaagatgccttatctgcatcggaaaacacacttcatgacatagtttctcgatacagttacatggatctttggccatgctcatcaaaagaattggattatctagcgagacaagagtggcttgcgaaaaacattgttaagaaggttgagaaaccagctatgttaaatagcggtagcatgctagacaaaggtgctgcaggatttagtgcgagtgcgaggttattaccacaatctgccaaagttgttcgtcctgagacttctcaaatggttatttatgatccaagacagatgaaagagtgggaaatcaccgtggattcttgggcag

SEQ ID NO: 33055 - DNA, 1350 bp, Zea Mays
atggagatgagggcagccccggacagggctacgcctagaatggtcgcggcgatgagtccgcccacgccggagagggggacgctggggaggagggttgcagctgtggctgtgtcggcgggctcgccgcgaagttcgccggacagagggagaccggcgctggtggagagaagctccgctacagcgctggctgttgaattgattgatgcagaaatagcccagtcattttcacaacaaaggaaacaaagagagggcggtggtcctacatatcatgaaacttttgcttatgctcaagggccgtttgctcgtgtacctgaagcattaagttctaagcctgggcatttatctgcttcccaacagagagtgtacgaggactttgttcatgtatggcatccccacaatcaaaatgtgggagctacaggttctggtctgtctggtgttgctactgtctcgagtactcttggtgtacttcgagcttacagtccaaattcgacatcagcatcctccagtaatttgtcaactgtccatatgggtggactaacatgtataactcagccgacagaactggggtctgaggatactgttatcgcacaatttttgagtaatcctgcccaagttggaccaagcgagtctcctgtcctatttagtggaacagttggtgctgcatctacattttctccattggcatctaatgaccttcctgaaataagtgctatggtgccccctccatcaacatctgctgatcgtctgggatctattttacctgaacctttgaatactggggatgctttggagagatacaaacaggttgctcagaagctggaagccttgattgctaatgatggtaaacatgtggaaattcagtctgttattgcagaagttcctgatatgttacgccggtgtgttagccgtgatgaggctgcattagtagtagcgcaaaaggttttcaaaagtttgtacgataatgcatcaaatagtgcttatgtctcctggcttctagcaaccttaattgcaatacgagatgtctgcaagcttgttgtcaaagagttaacaagttgggtaatatattcagatgaagagaagaagtttaacattgaaatcatttttggccttattcattccaagttgctgaatcttggggagtacaacgttcatttgacaaagctaattgatgggggaagaaataaggttgcaacggagtttgcaatgtctcttgtccaaacattgattacacaagatcctgttagcatatcagagcttcacaatgttgttgatgcaatatcgaaagttctagctgcccaggtaaacaaagaggaaagcattgctaatgaaactacactaattgatccaaat

SEQ ID NO: 33056 - DNA, 213 bp, Zea Mays
ttccattcaggtacgttaattaatcacgtgaagcggaagacgatccaagtcgaccccaggctaatgcagagattggacatctgcgcaagacaacgtcgtcagtcggaccaacctgaagatggacaaacggagcaagtatcggaacaaaagctgatcgccaagtggacgtcgtctaacaacactaacctagtgttcttctaggcaaaccccggt

SEQ ID NO: 33057 - DNA, 273 bp, Zea Mays
gagcgactcttcggaggatgaggtggccccaaggaataccatgggagacgtgcctctagagtaatacaagaacgaatagcaacacaaatgattgttgatggaagatcaagaaacgtgataaggaggggcgcattgaggcctacctcaggaacgcacgtgatgccaagaattgagcaaagcagaagagatgatctggaatctctttgttatgtgctcatgtatttcttaagaggaagggtggctgatcatcagagggtgtccatgacattctaa

SEQ ID NO: 33058 - DNA, 583 bp, Zea Mays
gcggcgggggagactttgcgcgccgacgcggccgcgccgtctcatctgtatggcgcccggtgtctccacgcgctctccactctcccgcagcccgcaggagtgcaggacccggctgccgcaaccgccccgtcgcagcgccaaacatcggtctctgcccccctcctgattttcccaagctagcagcttctactgattctgcaagaatcacaagattcaacaatgaaaatgaagctcaagctgatgcgctgaacttcggacagtcttcaggttggaagttggcctcttctgatgaacactcggtattgtggcagtcattggattctcgtctatagaagggcaccatgcaagcatgtgccgcttatttctttaatttggttccctggctcttgtggagtaattctagcactcagaagatgtttctcttgatgatatatatatacactgtcaccagcaaaacagctgaacttctcatcctagatcatgtccaaaggcagtctaggttcagtgcagatttgtattcatgcaagcatacaatgatatgataatactaacatagtatacgctgctgccagagacaattaag

SEQ ID NO: 33059 - DNA, 1503 bp, Zea Mays
gaacagcctactccagcctccagcgcctgctacgccgtcgcccacctccctcctctcctccagcgtcgcccgctcccgatcgtccaccgccacgcacctccctcctctgtcctctcctccaccccctcctccatctctagggcccgcctccctcttccagcgcccgagcaccccctcccctctcccacgtccagagtcggtctgacgttggcccatcgcccgataggtcctctagcagccaacgttgcctgcagctgcattccagagttccagagtttcagctacaaccacgaagttccaacgtctcctgcagctgctctatttgcacatacattgtttccagcaagcaacagtggaaaagatggtgatgatcaagacatggatgctcatgctcttgatattgatgagttggatgatgattactgatcctagatatcctgggcgtgcctgccaatgagcaagaagaggaagcatctggatccagcgaactcgttgaaagacagcgaacaagtagtcgcctcagatttcataagaggagacgatcttgatgacctattatcgaagcttatcaggagtgtggagattgccaaggcttcaaggggaggcttaccagaaaagatatggatgaagcaacaatttgctatcggcgtcaatgatgtcacaagggttcttgagcgaatgccgcattctgtcactgctcatcctgctcaaatgtctaatgaagcaccaactgtctcaggccgacgtcaagctcctttggtgccattgcaggctgtccttgtagctgccgactgcaatcccaaatggttaacaaaacacataccaacactagcgtctacaaggcaggtaccggtattgtgcgtgaaggacaacaagggaggctcagtaaggttaggccatgtggtgaatgtcagaacagcccttgccattggagtaaaggccaaagatagcgttctcaacaagaccattgatgagttcctgaaagacagtaaactggttgccaatgaaccataaagtaaccccaagtctagtgacacgtttgtactaaaaagcctgtacttccgggcatgcaacatcccaggatcatctcataaatgggtttaagtttgagaagggggtcaagtatcttgagcagattgtggcaatatcaatttggagggacttcttgagagaacagtcatgggaaataggacagactatttgtttggtccgtgcaatattgtttgactggtgaacctagttatccattgtgatctagaacttgtatcaaactccaatgtaacgagatgttaggatccttgtttattgggtacagttttttcttcttctcgaggctcgacaccggtacattaatttttcttgttttttatattctatagtatatataataatgtgaaaaggcttatattgtgatggttaagtctttcgagtagcatcgacgaatttttagcttgattaaaaaatcatctcgttatgccttgccagctcccggattatgtcctg

SEQ ID NO: 33060 - DNA, 303 bp, Zea Mays
ccgcaagatcggtagcgattttctggtccaagcaatttatcgaacacttggggagtatcgtgatgctagcctcgtcttcacctgattcttgggatttattgatgacacacggatgacgacgatcaggagggtgacatatatagagctgtattcgcgacgcgatgacgaacgacgctaaccggcggaattgacgacgcaattgggaattaaaaccgagtgagccgagagggcgtaccggcgagcaggaaaccacgtgagtacaagatatggaaaacgacgggctcgacaacacgcgaagcgacg

SEQ ID NO: 33061 - DNA, 859 bp, Zea Mays
gatatagagtggacaacacgcgcgcgaaaaaaaaaagccaccaacgcagctgcttctcggacacgcgcctcggagaggctcgcgtttgcgcaattgcgctgccagtgccaccggcccctgcccttccccagccgctggtcccacgcgcgtccagcccacgggcaccaccgccgcaccaggcttttagctctcgacgcgtcgccgccgaccacagcacggctagcgtgtcgattcctcccgctctcgtcgccggatccccccacccgacgcgcccacctctgagtccaatggtggcagagatccgttagggcgaggactggtcccagcttgggtcggatgttggattatggctggaagaaataaatcttggtggctacaaacaagtatttcaagaaaatagtgtcaatggagaatatctagaaagcttgtccatgtttactactgagcagattctgcgctttattaggcggtgccatatgaaatggggagactttatcacactgtgcaaagagttgaggcgcattaaagtggcgtgccttaaaggggagcaagaagtccgcaggccatggtgggcgccggcatgcctctccgtagttttcgtgagggcagccaagcagaacaggaagtcccgtgttgtctcgttgaagctggaaccataatgcttgtcaagcacttcgaaccgtcgtgcgctagcctaaagtggagaagttttattcacttatctttgggttagttacttcatgtggaggacttgaagcttagaatgtttttatatatctcttatggaaaggcttcacccttccaattattgtaataagttatgcacttcgagtactatcaggacttgtaataaatacat

SEQ ID NO: 33062 - DNA, 368 bp, Zea Mays
tgacgacttgactgtgaacgacgcaacgacgagctggggcaggatccaagctaataggcatagtatgggacagcgaccagcacgacggatgaaccaagtcgcggcgaggtcgacgaagcgatagggattaaggccgagcaagccgagagggcgcgctggcgaacagaaaaccgcgcgagcacaggacaggggaaacaaccggctcgacaacacgcgaagctattaccagcgacgacagtcgaattggcaacagagcgttggcgaattcgatgaacacgaccacaatcgcgtgcggacgtggtcaagataattgtggctaacgagcttgcgacagaagcgatgatggcgtggcacgacaaactgaaaca

SEQ ID NO: 33063 - DNA, 2003 bp, Zea Mays
agcgaaaagaaatcggctctcgagtcgtcggtcgtcgccgtgtcggtgtcgctcgccatatccccttttccccctcccttcgtctcccgactcctgcgatccgccccacctgaaccctactccacgtcgcctcgcctcgccggttgggttgtggctgagccgatctgacccgatcgggtgggtccttgcgccgccgctgcgtgggctcatctcggtcccccgcctgctcggctcgatcggccggggacggcggcggcggcggctagatctgcgatggagggcaacaaggacgacgcggccaagtgcctgcgcatcggcaagggcgcgctcgaagccggggaccgcgcgcgcgccatcaaatttatgtccaaggcaaagcgcctcgacccctcgctgcccatcgatgacctgctcacctcccttctcaacgcgcaagacgactccccggcttcctcatcatcatcgccgcctccaccaccgcaaactgccgcagcaggggcatcggaggcagctgagactgatgggctgagagagaggaagcacaagggcaagaagagggaggaggaggaggaggcgactcctgctgccagggagtacaccgcggagcagctcgaggttgtgcgccaggtcaagaagcacaccagggactactaccagatcctcggcctggaaaaggactgcagtgtcgaggacgtgcgcaaggcctaccggaagctctcgctcaaggtgcaccccgacaagaacaaggcccctggcgcagaggacgccttcaaggccgtctccaaggccttccagtgcctgagtgatgcggagagccgcaagcgctacgaccttgttggctcggatgagccagtaacacaccacaggagggcctccactgcccgtgcatacaatgggttctatgaggatgactttgacccagatgagatattcagaaacttcttctttggcggtatggcgcctgcaaccaccaggcagtttggacagtttggaactttccattttaggactggtgggatgcatgcccatgcccatgcccaacaaaactctggtggctcaactgtcaggatgcttattcagctgttgcctgtcctactgctgctgttgctcaacttccttccatcctctgagcctgtctactcgctgtcccgttcatacccttatgagcataagttccaaaccccacgtggagttgcatactatgtcaagatgtctaatttcgaggaacagtatccataccaaagcactgagcgagcgacgctggagcggcatgttgagagggattattactccataatcacacagaattgcagggttgagctgcagcgtcgccaatgggggctgtcataccagacaccacattgtgatatgcttaaaaattttgaggctgcagcaaagtaataactcatccaattctgtaaggagactatcacaggctggctctcagcactgtatccaggtctgaggaaaaaccagaaaaggctaagtcattccagccgccaaacccactgtgtttgtgtgttgacaggcggagagagactgctggccactcatgtaaaggcgctgccttagccgccagcttcaagtttgaggggacattttagtttggcttagtagtaaattttgtggaataagtgcctttgataactatacaccactgtccagatgctccctcttagtagtggcaaggagtgcgttaagtagttacttcaaaaagatatgcaagcttcataggggttgatcacatgcaaaccagtgtatgtatatgaagtatatctatctcattcttttaacttttttgaagtgaagactgtagttaaaacagaaatgcaactataacacaaatgtgatattcattttatattagctcgtgtgctgagatgtccaaagatgctaaaatacgatcatcggacatcattccgttggtattggatcttgatgacggattattactattgtgatgatttgaccgattttgtgtctatgttgcgtttggatggttt

SEQ ID NO: 33064 - DNA, 2976 bp, Zea Mays
cccgggcccatcaccataggcaatcacaattccctttcccctcgccgccgcctcgctctctgccttttccacctcccccattcccacccgccgattcactcaccttggggcctcacgcggtcgcgcctccagcctcccctacccctactcccctcgcgcccagggaggagcccgagtcgcggcgagcgaagattccctccgattgctctcctcctagaacttccgatcggctcgtgatggccatgcagcagcacgcggcgtcggcgtcgagctccagcttggggctgcaccttctcgcctcgccctcgtccatcagggaggccacccacaccaaggttttcgtgggcgggctcgcctgggagaccagcagcgacaggctccggcgcttctacgagcgcttcggggacattctcgaggccgtcgtcatcaccgaccgccactctggccgctccaagggatacggattcgtgacattccgtgaagccgagtccgcgagcaaggcctgcgaggaccccacgccggtgatcgatggcaggcgcgccaattgtaacctggcatctttgggtcgagcccagcatcccgtgccccctgggcggccaagatcagctgggtcctatttgggtgtcccagttccaaaggccttctatttagggggttacagccaccaccgaccgtttccacttgggtactaccaaggatttcctgttccccagtacagttacccttcatatgggaccgaatacatctatccacagggtacattaaactcatattccggtcagcaatatcttcctatttatggagtctcagctgcagcgaacacatccaaccaagcatttagccagctgagtccatccgtttccggtggtggcaatggttatttgtcggttcatagttacaacgtgcctggaaatcaatatgtgcagctcactggatccaacttcagcggtgcatcaccaaccgctcgaccttccattcagacttcttttttagtaggtaatgtggtattcataccatgccgcagtatagtaggacctgtgtattctaaagaaactatgacatgcttggtcccaggggcggacccacgttgaaagtagtgggggcacaggcccctgctcaattttttggtttcagtggactttttatgttatttggtgtagctatagagctttattagttaatagaccttcacttaggcccctactcagaatttgggctgggttcacccctgttggtcccttctagaaatctggaaattatttaaggttcgtgtcatatttgtgcatccttggtagtttttagtttctgttcaatgtcacatgctcttctatccatcatgtttgttcttaggttgggcacattttcttcgggccaagattatagatgtgttttctaaattatatcattttatgatgaaatattttcgtttatgaataagttctttatgttcacaaattctttgttttactaactatacgtctatacataacaaacaagatctttcattccttttgtaacaattttcgagctaatttcataaggtccagaaagatcgaaaacacagaaacatgcttggcatatgcagatcattgtgtgtttttttttgcattcctagggcttatattattgattctctaccatgtgacaccagcctcttaaaaatgttcccttgtccagtcgtccttaagattacctgtacatatataggtagtgtttgtttatttgagttgaataagtcacattactcggactacatacactcagtagccaaggtaatcatcacgcaaacacaaatgaaactgtagacatttctttatgtttctagatttgagatttctattttctccatttgtgaataatcacgcattaattggcttctgcagcaacacccgttcctgcacatccacacctaataattccagccccctcaccccagtttacacaagctagtggttcagaccaaagtgcaagttgaactgtgcatccaaacatttgtaccttgaggtacccttagattgcagcaggactaaaaagagcagtgttgctgtattcacagcatttgttcttgcctggcaagcaatcatccttgcattcataaggttgtcgttatcatggtcaacagatgtacctggaaaccatgaagttgcccctatggatggggcaagtgatccaagagtaacagttgctcttgcagtttcgctcagtttaaatcgcaagcgtgatggaaatgtagcttatgctggaatggagtccagcatatgtaagatggattaatccaatggagatcagccttcaggtgattgtgcatctgaaaattcgtgttggtgtgtggtccctagtcccagtcaccgtgcacagggtctgatgatcaagaagtgtgtcctgtcctgtacaagtctgcagtcatcaactcatcaccccgttgtctgcatgactagggcctgtttggtttggtgtctaacttgccacactttgcctaacttttctgtctaaggttagtttttcaattcgaaggactaaccttaggcaaagtgtggcagatttagccaccaaccaaacagcccctacattcatcagcggtcagcctttggaccaaactctggaagacctagctactctcttttcctgagagttaccagtaagtgtatccagttctgtatgcagtcatcatcgtgttgtttacaccactgggttgtagccagtgatgatatgatcattcgtctgtaccaaatttttattgttgcaactaaggtgtgatctagcgtgtagtgctctgtgtttggtggtttcaagtatagagcgcttctcttgtacttcaaaataaacccgtttacccatgatgatgctatatttagtagatttctcttctgattatgcttgtctctttaccaaagcatctctcggatagctatggcataaaaggcttgtacatgtttgaatgagcacacttatcaaacaatagaggttgtcttcttt

SEQ ID NO: 33065 - DNA, 1684 bp, Zea Mays
cttgattcgtatagcacctcacatccaaatatgcaacacatagataaggagaaggtgggaggcacaagaacgaggagatcaagttgcctctgtgcttgatgttggagaagttggtccccgagcagcatgtcgttgccagaatcagtttttcatttcaggtctttcaggggatgacacaattaagaatcgtgtattagaagcactatataggcgcatacttagagcagaaaaagagaaaaggcgcttccgggttattattgtcataccacttttacctggttttcagggtggcattgatgatggtggagctgcgtctgtgagggcaattatgcattggcaataccgaactatttgtagaggacctaattcaattcttaaaaatctgtatgatgtggttggctcgaaggcggatgattatatctcattttatgggcttagagcacatggaagatcagatgatgggggtcctctggtcaccaatcagatatatgtgcacagtaaattgatgattattgatgatcgcatggcattgattggctcagccaacataaatgatagaagcttgcttggatctagggattctgagattggtataattattgaagataaagaggttgtcagttctataatggatggaagaccttgggaagctggaaagttctccctcagcctacgactttctctatgggcagaacaccttggtcttcttccaggagaggttagttgcattatggatcctgtggatgattcagcgtacaaaaacatctggatggccactgctaaggagaataccgtgatctaccatcaagtattctcatgtgttcccaacgatcacatccattctaggtatcaatttcgccaaagttttgctcatcgtaaggagaaaattggccacacaaccatagacttgggtgttgccttagaaaacctggaaacgcaacaggagggagacctggcatgtgccaaaccaatggaacggttgcaggacgttcggggtcatattgtttgcttccctttggagttcatgtgccaagaggacttgagacctttcttcagtgagagcgagtattatacatctccacaagttttccattagggcttgttcggttatttcaatttcatgtggattggtgtgtattggagtgaattaggatgaattttgacttgctatggatttaaactgactcaataccatctaatccacatggattaatgttgaaacgaacaagcccttagtgtttattttcccgcttttggcgaaagtccgcccataggtacatgttatagggttattatacttgtatatgcctagatcgtgtctcgtgcctggatgaataggaaaaacaaaaacaaaggaacaaccatatccttgctagtttcgggtatataggatatgacggccaagatttgtacagatcgtttatcagagttagttcgggcagcagatgttgccctattagatgaattcttttatgcaaaataaaatgcacttaaagctgaatttgatgccttgtagtcttgtacattgagcattggcagattctgttgaaatttgttatctgatcattattgtggatgtggtactttggaagtttctgtgaggcagtgagggcacatttggtatattgttttatctaatgtaatcattgttttataggcaattaaatgtacatgctgagacgaa

SEQ ID NO: 33066 - DNA, 2130 bp, Zea Mays
gttccctcgtcagtcgtcatccattcccaacacagatgcaaaacggggagagaccgggtttataagcagatagtcgaggaaggagaggttctccacacttcacctcgccgataaggctgccgcgccctccctcactcccgcggtcctgctccctatggagtcggcggcgattgggtcacagtctccgctctccttcccctccagcctctgcaaaggaaaagtatcatctagtttatcaatatacaatgtgaagatcaagagcaactgtaggcttgaggtggtttgccatgggatgttagctacaagaaagtttatgcaaaggaaaaagaaagaagaagttttcaaggatggtgctgatgagaccgagcagatgaattggaggagaatgatgagagagatagagcaggagggatcagctgtacccattctgaagacccagcgaaacaggaaagagccacttccacgggatgttattcttgggactcttattcggttcaaacaattgaaaaagtggaatattgtcagtgagattcttgaatggctcagaacacagcattggtgggacttcagtgagatggacttcttgatgcttgtgaccgcttatggaaagttgggggattttagcagggcagaaagggtcctaaagtacatgaacaagaaaggttaccagcctagcgttatatcacagactggtctgatggaggcttatggaagagggaagcagtaccgtaaggctgaagcagtattccgtaggatgcaaacatcaggccctcaaccatcacctgtgacatatcaaattattttgaaatctttagttgagggtgacaaatataaggaagctgaagctatatttgaagaccttcttaatgaaaaaagaacttcttttaaaccagaccagaagatgtttcacatgatgatttatatgtacaagaaagctggtgactatgcccaggctcgtaagctatttgcacagatgtcggagagaggaattccactatctacagtcacttttaatagtttgatgtcatttgagacagaatacaaggaagtttcaaatatttatgatcagatgcaaagagctggtctgaaaccagatgttgtgagctattccctgctcatcaaagcttatgggaaagccagaagggaagaagaggcattggcggtttttgaagagatgcttgatgctggagtcaggccgacacgcaaatcatataacattttgcttgatgcatttgcaatatctggattagtagaggaggctaatacagttttcagggcaatgagaagacacaggattaaagaggatggtctgaagcccaacgttgtggtttatggcactctgatgaaaggctattcaaagttaaataatcttgagaaagttatgcgtgtgtatgagagaatgcggatccagggtgttgaacccaaccagactatatataccactatcatggacgcacaaggcaggaactcggattttggaaatgctgtcatttggttcaaagaaatggaagctcgtggatacccaccagaccagaaagcaaaaaatatcctactttcgcttgccaagacaccagaagaggaacaagaagcgaatgatttggtagggaatggtccagttcagctggaagtgaaacctgatggagaggtggatggtgacgatgggcatgaagttatacaaactgatgccgaaaatcaccgtttgctagacgacacacgagcaagaaatcatgtaaatggtaggatcagagctggtgatgactataattttgatgaggaggatgatgatgacgattacgaggaagaggaggatgaagagttcgatcttgtttctttcaaagataagagaaaactgaattttgcaagttgatgtcataaatctttgtgtatatttttatccaacaaacacatcatcgcatgatggcctttcctatacagagactaacttgaaatgttagtagagtttggctcgaaccttgaaagatgtttctgttagccttgtcttttgaaggaatgtaatttaaggcaggacaatagtggatctgtggcgctggtagtttatcagggcaaggcattatatttatattacttatttacttattatttattaaaacttactcgtgcttggaggct

SEQ ID NO: 33067 - DNA, 191 bp, Zea Mays
tttattaactctttaaactgtgtatcttaattacttgatttacctatttatctaaatcgaacatcacaatatgcgtatactaaattaataacaattatcgcgactaataattctattaatctatttatagatctagttgacaggaaaacgaatcaacttaccctgactaattcgacgcgatagtcgcaagc

SEQ ID NO: 33068 - DNA, 1801 bp, Zea Mays
gggcgtattcctctctctttcctcaacctcatccgagtggctctccgtgtgctgtggcggcggcggcgcccggctctgctcggacggactccaccgaaggctcggctcccctcggactccacctgcgacggccggccctctgcctgcaccgacggtgcccggctccctcggcatccaccagcggtgcccgactccaagaaatgtacaagtcacggctgcaggagctgtgccagaagcggcgatgggcgccgccgttgtacgagcctacccgagagggtcctgcccacgcgcccctcttccgcgccactgtcgtcgtgaatggcgagaggttcagttcccgggatgaaggggagaagtcactcaaggaggcgtacaacctcgcggcgatggccgccttcgacaacctcatcgcgctcccggccgcggcccttgcccctgccccggctgctccagcgccgccctcatccgagacccagcttccttacaagagtcagttacaaatttatgctcagaagcgaggcaaactcctgccttcatatcgtcccattcatggaggttctcttcatgcacctctatttaagtcagaagtaaccatagatggtcaaacatttgagagcccagagtactgtcacacaatgaaggaagctgaaacagttgctgcaaaagttgctctgatgtccttacctcaagaagcaaacccaacacagcaattactgccagggaacaccaaaaagcaagcagagatgaatgctgcaaagtctgcttttgaacatttcaaaaacataaatcatgatgctggatcatctggctctgctaacccacttcctgttgccgctacaaaacagtctgttgatggaaacactctacgtgcaaagctggaagttaacaaatcacaccttgcagagccaagcacagaagttgaagcaatatattcatctacagaagttgacaaactgccacttccagggccaagcatggatatcgaagtaatggactcaactcttgaagttgacaaactgccccttccagagcgaagcatggatgttaaagttgtgaattcgtctctgaaagttgacaaactgcactttgcagagccaatcacagaagctgaagtgatccactcatctctgcaagttgatgaaccgctcattccaaagccaggcatgagctcatctctagagaacacacctgctgtgaatggccactcagcccccatatccccaaccattactcctactctaataagcgtgccaacagcaaccatgcctgtcagcaatgacagatgcggttgctacatgtcaaccaacagaatccaagtctaccctcgccacactgatatggttatcccggaaggcgcggccgtgcttcccatcagcgataatcagtgggtagctgtcagcctaccttattccatggaacaaagggatttctgttgccgtaatccggactgccacttaggaagataaaagcagacaaaaggatggatgctttgtgatgattatatagcttgtgatgctgagcattgcccgtgatgtactaaaatctagtgtaacaagactgccttgcgctggactacgattagtgtccctaatgcggagacttgtgtgactcctattgtatctagattaagctgtacttgtttgactatgtgcggaagtcttgagttacactcctatagtagaggacttgaactctggatggaccatccgcaacatttatcatgatcagacttttttcatacttcctacttgagcttgttgtctttcggaatgcttctgtatgttgatatgcgcccgagttt

SEQ ID NO: 33069 - DNA, 1700 bp, Zea Mays
cttctaagtatcagctggaatggtcaaacatctctttgcggattctgtggataccctctaaacctttcatcttctaaccgaagcacgtctgaagtaggctcctcatataagaagtctctgaagaagggattgatttcattcatttctgttgatctaagccgatttactcaggtggacaaggtatcttgctttcccctcacctggcgcagttacaggccaaaaactaagcttctctgccgaaaatgcggagcatcgatcggctatggatacggtgagccagctgctttgtgcagttttgatccagcaagttcatcttcctccagtacatcccagaagtatttaataaagatccaagcactccaaccttcagacgggacccagtaagtcagatatggaaagagagacaatagatgccagcttacagaactccatcagttacctatctgacgactgcttgctttctatatttaacatgctagaaagcgagtcagagaggagtgcttttggtttgacctgcaagaattggttcaaggttcggaaccttggtcggaaatcactaacattccattgttgttttaaccctgcaatagacaaggagcatgccaagtgcatccctaaggtactggctcactcaccttggcttaaccggatatcccttgctgggctcacagagctacctgactcagctctgagcacgctgagaatgtctggatcgtctctaaaatccctttcattctactgctgttctggtataacagacgatggcctagcacaggtggcaattgggtgccctaatttggtggtggtggaactccaaagctgctttaaaattacagatgttggcttggaaagcctttcaaaaggctggcgtgcccgtgctttgaagagtctaaaaccttggttcttgcatgggcatttcggaccaagggatctctggagtctttagcaactgttcaatcatttgcacactaagcattacaggttgcaggcgtctgtctggtgctggattcaaaggctgttcgagttcgttttgttgccttgaagctgagtcttgcatgctttctccagatggtttattggtaaccttgcttttgctaaaagcctctgcgttctgaatctcaggatgtgtcgctacctcacagatgattagcaatagccagtgggtgcccactgcttgaggagtggaaccttgctgtttgccatggtgtccatttacctggctggtctgcaatcgggttgtactgcaataagctaagagtgctgcatatgaaccgcggccggcacatctgtgaccagagtttgctggccctcggcaatggctgtctgtgccttgaggttctgcattaaatggttgcgtcaagatcaccaacaatggcctggctgatgaagtcatatccattggcccttccattgagaacttgttccggctgcattgaggagaaactgtagttaggttttctaagcctggggctaaaagtttagtagccccgtcccattacagctgattatgtgcattgtgtttgctctagtgtatacataacaagacccaccctactcatgtgggaaacatgggcactgggccagccctttaacaatagtgaatcgtaatatacaaatgaactgagcttatgtaaggtgtatttttttcctaatatgctctggcttgctctggtttactggtgcagcagattacttacgaa

SEQ ID NO: 33070 - DNA, 2720 bp, Zea Mays
tcgcatctctcgccacttcgcaattcgccagtcgccaccggcaccaccacacccaccctcgcggccgcgaacaaacgacccactgaccactggcgggctgcacggcagccatgtctgcgccgaagctggaccgcaacccgagcatccgcgaccgcgtcgaggacaccctccacgcgcaccgcaacgagctcgtcgccctcctgtccaagtacgtgaacaaggggaagggcatcctgcagccgcaccacatcctcgacgcgctcgacgaggtccagggctccgggggccgcgcgctagccgagggacccttcctcgacgtcctccgctccgcgcaggaggcgatcgtgctgccgccgttcgtggccatcgcggtgcgcccgcgcccgggagtttgggagtacgtccgcgtcaacgttcacgagctcagcgtcgagcagctcacagtctcggagtacctccgcttcaaggaggagcttgtcgacggccagcacaatgatccctacgttctcgagcttgacttcgagccgttcaatgtctcagtcccacgcccaaatcggtcatcatctattggaaacggtgtgcagttcctcaaccgacacttgtcctcaatcatgttccgcaacagggattgcttggagcccctgttggatttcctccgtggccaccggcacaaggggcatgttatgatgcttaatgatagaatacaaagcttggggaggcttcagtctgtgctgaccaaagctgaggagcacttgtcaaagctccctgctgacacaccatactcacaatttgcttataaatttcaagagtggggcctggagaaaggttggggtgatacagcaggacatgttttggaaatgatccatctccttctagacatcattcaggcgccagacccatctaccctagagaaattcttggggaggatccccatgatttttaacgttgttgtggtatcccctcatggatactttggtcaagctaatgtattaggcttgccagacacaggaggacagatcgtctatatactggaccaagtccgtgcactagaaaatgagatggttctccgtttaaagaaacaagggcttgatgtttccccaaagattctcattgttactcggctgataccagatgcaaaaggaacatcatgcaatcagcggcttgagagaattagtggaacacaacatacttacatattacgagttcccttcagaaatgaaaatgggatacttaagaaatggatatcaagatttgatgtgtggccatatctggaaacatttgctgaggatgctgctggtgaaattgctgctgaattacaaggtactccagacttcataattggaaactacagtgatggaaatcttgtggcgtcattgctatcttacaagatgggaattacccagtgcaacattgctcatgctctagaaaagactaagtatccagattcagacatattttggaagaatttcgatgagaagtaccatttctcctgccagttcactgctgatataattgctatgaacaatgctgattttatcatcaccagcacataccaagaaattgctggaagtgggcatctggatgaccggtcaaagcccatcctcttctccatggcaagactcgacagggtgaagaacataacagggctggtcgaagcttttgctaagtgcgctaagctgagggagctggtaaaccttgtcgtcgttgccgggtacaatgatgtcaacaagtccaaggacagggaagagatcgcggagatagagaagatgcatgaactcatcaagacccacaacttgttcgggcagttccgctggatctctgcccagacaaacagggcccgtaacggcgagctctatcgctacatcgctgatacccatggtgctttcgtacagccggccttctatgaagcgttcggtctcaccgtcgttgaggccatgacctgtgggcttcctactttcgcgacgctccatggaggtccagctgagatcatagagcatggcgtctcgggcttccacattgacccgtaccaccccgaacaggctgctaatctgatggccgacttcttcgaccggtgcaagcaagacccagatcactgggtgaaaatatctggagcagggctgcagcgcatatacgagaagtacacatggaagatatactcagagaggttgatgacactggccggggtctacggtttctggaagtacgtgtcgaagctcgagaggcgggagacgaggcgctaccttgagatgttctacatactgaagttccgcgagctggcgaagaccgtgccgcttgcaattgaccaaccgcagtagcttgcgcaactgcgactgcgtagcacttggtacaagactgaaacctgaaggaccttcagtaatttaggcgcggcagacggtagccaataaaatgtgccggagctgaactggttttttattatgtacataatggcagtataacaaaattactgaaggcaggtgggttgcagttgtgtgttcgttactgtttactgtattatgtcaagctgtcggctgcaatttctttgctggcaagccgcaggcactggtgaagtgctgataaatacatcatattctgttgacctgtgaagaaacttgttctaggtggattccattgtactagctctgttgcccagcatctccttgtttgggaacattaacaaccagccctcaaccctcaataaaatagtcgcatcatgtagctac

SEQ ID NO: 33071 - DNA, 2133 bp, Zea Mays
gttatttatttaatttagtttaattttggcaagacagtttccctgccaactttgcctttttaaaggctgcatcagaattctcatcaatttgttcttccatttgtattcacagattaatttggagctcaaggtctgtggagggtcatctatccggaaaactctggttaaagaagcagctgcttgtggcgcagcacatctcatccttggtgtcacgaacaattcccggtccttcggatcctccttgacatcagttgccaagtactgctcaaagagagttccagccagctgctcggttcttgcagtgaacaatggcaaagtcgtttatcataaagatgctggtcacgggttgcaacatgaactgtaccaaagcaataccacgatacctgagacaccaaggaggagctaccggaagctcttgtcgaccatgataggggataaactctgggatgagaatggaaaagacagaaggtgtgtgtctcgtgccgtcaccatgccaatgaggtctcccgcacggccaaaagaattttcactggcattagtcccggtgaagggttgccaacacgaatcgccagcggtagcaactggctggcccctacttaggaagaagttcttgccagaccggaaagcttctgcgcctgacaagtccaagatgtctgtggtgcagtgggcaatgcggctcccaagcaggtattcagcagtatcgccagtccattcagaatacagaaccacaaaaccggactccacgagcgccagccatatcctccgtgaccgtgtgattgttccctcaaggagcaattctggaaagtcttgtgtagtgattgaagaattggagaaggaaactccagaggaactgacgttgctcaaagagaaattctcatccatttattcttcattcagttacagtgaacttgcaaagatcacctctgacttctcaccagagtgtgtagttggacaaggaggcactagtcaagtttacagaggctgtttggcaaatggcaaggagctagcagtgaagatcctgaagtattctgatgaggtactgaaggagtttgtatcagagattgagattgtcagttctctcagccacaagaatgtgatatccctcgttggtttctgcttcaagaatgatgaccttctgttagtgtatgagtatttgcaacgaggcagcctggaagagatactgcatggtaaaaaagaatgcaagagcatatttggttggactgagaggttcagcgtggctatgggagttgctcgtgctctggattatctccatagtgataacaacagtcgtccagtgatccatagggatgtcaagtcatcaaatatcctcatttcaaaatgctttgaaccaaagttatcggactttggtctcgcagtctgggctgctgatgtgacatctcagatgacatgcaatgatgttgcaggaactttcggatacttggctcctgaatacttcatgcatggcaaggtgggcaacaaaatcgatgtgtatgctttcggtgttgtacttctggagctcatctctggcaggaaaccactttgcactggttgtccaaaagggcaggagagcctagtgatgtgggcaaattccatcatacagggaggaaagctcagacaacttgtagatccaaacttgcccactgaaggccatgtcgatgaagttgagaggatgacccttgctgcgtccctctgcatcagacaaacacctcagaaccgtcctgaaattgatgctgttctgaagcttctccacggtgacaatgataccctcaagtgggcaagatcacaagtcgggttgtcatgcgagagcagcgatatcgatgaatttgtgatgacaccgccagcgccgaggagtaacaccaacatccagtcctacatcaacctcgcctttgatgtcgatgacgactcagcctctgtcagcagcaacgacttcattgcagccaacacctccttggaagagtatctgaagggaagatggagccggtcgtcgagctttgactgacggacccatggtagtctcatccaaagaggtgacaaataaagtcgggatcatacgaaactgtggctttctttccatacctaaatcaatcatcttttgttctgcacacgttgttattgttcaggactttgttttat

SEQ ID NO: 33072 - DNA, 1914 bp, Zea Mays
caaaatttgtagtgtgccactgttccgcgtcttttctattatataaaagctgaccagtgaccagcatcgggaggagcccggccgcctagggaagcgagaagcacacacagagaagtttcttcctagagagagagggagagagacaagcgcgcgcatggccgccatggagtacagcagcctcttgcctctggcgctgctggcagggtggtgcgccctcgcggcggcgctagtcctggccatttctgcgtggctgcagcggccgcgccgcgtcgcagaggccttccgtcggcagggcgtggacggcccgccgccgtcgtcgttcctgtcgggtaacctctcggagatgcaggcgagggcggccgccgcggcggtggcggaggccgccggcggccgggacttccagaaggaaggcttcgacgactactgcatgaagatcttcccctacttcgagaagtggaggaaagcctacggcgagacgtacctgtactggctacgccgccggccggcgctgtacgtgtcggacccggagctgatccgcgagatcgggcgttgcgtgtcgctggacatgggcaagcccacctacctgcagaagggccaggagcccctctttggccgcggcgtcctcaaggccaacggcgccgactggcatcgccagcgcaagctcatcgcccccgagttctacatggcaaaggtcaagggcatggtggagctgatggtggacgcggcgcagccgctgctgacgtcgtgggaggacaaggtcgccgccgcgccgggcggcgtcgcggagctcgacgtggacgaggacatccggagcttctccttcgacgtcatctccagggcctgcttcgggggcgactactccagggggcgggagatcttcctccggctcagggcgctgtcgggcctcatgtccgagaccagcgtcatcttcaccatcccgtcgctcaggcacctgcccacgaggaagaaccggaggatctggaagctcacgcacgagatccggtcgctgatcctgcagctggcgagcgagcgcaaggcggcagcggcggcgctggcgcccggccgcgacttcctgggctccatcatcgacagcagccgggaccagccgcgcgcggacgacttcgtcgtggacaactgcaagaacatctacttcgcgggccacgagacgagcgcggtcaccgcgacgtggtgcctcatgctcctcgccgcgcacccggagtggcaggaccgcgcgcgcgccgaggcgctcggcgtctgcggcgccgcggcggcgccggacttcgacgcggtcgccaggatgaagacgctgcacgcggtggtcctggagacgctgcgcctcttcccgccgtcgtcgttcgtggtgcgtgaggtgttccgcgacatgcagctcggcaggctccgcgcgcccaagggcacctacctcttcgtccccgtctccaccatgcaccacgacgccgccgtctggggccccaccgctcgacgcttcgaccccggcaggttccgcgacggcgtggcggccgcgtgcaagcacccgcaggcgttcatgcccttcggcctcggcgcgcgcacctgcctcggccagaacctcgcgctcgtcgaggtcaaggtgctcgtggcgctcgtcctcgcgcgcttctcgcttgcgctgtcgccggactacaggcacgcccccgcattccggttcatcatcgagccggagttcgggctgcgcctcctcctgcgccgccgcctcggccactgatgctgatacgggagtgcgagtagagatgttcagatgtttggagttgcgttttgtaaaaaggcgtacactagctaacgtgaaaaaaaaagtaagtgcgtgcaccgttgaacacacaagcaacaaacaacaacaagaaggttatacgtacatgaaggacggtaataaaatcccac

SEQ ID NO: 33073 - DNA, 274 bp, Zea Mays
cgggacggctcgtttcgcgtttacccctatggcgtggtggtggtggtgcggattggcggggcagacacggaacatgtcgggcgcacatgggagagcgcgtgcgctggggcggaggagagccgagagctagggatggtcagtcaaccggcacatgcccatgccgccgcccgccgtccatccagcgtccacgcaccctggtcgacgcggctgtttccccgcaccggcgtcgttcgccacgacacctctgcggggacccagcatgccgggcggcaac

SEQ ID NO: 33074 - DNA, 4132 bp, Zea Mays
acccctcaacgtagcactgccctcttcctctctgtcctctcccctgctgccgccccctttcccaaatctggccgcacgacgcaccagccaccaaccgcacacaccccaaacttgaaggcacaacccgagcgctcgcccgcctcgcctctgcgccgcgtccggccgccggtagcgggccggtcacttaccgggagggagaggtgctttggttcctggatgagctgtgaaggaactgggagcaagaagaattgatgtttactccgcagggcaaaggatggaccggctggtcgacgccaactccggccaaccagcggagcggtggtggggctcctgctgcgtcggcgccccttggaaagggcaaaggaagggtcgccgagctcgagcaggagttgcatgaatatcagtacaatatggggcttcttttgattgaaaagaaagaatgggcagcaaaatttgaagaaatcagtgaagtgctgacacagaaagaggagatactgaagagggagcaggcggcacatctgaatgctatatcagagtatgaaaggcgggaggagaacatgcggaaagcactaggtgttgagaagcaatgtgtcgctgatcttgaaaaagccttgcgtgatatacgagcagagatagctgaggttaaatttacatctgagaaaaagataacagatgctcagtctcttgaggctagtttggaggaaaaatccttggagatcgagggaaaacttcatgctgcagatgccaaacttgcagaggcaaaccgcaagaagtctcaagctgaccgtgatttagaagaggcggaagctcgtcaacgtagactggagaaggagaaactgcggaaggcccgagaaaagcaacttaaggagcaggaggaatcactgcaggaatgggagaaaaagctgaaggaaagtcagaatagacttaatgagttgcagagatctataaatgagcgagaggagagagcaaataagaatgatcaacttttcaagataaaacaggacgaactggaggaggcacgaaggacagtggaggccgctaaagttactctgaaagtcaaagaggatgatattaacaaaagactaaatgaattacatttacaggaaaaggatgctgactcaaagcgcagtgcattggaagagcaggggaaaaaattggatgagagagaggcaaaggtcactaatagagaaaaggaggggctccagaagcttcttgaggatcatcaggtggagcttgaatccaaaagacgggattttgaattagaattagagagggaaaggaaatcttttgatcaaaatatgacacagaagcaagcggatttattgaaaagggagaaagatgttaaatctttggaggctaaactttctaaaagtgagcaggcattgaatgataagaagaaatcaatggaaaacttgcagaatgatcttgatgccaaatctaaggctctgaagagttgggatgaatcattgaaaaatgacgagaaaaggttactgaaagaaaagcagcaaatggatcatgaaagagaacaattggagacatacaaattggagcttgaaaagatcaaatcagcattagaagctgagaaggaaaaaatatcagaagagcagaataatctgaaactcacagcgcaagagaggcaggagcatagcttgttgatagcaaaacttaagaaggagattgaggaatacagaatgcgaagcaactccctatctgaggaaatggaggatttaaggaagcaacggcagaaatttgaagaagagtgggaacaactagacgaaaagagagccctccttgtagaggaggacaaaaggttgaacattgagaggatgaatttagaacggtggcgtgacaacgaagaaaaaaggttaaatgatatgaaactcaaaatggatgaagaatacaagcagcagctggagagtcttgagcgcaaggaaaaggctttgagtgatgatatgaagcacaagcaaatggaaaatgatgaatttctgaagggagaacgtgctgatgttcaacgtaaattgcaactcaaacggcatgaattggagatggagatggagcaaaaacaagccacgaaggagaaggaactggaagaaaaggaaaatgagttaaataagaaaatagattttgtggaaaataaactccgacatgcaattgagttgaatgagtccaagattgagaagttattattggagaaaagggaggtgcagatggaaagagaattactgctggaggaaagaaagaaaacggagactgacaaggcagatattagaagggatattgagagtctgcactcattgagcaagagtttgaaggaacgtcgagaggcatataacagggacaggagcagactcatcgaactatttgaaaagtacaaggcgtgcaaaaactgtgggatttctatttttgagggattggattctctgctgcttaaagacagtgctgaaattgagcatccaagtttggctgttgagggagatgatcatgccttgaccaccgatacatcaggtccagatacaggaacccttgttaattcaggtggtcgtttttctttgttacagaagtgttcaaggcttttcaagttctcccctagaaaaaagggtgagcagtcatcagaacaaccatcagagaggaatatatcttttggtgcaagactcgaggaagcaacacagagcgatggagattatgtgccaactcctgtctatgagatagcccacgattctttcaatgcagaggatgagctcccttctgacggtgaaaccagggagaatgaagagtctgaaaggcatgacatagctgataatgcccagatggagtcttctgttggtgtagcagataacagtatagatattctcggtactaagtcatttgatggtgctaacgacatggcagttgaagcaactattgtctctgttgatcaaaatggcgaggactctgtagttcctgctgaagcaggtgtagagcctgaaacatcagagcaaggtcggcgccagcaaaaccagagaggcagaagaaaaggtggtatgaaaagaacacggtctgttaatgctgtagttgaagatgctaagatgatacttggcgaggtttttgaggagaagactgatgatcagggagatacagtcaaggtgggtgctacacgaaagcggcggtttgctggagctacaataagtgaacaagatgaagaagggagcgaagcacattcagaaagtgtttcacttggagggcagcgccgtaagaggcggcaaactgctggggcagtgacagatgccccaggagaaagacgttacaatttgagacacagtagagctgcaaatgctggcgctgcaacagcccaagcagacaaaaaaaaatcttcaaaagcaagaaataaacatacagtagaagcttctgctgatgacaccgaaggaacatcaaaggttgttgaggaacctgcccctgagagcaagagggtatctgaatctgcagactacgatgcatcccagttgcatgagttttcccaggttgaagttggtgatgcccatgctgtagacggtgagggtgctggtgaggaagatggtgatattttggatggccaagatgcactgcctgatgtgccaatgacaccttctggaagcgagtttggagcggaacaggaagatgaggacgatgatgattcagagaggcgaaaccaatcaatcagcaagaagctatggtcattcttcactacatgacttgctgaagaggtcgtcatgtaggttatttctagcttttgtggtttcgattcatgataccccattcttggaactgtaggtcgtgtgcttttggtgattatgtactagatctcccacttgattgtgcttctctcccgtgtaattgaaatatatttgtagtggacatagtttgatggcactcacagaagtagctgatgagatgtacaatggcgatgatggtatgccctgtaaggctgtaacaccagtagcttggtttgtaattgttcttttcccccggttcgtgttacttcgttgaccttattccggggaaatattttagtgctgtgatgatggtctaaatgtttgttcgcctattgaaactaaatacaatgaattagaataccacagtccacaggagcttcggagacttccatcgtcaagattcc

SEQ ID NO: 33075 - DNA, 2203 bp, Zea Mays
tagtcccgacccgtcccaccctatcagttgcgggcgcgcgtccctgtttcgctcgtgccgttgcgctgcgccaagcctccccacctctctcgtctcttctccacccgccgccctcgtgggagtgaaaccctagctagggttctgcccgccgccgccttcgatcaagacgcctgcagccttagcgcgagcccgccatggacacaggacgcaagcgcatcgcgccggggggcgccaacggcgcgggcggcccgaagcgcgcgagagaatcggagacaactcaaatgggtgtaggaagcaaaaccaagccgtgcaccaaatttttcaggttctaatctagcttaaaatgaactctcatctggtaacatctactatcattatatgctattccttttaattaaaatttgctatgttattaaatgatgtgcttgatgctaacaaatgggtcagcctagattctgatacaggttggttttgtctaatcattgcttaagaacactcaacggagtaaaaattggaatctactgctgtttatcactgaaaactgatgcaacaagggaacatactgctgtatatcactgaaaatctgaaccatccaacaatggttacaaggaaacaaactccctctcaaaaggaacaatcagtcagtaacaccatggaacaggttcacttgaagaaatcaagaagattagattgaacatggggactgtgattcagttttttgtgaatcgtccagttatttgttcaattacacttatcaatatacattgcagtagtagtacttttgaacaccaatatctttgaacctcgattatgtatcccatctttatcaagcatgatttgtataagattggttcgaatcatttacttcagtctttatgcattcattgcacatatatttttagcagtcatctagtgaggttacattatccagctgcatgcaacataatctcttcaatcaacatttttttgcatgtgtatcgactaatatcagtctgtaggttgtcagatatatttgcatgttctgttgcttatattatgctttcaatttgcagcactgcgggttgtccctttggttcaaattgccattttctccataacttcccgggtggctacctggcggtttcaaagatgaccaacttgggtgggccacctgttccggctcccccaggaaggatgcctatgggacctggtggtcctgatgggccaccttcacctgctctgaagactcgcttgtgtaacaagtacaacactgcagaaggatgtaaatgggggagcaaatgccactttgctcatggagagagggagcttggaaagcccctgcagatggacaactcgatgggagctcctccaatgggtccagggccaaacggtcacttcatgccacctccaatgcctatcccagacatggttcctcactccacattcggtgcttcggccacagccaagatcagtgtcgatgcatcccttgctggcgccatcattgggaagagtggtatcaacacaaagcatatatcccgagtgactggggccaagttagccatccgggacaatgaggctgatcccaaccataaaaacatcgagctcgagggaacgtttgaccagatcaagcacgctagcgcaatggtcacagagttgattgtccgcatcagtggtaaggtgcctccacaagcaaagaacaacccaggcagggggcctggttctcatgctgggggtcctgcaagcaacttcaagaccaagttgtgcgagaacttcaacaaaggctcctgcacctttggagacaggtgccactttgcccatggcgaaagtgagttgcgcaaacctgctgctgcttgatagatgtgtttagtgtggcttgcggtgattactctgcctgtgtggctgaataacaccacagtcgcctatggtgagatgtactgggccacgtgctgcctgagagagatcatttccatcgcttgcgtagagacaatggccgttttttaggatttgtaggattgccgtattgttctgttcgatttatatctaaccctgccagaatcctatttttgtaccgtttcttagctactaattggtgccagatcattgtggttctgttgactcgagaatagttgctatcgatggtatgggtttgtgaattattgatagcatttttgaaatccagatagctaagctgaaatccagacatcattagtgttcagttgatggt

SEQ ID NO: 33076 - DNA, 2127 bp, Zea Mays
gcaacgctcacacccacacccaccacgccggctgcaggcacgcaccacggtaccagccgccagcgcacgcccgccaagccgccagcgagaaaacaccgaaccattcgccctcccggccgacatcacgaccgcccgatccggccggagcctctccctaccccttccgcgcctccgcgctgacgaccgtcgcggcgtccgcccctcgagtccaaccccaattctgccgtggccgcggctctctgaatccccaattttttcacttcccccaagggccgcggggatgaaccggatcccgtccgtctcgctgcggggcggcggggcgaacgaggacgccgcggcggcgtcgccgccccccgatcccgcggcgctgtcgcggtgggtgcgggccttctgtgtcatccggttcgacctggagcgcgggcagctggtggaggcctgcttccctcccgacgcgctgacggcgcccggcagcggcctcgaccgcctcgtcgccttctcgtccttcccggactccatgtctcaccacctcccgcgccaccgctcctccgtccacgactcgctcttctccttccgcatccccgacccgtcctccccacgccgcgccttcctctacggcttcgttttcaaccgccagcgccaggacgagcgcctcccccgcggcggcgagcagaagtccgtagtcatcctctcccacgccccctactcctcgctcttccgcctgctgctgcagatcctcggcccgctctgctttgacgtcggcccttccgcactggccatggtggcgtcgcacgttgccgtgtggccggcgccggcgccagggcacccaatggagcttccaattggcagtgccgcgctgcgcgtgcacctcccgcctgcggctgacgatcctggcccaccgcctgcgctgctgcccgccaacccctcggtgccgtacggactcttccatgatgctgatctgtttgccgcattccgtggcttactcctccacctatggaccctctgggagctcatggtggttggtgagcccattctggttgttgcgccgtccccagctcagtgctcagaggctgtgtctgcgcttgttagccttgttgctccgcttttgtatagtgtcgacttcaggccatacttcaccatccatgatcccgattttgctcgcttgaatgtgcttgcggaaggcgaggtgttcccgccgatggtacttggagtgaccaacttgtttttcttgaagagtcttaagagcattcccaatgtcgtatccgtgggaagcccaaatccatattcaacaagggtgttaccagtgggtggccaatcgccaggaaatggaatgaatgggacacctgggaaactcaagcttgagaaacttgcaatcaataagttctctccaactagcctattgaattccatcaaattgagaagagaaggtcctctttctctcatgacagagcacaaagaagcattatggagcacgtattcaccaaccacaaagcccgatacttctgttctaaataggctcattgacgctggtgtgtcaccaaggattgaggagtccatgtcagtagtcaacaatgagatattgcggcggcacttcttggagttgacgaccaacttccttgcgccttttgggccgtatctgagaactacaacaccatcagaagggacttcaccttttgttgacccaccattgctaccaccgtttcatgcagatgagttcatcaatggtttggcagctagaggtccagggaagtttttgtccaaaaggatgaggtccaattggttggacctatataggagatttctcgaaggccccaattttatgccttggttccggcaaaggcgtgctgctgcggagcaagaacagcagaggctctggaggcaggctcgcatgaatgttgacattgaaaagctaatgtcaaatatgtccgaaatagagaggattgattcttttgatgctgttgagcgttatcttctcagagagatggaggttcacattgatggtttatagcttagcttttagcaattcaccatctttgatttgtgtttagtaatcccttcactccaaattataagactacttgttttttatacattcatagcttttgctatgaacttatatatacattatat

SEQ ID NO: 33077 - DNA, 2137 bp, Zea Mays
ctgttgatggtggcggcggtggaggaggatatggaggtggcggtagtggaggctacggcggcggcgggggtggaggtggccgaggcagtggcggcggagggttcggtggtggaggacgaggaggtggtggaggtggccgaggcggtggcgggcgcgggggtggacgcgaaggagactgggtttgccctgacgcgagttgtggcaatgtgaactttgcgaggagggctgaatgcaataagtgtggagcaccttgcccaagtggaggtggtggcggcgggggtgggggttataatagatctggtggaggtggtggaggatacaaccgtggcagtggtgattatggttctggaggtggtggtttcgaccgagatggtggagactataattctggtgggcgtggtggtggaagcgggggtggaggaggctacaatcgaagtggtggcagtgaccgtggttttgatgaccaccgtggtggcagaggtggcagctatgggggacgagatcaggagaaccaaaggggtagtgaaggtggctacagtgctggtggctatgggcaagctcctccacaagctcctccttcgtatggtggtcctgcgggtgattatgcagcacctccgagctcctatggaggcaacaatgcttatggttcagattctgcagtgccgcctcctaatagctacagtggtggcccaggctcatacccaccaagctatggtgccccgcctccacaccaatatggtggtgccccaggggggcaagggggtctgcctcctacatatgatggtggatatggtggtcggtccatgcctgggggtggaggatctgggggtgcaccaccgccttatcatggtggcggcagcggttatactggtagtgctgaccctgaaccagctggaaaagttaagcagtgcgatgaaaattgtgacgagacatgtgacaacgcaaggatttacatctcaaatttgcctcctgatgtcactgttgaggaattacaagagctatttggaggaatcggccaggtcggaaggatcaagcaaaagcgtggttacaaagatcagtggccttggaacataaaaatctatgctgatgactctggaaaagccaaaggagatgcttgccttgcttatgaagatccttctgctgctcattcagctggtggattttacaataattatgacatgagaggttataaaatcagtgttgtgatggctgagaaatcagcacccagagcggcaccctcatatgggcatggcggtggtcgtggtggtggccgcggtggtggtggacgcagggataattacagagatggcggggggcatggacccaatagaaaccagggtggtggttcacgttcacgaccatactgaaaacaaaacaattgttgttactgtgattgtcatctatgagaaaccatttctattcctgttatacagatttgtactcatacaggctcataagatggatataagctccaaatgctggtaggtttgtgatgttatttcagccggtggatcactcatgtaagctttggattttgctgcgaagaacaggtagggaggttttgttctgtgttaggtttattagatttcgtgtacattagacgacatatcaaccaccaatcatagaacgttccatatccgtttctgcttctgggcactcagcttattttggtgaaagagccaatttttttatcaaggttgcagccccatcacttgtgccctaactcatcgtccccagcaacacgatatgacgtgtgttgaagtggtgatctataagtagaaaaggagctgaattgagtgaattgttgcttcatctgcccccgtgatgcctctcgaattgggactgggagctcgtgacttacagcacttgccacgaatgggaaaccctctgctccaaaggaagcagttcaagcatatcgacgtgcttgcagggtcatcgctaaaaataatgtctcgaccacatgctaagattggaggttgttgtccgattatatatgttacaaaatattacatatgtgatcaatccaaggggtgtaacagttttctcaaagggacacactccttgggatacgctccttcacttgtatataagtgtaatgatctctggaatacaatcagtggctgtcacattctctcca

SEQ ID NO: 33078 - DNA, 7993 bp, Zea Mays
cccctgggtcccctccaccgcccgccggcgttcccacttcaattcgcccagcgcccctttctcctcccgaaaggcagggcaaccctacaaaacgctgtctcggcttcgccgtccagcggaacagtgtacgggagcagttcgtcgcgtgtgtcgcgtcgcgttgcgttgcgccacccactaattcgaacggacgggactgggattcgaaatttcgaacacgcgccgcctgagagagagagagagagtgagagaaagagagagagagagcaggagagatggtcaggcctttgtgatctcccgcggggctggaggtgtgcggggatggatctcgcggggatgaagcggcgggagctccaggcgctctgcaagcggcacggcctccccgccgggggcaccaacgccgacctcgtcggacgtctcgacgccgtgctttcggggcccgctgttgtggaggaggaggttgccggagtgccggcgaggaaggggtgtctgaagcaaacgggcggaggtgccaccgaggccaagaaggttacttttggggcggaggtagggaaggccaggagactgaggtctcgggtcatatggtcgccggtcgttgccaagacaagggggaagtctgctcgagccgatgtgggcgctgatgtcccagtgaggcggtccaggaggaattcgttcaatcctgccgaggctgaggaagcaggagaggctgttgctgttgacaggaagcccaagcgcaagaatcaggagaatgacgagggcgttgctgttatcgctcaggctagagttacgagaaggtcaaatttggagtggtctgctactgtattgcctcctgctgttgagaagaagagagggaggcagaatgcagctgagtctgatgtgcagaagtccgctctggtggaagtaacagctaggactacaaggtctcgctcaatcgtacctgttgtggtgccacccactgtggttgagaacaagaggaggaagactggagatccacaaacaactgtagagttgactatgctttcagatgtgcccagaagtgattttcctgccaccaggtctttaaggaacaaaattgtccacgttaacaacagcgtcgtggacgaaactcacactaccaggcagttggaaaacaagatgcgtccgtctactcgtaggcatcaacaggttgcatcttctccggaggataaaggtcaaaaaattcctgctaccagtaagtcccctctactgaggtggtcacggagaaactattctgaggccaatagtgcaaattcagtaaacatcaaattggccaaagactcgagcacagctcagccattggcacaccataattctcattctgaagatttggagaaacaaccagcagttaaagaaccaattaaacggtcaacacgtaaatctattgctttggctgcacttgagaaagagaaggatgtaattgaaggaaagaaccctgaagcacatgttaggcgatcaacgaggaaatcagttgtgcaggttaaagataccaaaagtattgttgaagagactcaatatgctaacagtgaagatgtggcgaagcaaccagcaactaaaggacctgctagggggctgagacgtaaatctgttatcacagaattgcatgagaaagagaagagtctcattgccgaaaagaacatggaaacagatgaagcgatattaacgcggaagcctgtaatcccagttaaaaatattaaagctgttggtgaaggaattcaaattggtaagggcaaagatgtggataaacaatttgttgtgaagcaacctactaggcgatcatcgcgcaaatctgtgctgcctgatatgcttgagaataatagtggacttctagcacccaaaatgaatgctgagatgaatgttaggagatcaacacggaagtctgttcttcctgacatgcataatgagaagcaagatcaccataaaatggctagaaatgagaacttgcaaagtggtaaatatcaagatggtgagaagcaacagaaagtaaaagattctattaggcaatcaaggagatctatcgctacagtgctacttgagggacaaaataatgatgaaggaaaaaagttcaaaaatcctacgaggaggacaacacacaaatctcatgcccttaatgcagttgaagaggtcagcatggatcacattgaagttggtgaagaaggcttgaaattgaggaagcgcagtaggtttttgctggaaatatcatcttcagctaatgtttcctggaagcatcagaatgcacagatctctaatgaaaaagataacacagaaggatcgcagcaggcatcaaattgcacaacttcaaagagaaggtcttcaaagaagagacgaacaactgctccagaagaagtgatgcctttcaaggtggcaaatgatgacatagttatcatggaagaaacaaaggacacacttgaatataataatgagtctagtagtaaagttcaagaaatttgtcaggttaatgctgcaagagaagagttctcttcaggtccattgcttgtaacagtagctcctagtgacgaaatttgcacagtgcagagtgtagctgtggtgatacctgggtcagaatctggtgacgatgcaaatcaaagttctgataagagtaagcaacctcaggaacattctgtcactcaaactgttgatgaccatttatctgaaacaagaagtgggaaattagatcaatcaacatgcatcacaggattagtctctgacaattgtgttgtctcagaggacaaaacattgatgagtgaaggtgagggagactttgttggtccaaaatcaccaaatggtttatcaattagtttcattgtcgcagaccgtgaagagcaaagccctgtgtccggagaacagagagttagcttggaagcaaatgccaatgagcctgaggaaaagaacctagctaacgtcacatcaactgatctccacaccaaaagtctgcagcatgatattgacagaatagctaaagagactgataaagatgttttgtctttggttttccctattgaagagcatgaagaaaaatatggagtgagccctatagctgttgaaaagtgcgtctgtcgtgaagcaagtgcatgtgaatctgcacgaaaacccctaaccgttatcttttctaacaatctccacaccaaacatctgcaacatgattgtgatgtgctaattaaggagactggtgaagaagttttagctcaggagaattgtaatgaccagcctgttcctgcccagactgaccaagaaattaagttaaacgatgaacttgctgatccggatgttttagctcaggagaattgtaatgaccagcccgttcctgcccagactgacctagaaattaagttacacgatgaacttgctgatccggaccatgaagagcaaagccctgtatccggagaacggagagttagcttggaagcaaatgccaacgagcctgaggaaaagaacctagctaacgtcatatcaattgatctccacaccaaaagtctgcagcatgataatggcagaatagctgaagagactgataaagatgttttgtcttttgttttccctattgaagagcatgaagaaaaatatgcagttagccctatagccgttgaaaagagcttccgtcaggaagcaagtgcaattgaatctgcaggaaaacccctaactgtcatcttttctaacgatctccacaccaaacatctgcaacatgattgtgatgtgctaattaaggagactggtgaagaagttttagctcaggagaattgtaatgaccagcctgttcctgcccagaccgacctagaaattaagttaaatgatgaacttgctgatccggatgttttagctcaggagaattgtaatgaccagcctgttcctgccaacgagcctgaggaaaagaacctagctaacgtcatatcaactgatctccacaccaaaactctgcagcatgataatgacagaatagctgaagagactgataaagaccatgaagagcaaagcaatgtgttcggagaacggagagttagcttggaagcaaatgccaacgagcctgaggaaaagaacctagctaacgtcatatcaactgatctccacaccaaaactctgcagcatgataatgacagaatagctgaagagactgataaagaccatgaagagcaaagcaatgtgtccggagaacggagagttagcttggaagcaaatgccaacgagcctgaggaaaagaacctagctaacgtcatatcaactgatctccacaccaaaactctgcagcatgataatgacagaatagctgaagagactgataaagatgtttcgtctttggttttccctattgaagagcatgaagaaaaatatgcagtgagccctatagctgttgaaaagagcgtcagtcgggaagccagtgcatgtgaatctgcaggaaaacccctaactgtcatcttttctaacgatctccacaccaaacatctgcaacatgattgtgatgtgctaattaaggagactggtgaagatgttttagctcaggagaattgtaatgaccagcctgttccggcccagactgacctagaaatgaagttaaacgatgaacttgctgatccggaagttttagctcaggagaattgtaatgaccagcctgttcttgctcagactgacctagaaactaagttaaacgatgaacttgctgatctggctatggaatcaggttgtagcattactgaaaggaatgaagggcttgttgctcataatcttgatcaagaaggtttccttgaagcaacaccagagtgcaaacaggaatgtggtttgcctgaggagacagtaatttcctcaaaagaaacaggatctctgctgtgtgcagatcaatcaccaattggtctggaatctttattttcgcaagaaagcatagttgaatcagtggggcattgtgcacttgcttcagcaacaactcataccgaaaatggctttgatgattcaaaagattgccataacaagtctgcacttgaaaatgttcatgtgccagaaccttgttcacacaatgatactaaaggaggcatttttaaaaatgttgattgtatgcatacatcccagcgagatgatagaatggaaggagtaccagaggctaacactgatgaagaacatgttctgtcagcctttttgctggatgcaaatcacctaaacgtagtcattaattctgaagaagtggtttgtgagggtgaagatagtaaggagcttctccattcggaagactgtaaagcttcatccgagaaaacagatgtgaatgatggcaatgtatatggtattagtgatgctgtagtgagatgtgcactgcatgctccagccgatgataattatgagatttttttgggtcccaatactgatgtaccacgtcaggtttataatgacggatgcagtgatgtcaaagaagatcgatttgcttccaaaccctggacaattgatattattgaggatgcctctgtcaaagaaagatcaaatttaaaagattggcaacttgattccaagttggagggcacagaaatagtggaatctggcctttacttcaataaggatattggtaacattttacatagtggatctattggtgaaataactccatctggttctggtttatcaaaagattcatctgtggactatagaggggaggttttagatggcttctcaatggaagcatctcttgaaaggtcttctacacgtggggaacaaaatggttgtagactagatgctattgagaatccttcaattactttagcaacttctggttataagcatgaaggtgctttatctgaggaagcagtgtacacaaagaagaattacgctggaacatgcttgtcaaatcccagggaattaatcatggagctgcaatcccatttctcaaaggaaaacataaatgaatctgatcctcatgacagccttgtattcccaactgctgaaaattcagcagatgaacagctggttaaagtacaccatggttctaatctgtctcagttaggattaactgatctgttggatggaccaattgggtgttccaataccgacgtgttgtgccagtgtgacaatcataaaaatcaatccaatgaggacaaggtagaggaagttgaggcggtgtctgctgctaaatacatagaaagtgaagttgtgctgctcccatctcaagagagatcaaatttgaataatgagcagcttaacaccaagttggaaagcccaaacattatgggatcttgccttaactgtgataacgatgtttgtaatacttcggacaatggatctgtttttgtcattggtaaaagaactccatctgcttctggcttaccagaagattatcctaaggatagtgacttgcaacaaccggttttagatagcttctcagtggtttcatcttttcaagacaatatatctgggaagaaaactgtttctggtgtagcaggcagtgagattctttctttaagtttagcaactcctgattataaacatgaagatggtttctctgaggaagcagtatgcagaacaaagaattatactggaacttcctcggtagatccgaggcatttagacatggaggggcactctatttactctgagggagatacataccaaggtccttgtcaagatctaggcagacatgaagaacaagagagctgcatgtctattcctatgcaagccaaagaaagtggaggggttttgaggtctagccacacgaaagggtcagttacagcagcccaaattgatttggcaggtgatgcccatcttattgtgagtgataatgctgctgccaagcaagtgtttagtgaggagaaagaggaaacaaaatctatctcttcttcagatattgatatccttcatgaaaaatcatactccagtggacacgatgaccatgctgcttgtgctgccgaaactcagttctaccatccacagaaagcatctatatctgatggactacatttgggtcctagttctttgcaagtagaatcactggatgctttggatagcgatatactgtatgttaacacaggagttctcgagcagcatcataaagagggttactatgaacccagtgtctaccaaatcacttcaggcatttgcacaatgtctgaagctgaaccattcgaagttttagaaactggaaaagatgtaaaaacgccatctaagctagatgagcaacttaatcctgggttggacggagatgaagctgagaaacacagcttagactgtggtacagacaccagtcctgtgatgagcaagagaaccctttcttcaccaggatcaggaccatgccagcagtatgtaaatgaaagcaccaccagtacacagtcgactgataatcacccaaacgacctacccgctccgagatctcctgaacaatccgcgtgttttcagaatgacaacgattcgggttcagtaggcatttgtcaaagcagcaggcgaagaggtatagatgaactttgcggtaagctgcagagtttcaaagtttccagcgccgtaaaaggaagctacgtagctatgggtgcacctcgtccgaagcctggggacagcacgagccgatctgcagccgcgctgctcaggaacatagagaacacaactgctgttaaagctggccgtcctcctgtcaagccaaacgccgatggtaaggactcgtctaggcgagccctgcagcccataagcggaaggcctgacagtaggtagttcggcggttccttaataagtgtgtcgtgtttgtgttcaaccctttgttgaaagccaggtccgtgtatttgtgcagcttgttgtcatgaagctgctgtgtgcgtgtcatttaacataagcgtgcgtgaagttgtgttatggaagtggctaaatatgtgttcgttaggaggtcaattggcttgaactgaccctgctgttccgtgatttctgtctaaatatacttgtgtggctgtgtcactttgattggccttatcgatcacatgcaatgggatcacatctagcgtgctctagggtcctcgtttggtaatcgctg

SEQ ID NO: 33079 - DNA, 557 bp, Zea Mays
tttctatgtcaacttcagtcttccctgcctcttttccattgctatcgcaccttaagattccactacacactagtggctctagacgtctctcttgcatacgtcctaaccatctcaccgttgttggacaagcttttcttcaactgttgctactcctaacctatcacatatattatcgttctaggcttgatcccttcttgtatggccacaaattcaatagagcatacgcatttccacgactcttatatgctgaacatacaacatagccagtctaatcaacatcctataaaactttccttttagcttatgtggtctcttgtcatatagaataccatatgcttgacatcatttcatccatcctacttgattctatggctaacatcttcaatattcttgtctctctgcagcattgatactaaataccgtaagatatcctttttaacactacttgactttacaaactaatatctccttctttatggggtagtagtgccaaagtcatacctcatatattcggttttagttccattgagtctaaaacctttagactataaagtctc

SEQ ID NO: 33080 - DNA, 2286 bp, Zea Mays
taaaaatataaaggagccgcttctctacagccggatgtatttgcttctcccgtacacaacctgctccattcttggcgagcgttcaggcgaaagaggaaaaagagaggagtgcaccgcgagtgtacagctcgaagatccacttccaagtgcttccttttaggataatcttatataccttcaagcaaatagacaatcggaggaacttcacaaagatgtcattgctaagatcagtggagtatcaaatgtagcaaaggttcctacaacctcaggagatcagcaaatgaggagagttgtattattagaagaccttaagggaaacatgattgagctatcactatcaggaaaaagagctttggaatttgacggagatcaagttttagatgtgggtcagcaacatcatgttattgcaatatttgtaggaaccttagtcaaactttacaaaggtgaatatacattcttgagtggaacatcagcatgccggtggtacatcaacgaaaatgacattgctgaaatcaaggctttccagaaaagtttgccaagtgaacctgtacctatcaaaaagacctatctccaaaatgatgatgcaactcacaaatttgaggagaaaagtctggaacagctcaagcatgtagaccctttccttgacatgggacaaagatatcagtgcacagctactataattggtatcacagaaaaccaaacatggtgttacaaagcatgcaagatctgtaactcagcaatcattcaaaaggaaaatggttataaatgcacaaaggaaggatgtccatctacacaatttgaatggaagtacaagataccattcattgcaagtgaccacacctataatctagagtttatgttctttgaaaaaaagggaatggagcttataggaaagagtgcatcgactcttcgaaaacaatatgaaccaaaggagataccaccggatataacatcttggataggttataaattcacttttgttgttagagtcctatcaaagaaaagtgtcaagactattgatccatcctttgaagtgcttatgataaaagaaaaataccagaaggaacctattatatcatttatcagctcaagtggagttgtaccagcagaatcatcttcctctacaatggcagaatacaaggaattaccattgctagtgccaattacctccaaagacatagaaaaaaaggagcgatccacttcacaaccagaacacaccgaagaaactcaagatatggacattgaaccatctgggtatgattaagataagcttcgttcttaccttctatattaaatcttaatatctttcctataataccatttcatatttattttccatgatgaactatatatatgtgtctacatacaagaaaagattatacttatttgtttgatctgcaattaaaaaaaatatctagtccattcaaatactgcatattagttcaacgttttttataaacaacttcaataccttatgtcataaattcccaatgaaaccatagtttagagaccatgagctatgtagcacaatttccagaaaatctaaacacttaaatcttcatttaaagtgacatggcagttcattatgtattgtttgccattctatctatttacttttccatgtgggcacaaagtcaagaacaacaatgtggttttgtgcagttttgtgcacacatcctagactccatattatctgcatttcaacatttcgaaagaatctaggcattaatggtctatgtcatgttgttataataattttaaaatcttacgtcttgtcattctaaataatccttcacactatattatcttcatttcagcatttgggaagaatctcagatttcaaacaaaagaagctttggagacccaaactatgacaaacaagaaacaactgatgacaaagatgaccttccacaattcaagaaaatcaggagtacccactctcaaggaaaaagcaaaaaatgatgcatgatagactaagaagacaaagtaaagtagtagactttaaaagatcttgactaaagtaatatatctatattttctgtttcgataaacaacgatagcgctagtgctacatcttttaatgtatataaccatgtagtatcaatagcgctacatcttaagcgtgtagcaccagcagcgctacatattttgatgtatataagcatgtagcatcaatagcgctacatcttttgttaaatataagcacatcttttgatatatataagcatgtagcatcaatagtgctagctatggtgctaatcttacattatatggcgtatatgttag

SEQ ID NO: 33081 - DNA, 1722 bp, Zea Mays
cgcctccataagacggctcgtcggcaacgctagggtttttggctactccgcctccgctctcccccctgctgcgcgctactcgcccgatctcgcggtgctggtagcgatctgagatcgagtgaagctagcttttcatcgatatggcgcttgtactgcatgctggcagtagtaacaaaaatgcattcaaaacactaattgccgcggattacagcggcatcaaggttgagttggtaaaagactttcaaatgggggtttccaacaaaacaccagagttcctcaagatgaaccctattgggaaggttcctgtcctggagacacctgatggtcctgtctttgagagcaatgcaatagcaagatatggtaatttaaatgttgcaacaattggtttgtttagtcttttgtttgcatttatttgattgagcaccgaattctgtcatctccctgaagttactcgcttgaaggctaacaacccactttacggatcttcactgattgattatgcccatattgagcagtggatggactttgctgcgacagaggttgatgccagcattggaaagtggttgtacccacgtatggggttttatccctatgctgctgtgacagaagaatcagccattgctgctttgaagagagcattcggttccctgaacacccatcttgcatcaaacacattccttgttgggcattcagtgacacttgcggatattgtgctgacatgcaatctttatatgggctttagccgtatcttgactaagagttttacctcagagttccctcatattgagaggtacttctggaccatggttaaccagccaaacttcaaaaaggtcattggtgacgtgaagcaggcagaagctgtgccacttcttccaaagaagattgctccggccaaagagcagaagcctaaggaagccaaaaaggaggccccgaagcctaaggaagctgagaaaccagcagaggaagaggaggctccaaagcctaagccaaagaatccccttgatttgcttcctccgagcaagttgattcttgacgattggaagaggctgtattctaacacgaaaaccaacttccgtgaggttgctattaaaggtttctgggacatgtatgacccagagggctactccctgtggttctgtgactacaagtacaatgacgagaacacagtgtcgtttgtgactatgaacaaggttggtggcttcctgcagcggatggatctgtgccgcaaatacgcctttggcaagatgcttgtggttggctctgagccccctttcaaggtcaaggggctctggctcttccgtggccccgaaatccccaagtttgtcatggatgaggtctatgacatggagctctatgagtggaccaaggtcgacctctctgatgaggcccagaaggagcgggtcaatgccatgatcgaggaccaggagccttttgagggcgaggccttgctagatgcaaaatgcttcaagtgagcctcatctctttggagtgctgctcaggaaagagttgtttaggtttttgggtctaattctaaaacagctatgaatgttagttttgatctggggttattttctgtgctgtgttgagacttttggtcatggtaagggaatcggggaaggttttaggcgcgtgcaatattatggattatcgcattggaatcgtgacatgtccatcctttacccttctcataaacgtcccatttatatatttactagctggatg

SEQ ID NO: 33082 - DNA, 2262 bp, Zea Mays
gagagaggctaagcaccacctgactcggctgaaaatctagcgcgaccggcttttaacacggcccggcccatcaaaatgaatgcactgtactagccggcgaggaccacgtgtacccgccaccgcgccgcgcggctccaccgttcggcggcgctcgggcacggcacgccgtaaaaccctagctcttgcgccccctcctctccaccgcgccggcgagccgtggagacgcggagctaaggatgccgcggaccactgagctggagagccccggctgcccgccgctccgcgccctcaccaccgacatcctcggccttgtcaaagtcgtcgaggcccacgcgaggccggcgggtgccgccaaggtcgtggagacgtggggcgcacccgacgcctcctgcgccatcgtcgctgcctccctcgccgatcgtgccaccgaccccgttttggctgtggcgaggatgaacggcgtggttgagttgctgaatcccctgaacggagatactttggctgctgtcaaggcagtgggaccagcaccaaatgatggtggcgctgaaggtgatcccctcactgcattgcaccttttcacaagacaggcttcggactcgatcttaggaacgtttcttgcttgcactgagcaggggaaagcttctataaggtccatcacgaaagaaaatgcagcttcaggctcacatattgagccatctgctacatgggatgtgtgcggtggggccaatgtgcaattttgctcagttgatcatggtgaaaactatgtgatgtttggagggaaaggtatagaagtgagtttgtgggatattacatcttgtagtaagacatggtctgctaaatctccccgaacaaatagtcttggtatattcactcggccttggttcactgctgggaccttcttgtgcaaggatgatcatcgtaaaattgtagcctgcacaaatagtcatcaggtccgcttatatgatactgcattgcaaagaaggcctgccatctctgttgagtttaaggagtcaccaatcaaggcagttgctgctgatccgaatgggcatgatgtctatattggcacagggacaggggaccttgcttcctttgacatgagaactggtaatatgcttgcatcctgctatatgttctcttcttaaacacataattgagaacctgatcatatgctattctttagaatgttacgttagttcagtttctatttgttgtaatgttggatggtttcaactggcattgcaccttctgttccactgttgctacttaggttttttccagctagccagtaatctgcaactaaggcagtattacaactaaaacaatgctgacctacatgtgtactgaactactgataggaatactcattgggggcaggatgattataggctataattcgtgtaaaactgttatttagatggtagttaaggacagaaaataggctaccagtaacacttgtgtaaaactgttgtttagatgattgttaaggagaaaaaaaatcattatcataaacgctgcagcaggaagagaatggttgcaagaatcacatgtgcaagcagcgatgagctaccatttgacagctttattaattattatcagtattattattacgatttttctctgttactaaaattgtaaaaccaatattcccccttttttcagggaaattgcttggatgctattttggcaaatgcagtggaagtattagatccattgttaggcatccagatctacctttgatagcatcttgcggactggatagctacttgcgtatttgggacacaaacacaagacagttgctatctgctgtctttctgaagcaacatcttacaactgtggtccttgattcacatttttctgttgaagagcctggagagatgaaatccaagcaactggagtcttcagtggagactgagactgaagtccgaaaagaaaagaagaaaaagagtaaggcaattacagaggatgagactgaggcacaaatccgaaaagaaaagaagagtagaacaattgaagaggaagaacaagctggattggtcgaccatagcgatattaatgatgaagtatatgccagaaaagaaaagaagaaaaagaagagtagaggtattgaagggggcaaggagcgagacagcgacggggaaatttgcagtcccaagagaagaaaatctggagaaagaagcaaatgcctgaagaagaggagcaagaaacagctggttgcctagtacaatcttctgacagtgaggatgtttccaagggacagggaga

SEQ ID NO: 33083 - DNA, 1165 bp, Zea Mays
cgtactccctccctccaaccacgcccggccaaacttgccatggcgctaccgtcgtcctcgacccccaccgcgtcggctccggcctccctcggcgagcggtggccgccgctggagtctacccccgcagttttcaaccagttcgtgtggtcgctaggtgtcccggaggacgacgtggagttccacgacgtgtacgggctcgacgccgacgcgttggatatggttccccagcctgtgctcgccgttgttctctgcttccccgatccaccacaggatgcaagttacccttcagaacaactcttaatttctggagaaaaggaccaggtttactttataaaacagatcgaatcattgggaaatgcttgtggaactattgctctactccatgctgttggaaatgcatcttccaaagtcaatttaggtgacctgaaacgattatatgcagcacacagaattctataagatggttgcaatctttcttgttctctccttgtttctgaattgaattaacctatctagtcttttgtagtggagaattcatgcttggacttgttcttcaaatcaactgctaccatggacccatatgagcgtgctgtgtttctggagaaggatgatacaatggcaagggctcacttacttgctgccaatgatggtgccaccgagctcagtgatcttatagaagagcactacgtttgttttgtgtatgtcaatggaacactttatgagcttgatggaatgaaggatggacctataaagcacggaccctgttctttctataagtttgctgcaggatgttgttcctgttattaaggccatcatgtgcaatatccccaactcaatcaacttcaatcttatggtgctgtcaaggaaagaaaaataatggtggtgctattccttgagctggtaagcggtggaatgcaaaacgcaagggttcaagggaaggggattaaacggatgcctgtttggactgcagctgcgtcactaataagttcagtgaatgcaaacattttttcctgatgtgttcgctatcatatctagtcgagtgcgtgactacattcatctttagtgttcgcaaagcatctgaaaacttgtcttaggctctatttgtttccttccagtattatataatccagcttatacattatataggccccgtttgtttcctttt

SEQ ID NO: 33084 - DNA, 1901 bp, Zea Mays
tctctacaggtgctggactagagtcgaatgctaggcggctgctagctgctaggtgttgaatgctgatttgttgtggcctgttgcgtcttcaccagttcatacattaaacttgaagaaccacgtggttgaagaaaagcccactgaaaatgagtaatacatcatcttcgtcaagtggtgagcgtgctatgcagtgacagagggctgtggagatcataagttcataacatcctatgttagcctttcacttgatcataagttcataacatccttatattcatgcagggatgtgatatatgctgatattccaaagctcattccatttattgatctgttgggctgttccctccctaaaccccagcgtcgcctccgacgagtcaccgctccgtcggctgcttgctgcagtccacgccacgcgctacgccgtcacggtcgctcctcccgtgacgcagccgtcgctaggcgccgcctatttctcggacaaagtcgctcgccaccatggcggcagcgtcggctgccgcagaagccagcggcgagagtaaaaacgaattcctcatacgcgacgacgcgccagggctactcgccgctctcaaggagatgaaggacggactggacctcgtcaggggcaaggtcgaggccatcacgcggaaggtcaaggcgaaccagttgccggcggccaacgggatcgggtacctagaagcgaagaaccacctgctccttggctattgccaggacatcgtctactacctgctccgcaaggccaaggggctctcggtggatggccaccccgtcgtacggagccttgtcgagattaggctgtttctggagaagattcgtccgattgacaagaaggcagagtaccaaatccagaagctcaccgatgccgctgacaatgccactgttcgagagaaaccaggaaatgcacaggcgaaggggaaggacgggcattcggatgaggaagacctcctgaagtataggccaaacccagatatgatggacacaaagcctggtcctgatgggcaggatactgatggtgtttaccgtcctccgaaatttatgcctactagcatggatgatgaagagaaacgtcgtaaaaatgattcaaggagagataaagcgatagcccgagtggcaatagaaaacccttatattaaagagataattgatgatgctgcagacagacctgaagagtggaaggaaacagtgggcgatgaaagcagagaatttgggaggtacatgcgacagagagaagagcaagagaagcaggaagaggagttgttcactcgggctcctgtaaccaaacgtgataagcagatcgagaagcgcataaggagacaacttcatgggctaggaggcttaactgacggtttcgaccttgggatgaacatgctgttgggaggagacaaggaagatgatggcggttcaagcaagtcgcatggcaagagcggaaaccgaaagaagcacctgaagagcagcaagaagaggaagaggcattagccttggacccacactgctgtagcacttcaacataccgatacagcctagagacggttcaagcaatccacacggaaagttgaagctggagaaaatacaagaaaccaagtagagaaaaaaagctttggttcctgtaggcgtattatttctgaaacagaaaacttgatctgagcgactgatcctgagccaatggaacagtatgaattatatggcttgaacatggtaggtgtaccaagttttgttctgatagtcgaatgattgttgtattattgattaacaagaccaacaatatatagactaggctccaaccggttcatagaaacagtgcccggtagagatggacggtgatcacctgattagtaccttctaagtatagtcatgcactagagatggaaggtgatcaccttgcc

SEQ ID NO: 33085 - DNA, 2702 bp, Zea Mays
gtggggaggactgccctgttcgcatttggagcatcaaaacaggcgagctaatctttgcacggagcatggcagtctggtgtttgctcatgagccgtttattagtctatactctactactatgatatgtggttgcaatctagcacatattacacatcagtggctgataagaaactgcatccagtggatgtaaatttcattggatttgagttttggttgagatggcagttggattgacatctcagctgttccaaagagtaactgctactgacatcttttgccaaaggaacaaatttaggagttctgagatgaggagttctcttcccttgccatccacctcgtttccttcagttgctgataggcgagactgttggggtcgcaatgtgttagagagtagctgcatgcccatgctttatacacctcgcagatatagatctttgggctttagatcttttgccttgccaattcctttgaaggaaattcctcttgtcaagaacacatcattagcactaactaggtcatgtgatgctttacttgcaaatcctgctacctcacttgtggtccctgcaatcgggattattgtgtttgctctgtggggttttttgcctctaatgcgggatattagaaaccgttttgatcatggaggcaactggaagaagagtcctacatatttgatttcttcgtcgtaccttcaacctctacttctctggacaggagcaacactaatctgcaggggtttggatccagttgtcttgccttcagcagcaagtcaagctgtgaaaacacgtctgataacttttgtgagatcattatcaactgtcctggctgttgcatatattctcacaagcttgattcagcaggtacaaaagtttcttatggacatgcgcaatcccaatgatacaagaaatatggggtttgattttaccatgaaagctctttatactggtgtttggattgcttctgtttctctctttatggagttgctgggtttcaatacccagaagtggataactgctggagggtttgggacagtgttgcttacacttgctggtcgagagatttttactaacttcctctcaagtgtcatgatcaatgcaacacgcccatttgtagtcaatgaatggatcgatgcaaagatagatggtgttgatgtctctggcattgttgagcatgttggtttgtggtctccaacactcattagaggtgttgatcgagaagcgatatacattcctaaccataagtttacagtttctatattaaggaataacactcagaggacccattggcgtattaagacctatcttgctattagccacatggatgctggaaaaattgggactatagttgctgacatgaggaaagttttggcaaaaaatccgcatatagaacaacaaaagctgcacaggagagtattctttgagaaaattgatccaaaaaatcaagcacttatgattttcatatcctgctttgtaaagacatcacattttgaggagtatctcaatgtccaggaagctgttatgttggaccttcttagaatagttgggcatcacaaagcaaggcttgctacccaaattcgaacagttcagaaatcatatggcaatgcagacttcgataacattccttttggagaggacatgtatagtcgagtccgtggccggccacttctgattgatacatctgcaaggatcagtgatgacaaacccaggcctcgacctgtatcatcacgtgaggagcagaaagtcaagacaaatggctcggtagatattaagtccagttcccctgaaaatgctagttcaagcaactctgaaaagcaggaaccgaaaaaaatggtgcctgaagatactcgggtgaagaacattaagggtgataatgtgatgccagtaacaccatctttagatcctgctacgtcaacttccaaggctggtaaagggaagacacgggaaccagagcccactgagcggcaaggagatgggtcagtctcggtggctaatccaaagaaagaatctagaccagtttttgaagataacattgttctgggcgtagcccttgagggttccaggaggacactgcctattgaagaaggaaatcctcatctatcactatctgagactgaggtggacaccgaagaggcggcttcatcaccgaaggataagataggccaaagcccaaaactttgaggtccagaaaaaaagccgttcagaggaatctcgataggtcatccgagttcaaactgtatccttgtgaagatttgtcaccaagcctaccttttttgtgcgcttgtgcaaatacaatgccaccacacatcagtgttgtatgcttaaggggtaaattcacactgacgattattcagggaacattacctgtcagtcgtattgctacaggcttgtaaagaagcaagtgcttcaataggcattttgtaaagattatattattgctcatttaagtggcttcttgcatatgcatcggcaattcagcatgcgccgttgcaactgtcatctcggtttccaggtttggcttacgttagttttgtttccaatgccatctgctgcgagctgaaatatcatcgtctcttttcctttttttttttttacaaaagacacgctaagtcgtggagacggtgaattcttccggatggcgtctcatcttgcagacgactaaaacggaataccgcgattatcgaaaaggaaacggaataccgcgcggcg

SEQ ID NO: 33086 - DNA, 1178 bp, Zea Mays
ctcaacatagatgtcagttttctcactgacattatttatattttgtagtaagaatcgtggtgggatcagagcagcatattttgtttccagattaatatgtcgagcaccaaaccttgtctcagtcaatgcagcagggaatctgtggaccctcttcaatatgtgaggattggcctgctggtggacaaggaggcccccgccctggtcctggtgctgctgctacagctccagcaccagcaccggttgctgctcgcccataggctttagcttttcgaccgtgttgaaagtcttctgcccacgcagtttcggagttgtcgcctatgggtgaaaaacaagaagatggaaaatacaagcactctgtggatctcccgaaaacaacatttgagctgagagcgaattctgtacagcgggagctagagctccaaaaattatgggacgataatcaggttctgaaaagggtttctgaggaacactgggtgatcttcacatgggccatgcgctcaataaaatcctcaaggattttataaatcgctacaagctgcttcagaatcataaagtgtcctttgttcctggttgggattgccacggccttctaatagaactaaaaggtggcttgtgcgaacgaggcgtggcaatcgatgagcagtggcaaacccaaaaatcttcaaaagcctaggcaaaagtagtaactaaagatacatcaccttgtccagtttttctgcttttacttcgactatatgtcattgtgccacaaaaaacttgtttcatcgacttatgatgagtcttctcaattgtttcttgaatatgcttttttagaaccaaattgaattttacaaggtgcaatattgattagaaaaaggtgtgatgctgactgggaaagcgctactcccttgtatgaattagctggtcgatgattttgtttcccatcctttttaatttcttgacatccgtttgttcattggggagcacatatgtagaatgatgattaatgtttttaaatattaatagattttatcataatatattgccgccgtaacaacgtacgggcatacaactagtcattgaagaagtcaaaaagatgagagaagcacggtaagagacagagagacaccatgagaagttctttgagttcgaaaagtgtaagcttgagatggaacagactaaacttgaattggagcgag

SEQ ID NO: 33087 - DNA, 1373 bp, Zea Mays
gggaagaagatgtggtgccaaactggtgcattacacgagatatgaaaattaatgtcaggggactcaactgctagaatctggacaattccagatggtccatgtggttccaacatgcaatcatctcctcctggtgttcatgttttgaaacattttaaaggtcggaccaatgaaaagagtaaggatgtcaccacacttgactggaatggtgaaggtacactgctggctacaggctcctatgatggacaggcaagaatatggagtagagatggagacctgaagcagacattgttcaaacacaagggacccatattttcattgaaatggaataagaaaggagattttctcctaagtggaagtgttgataaaactgctattgtttgggatacaaagacatgggaatgcaaacagcagtttgaatttcattcagctccaacactagatgttgattggagaaataataactcttttgcaacatgttcaaccgataacatgatctatgtttgcaagattggggaacagcgtccggttaaagcattcagtggccatcagagtgaagttaatgctatcaagtgggatccgactggttctcttttggcttcatgttctgatgattggacagcaaagatatggagtatgaagcaagacaaatgtgtatttgatttcaaggagcataccaaggaaatatacactattcggtggagcccaacaggcccaggaacaaacaatcctaatcagcagttgcttttggccagcgcgtcttttgattcaactatcaagctttgggaagtcgagcaaggatgccttctgtacagcttgtctggtcataggcaaccagtgtattctgttgcatttagccccgacggcgaatacttagcgagcgggtccctggatcagtgcctacacatctggtctgtgaaagaaggcaggatcctgaagacgtacagaggtactgggggcatattcgaagtgtgctggaacaaagaaggcagcaagattgctgcctgtttctccaacaacacagtctgcgtgatggatttccggatgtagtccaaccagtagggtggtgcatatcaatcctaacacaaggctagatcataaatccgtcccatgcaaatttgtgaagagcggagttgttagcaaaatgtagatcctaggtggcttcaacttttgtccatgcacatttcgtttttcttggtcatacttaccttagagtagcaatgtagtagtggaaatgccttaacagggtttagtagcatggaaatgttttggtggtaaattaatgaattaatctgagatgtactagtttgtagtttgcacataccgtcgtgtcaatgtcttttatattgaactgctatagcgagcttggctgacca

SEQ ID NO: 33088 - DNA, 1760 bp, Zea Mays
attgataccagcagaaaaaaacaactcaagcctcgcccggtcgcccctccctccctccctctgccccgggtttccagggaaacccacccccagatccaaatccagcgaagcgacagagatcaaggatggagctggaggtgggtgcgccttcgccggcgaggtacctggtgggggcagcgatcatgatggccggcgtggtgctcccgctggcgtacatgatcttccgcagcaagcgttcgccttcctccgcctccgccgcggggccctcctccttctccaagcagacgtaggaacaaagggctcatctgatctgagcgagtgggtgaatcgatcgccttcccctgatgcttgtcattctgtctgttttggcaccgcgagatcctccaactgcttctcgagactgggcatcatcacgtcaaatactagctgattagtagtcagttccttttgtaccttgtgtagatcagatcgattgcttatttggctgatttgatacaattataaacaatgggtttacttttgagtgcactacttacaagcatcattcatacggatttcagtttacctaaacaaaccacttgccctcttctgctgcttggctggtttattacgataactgtgcagaatttctctctatgctagttctccctcaattccaaaatgtaagttgttttagttttgtctgagttaagcttctctaagactaagtttatagaacatcaaattggtttcgctgagaccaccaggaaatatgtcttgccacttgacagtgcatttatttggtattgtagacgttaatatattttctatagacttcatcagaattagagaattttgacttaggacatgaaaacggcctatgttttggaaacatagggaatactatgtttgtggtttaataaggagcacacttgttgtgccattcatccttttgcatcatcagctgttgatggtctagttgttgcattgtcagatctaacagcattgggattgaattcggcactgatcctgcccttctgtgtagttgtgattcctatgcgatattttcttcagtgcttccctcttcaaagtttggtttgctctcttcagtccccttctttattctattctaacggaggcctttcatgtcattcgcttccaggagctgacacatacattgttgctaagtgcattagtttgttatctgataatccacacctccagatgtgccctgtatgtttgtgttcttataagttggctcctattgaattgtctgtgttcctgcacatgaaggtagtaaacaaatcagtgtgctgccccagaaaagtcagatggatcgattgtttttgtggctacatgaagggcttgcggcttgccttgtggcttgtgatcaagatggtaattctcatggaggctactgggtattcagggcctacccttcctcaggtaggtataaatccaaaacagtggttgcaagtaatatcatcataacaactagttaattactgtatggcactagtattggctgtgggatacaaatattttggatggcactttatcatatttgtcccttgattgcacaagaatcttctatggccatatgtgtgtcataactcataaacctgtgagaaaagcagcacctttttaagatttttgactacggaatagtgatagctttagttgtctctttacacaatgtgtgaaattaaggtgcctgcatcaaagaaactttcttcatgacaggcaaccttggtgcttcgttcaacttgtggcaccctttg

SEQ ID NO: 33089 - DNA, 2865 bp, Zea Mays
cactgccaagcgcagttgtctctgatgtctggtcacgcctgacgacgccgctatcacgcgccaccctcctgccgacgaacgcggcctcctcctcattgctgagcgcagcccctcacttctctcctggctgcgccaccatgatgccgccacggaatgcgcagagccgccgaagagagcagagtcccagcgagaaacgcaggagctcttccttccacctctggcgaacctccaaggaaactcgacgcccagacctgctcgcgcacagggagcatctttgctccggcggctgctcgccggcctccctgtctcctccccagttcttcctctcacagccgtgcagcgccctcttctctacagtggccgctgctcctctctgaagctatgcgcaggagctctccaggacgccgcgcctcctccctgctacacgccccggtcgacgacgaacttcccgtggtctgggaggccgcgcccgcccagatccgccggaaggagcgaaaggagccccgccgccgctgtcatcacaggccgcacgggcttccggtggcctgctcaggcggcggctagggttttgaggggcgctcgggtcgcccagcgcggggacgaccgagcgccgtctgcttcaaacatttggagctcatcccctcgaaatacagaaggtgcatccacaaaggattaatctcttcgtctaattttcttgggcatacacagattcagagcatatggcgatcaagtagctatgcgttcagctgaggacattgcatatgctgtgttacggttttttgcaaagggtgggtcattggttaactactacatgtatcacggaggaacaaattttggaaggactggggcttcttatgtgctgactgggtactatgatgaagctcccatggatgaatatggtatgtacaaggagcccaaatttgggcatctcagggacttgcacaatgtaataaggtcatatcagaaagcattcctcttggggaagcattcgtctgagatattgggtcatgggcacacatctttgagttgcctgaagaaaatctttgcctctctttcctttccaacaataacacgggcgaagatggaacagtaatcttccgaggggagaagcactacgtgcctagccgttcagtctccattcttgcagggtgcaagaacgtggtttacaataccaagagggtgtttgtacaacacaatgaaaggtcataccatacctcagaggtaacaagcaagaataaccaatgggagatgtactcagaaaaaatcccgaagtaccgtgatactaaagtcaggatgaaggaacccctggagcaatttaaccaaaccaaggacgctagtgattacttatggtacaccacaagctttcgcttggagtcagacgatttgccttttagaaatgacatccggcctgtgcttcaggtcaaaagtagtgcacactcaatgatgggatttgccaatgatgctttcgtaggatgcgcacgcggaagcaagcaggtgaagggtttcatgtttgaaaaacccgttgatctgaaagtaggtgtgaaccatgttgtattgttgtcgtcaactatgggaatgaaggacagtggtggtgaacttgctgaagtaaagagtggcattcaggagtgcctaatccagggtctgaacactgggacgttggatttacaagtcaatggctggggccataaggctgcactggaaggtgaggacaaggagatctactcagaaaaaggtgtgggcaaagttcagtggaaacctgccgagaacggccgggcagccacttggtataagagatacttcgatgagccagatggagatgatcccgttgtacttgacatgagctcaatggacaaaggaatgatttttgtgaatggtgaaggcgtgggtagatactgggtctcataccgaactcttgctggaactccttctcaagcactataccatattccgcgtcctttcttgaaatccaaggacaaccttttggttgtcttcgaggaggagatgggcaagccggatggcatcctcgtgcagacggtgacgagagacgacatatgtctgttcatctcggagcacaacccgggacagataaagacgtgggatacggatggtgacaaaatcaaactcattgcagaggatcacagcaggcggggcaccttgatgtgcccccctgagaagacaatccaagaagtcgtctttgccagcttcggcaacccagagggcatgtgcggcaacttcactgtaggcacttgccacactcccaatgcaaagcagatcgttgagaaggaatgcctcggcaagccatcctgcatgctgccggtggatcacacggtgtacggcgcggacatcaactgccaatcaacgactgctacactgggggtgcaggtgagatgcggaggcggcaagaagggtgcctgagaataacaagatggatgctgctaattaatggacgtttcagcttgtttgtttgttcatcccttcggtttggcactgatgcttacattgttctgacattgcaattgaaatgtgattggaacattcttgatcgggaactaacatgaaatgagtggagggtagatgctgatcagaccaaagatgtgtatttcccccctctttccttctgtctcgtgttgtttcatgtaaccatcacaatatatatagatgttgaataatcatgaccagtagtatagatcttagagcatccctaacttttgaataaaagactcttggagattggagctggactaactgattgcttcttgcaacatgtatatgaacatttcattaaaaaacgagcgatgagcaaaacaatataccctactaattaagatgttgcaaatgagtttaatcctacagctttgatactgc

SEQ ID NO: 33090 - DNA, 7041 bp, Zea Mays
ttgggggtggggtaccgcttcctcctgtgttgaagcagcctttccctgtcttctctgcactacgctacgcccgcagtccccgcacccagcagcagagtacaatgtccacaggcaaatgcgataaggtgaggaagagagagcacgggatgggttgagaaacaagatggagggagaaagtgggcagcctgctggatcttggcatctcgccgccgctcatttccgctccacctgtgtgggctagttatctactagtagtatcttcgggccagttcaagacttagccgctgttatgattttgaggataagatattgcatctctgcacagttctaagcgctgaggaagtaaaatatcatttatcggctagagtagtctctgttgctatccggcaccaatggcgactttggtccgtcatgattcaaggcagtactcgtggtggattagccatatcagccccaagaactcgaaatggctccaggaaaatgtcagcgacatggactcaaaggttaaagcaatgatcaaacttatcaatgaagatgctgattcttttgcaaagagagcagagatgtactacaagaaacgtccagagctaatgaatttggtggaggaattctatcgagcgtaccgtgcactggcagaaagatacgatcagtccactggggcacttcgccaggctcacagaacaatttctgaagcatttccaaatcagatgccatcaatgtcagacgagtcaccctctgctttcagccaagagatggagcctcatactccagatacgtctactctcacacgtgtggcatttgattacgatgatcttcagaaggatggagttggtgtgtcaccacaaagtttcacctccaagaggaatggtacacaccctgaggaaaccagtgcgctgtcatcgagtgttgaaaatgctcctcgtgctggttttgatggaaaggtatggaaaggactaacttttgaaggcccaaatgtcaaagggaaagatgatattagcaacgagatggcaaatttgcaacaagaagttgcaagactattagctgagagccaggatctgaaacagcagatgttttcagaatccgagcgggcaaacaaagctgaaaatgagatgcaaatgctcaaggcaacagtattgcaattaaatgctgaaaaagacacatcacttatgcaatataataattcctctgagcgaatatctacattggagtctgagctatcgaaggctcagtctgaccttgagaagttaactgatgaaatggctgcagatgtccagaagctaattaatgctgaaacactcaatattgctatacagtctgaggctgagggtttggatcagaagatgaagatgcagcaacaagcactagaacaaaagcttaaggaattggagagtttccgctcaagcttccaggaggagcatgaaaagcgcatgcaggctgaaagtgctctactttcccagaggaaggaacttgctcaatctcatgaagaagtgcagaggttggctatagaaataaagacagcgaatgaaaagttgaatgagttcaagcagaccaaggaggtccttgagtacactgtttgtgagctgaagaaggatgttgagcgccttacagaacaaaaccagtcctctgaggtgcttgtacagaaacttggtgaccagattaatacactcaaggattcaaataatgaacttcaaagtgaaatacaaagccttaagagcatcatttcacagctaaacactgagaagaatgcagctgtgcttcaacaccagcagtttgtggaactggtttcggtacttgaatctcagttgtcgaagctacagtcagagctagatgagactgagcagaaagtacagatgctgacacatgatcttgaaaagaagaaagaagaagcggacaatgtccatctcaagctgcaagatgaatgccataggcgtatgcaaattgaggcaactcttctcatgacagagggtctgcattcccagttgcaagaagaaatgcaaatgttgacacaagattttgacgggtcaacaaagaagctcagtgagttggaaaaaaataagttagacctggagagcatactgaaagaactgaataacaccattttaggtttgaactcggagaaggatgcagcactccttcaacaacagcagtctttacagaaagtatctaatttggagttagaactctcaatgatgcagttggaaatggacaagtctgaacaaaaaattctcttactggaacaagaaattgcacggaagaatggaagtgtcgacagcctggagataagtttgaaagatgaatgtgagaagaggctacaagcccaaaaaatgtattcccagtcacaggaagacgttagtaggttgtacatagagatagagaagcagaatggcaagttgaatgagttggagaacttgatatccgaacttaacaacaccatcctacttataaacactgagaaagatgccaccctccatgagaaccagcagtcctcagtgagaatatcagatcttgaatctgaactcatggccttgaaaaccgaactggaaaatgttgaagggaaagttcatgcggtagagcaagaactcatatataagaaagaagaagcagataacctccaaattagcctacaagatgaaattcaaaaacgagttgaaggtgaagaatctcttcttatgatgacaaatcttcactctgggtcacaaaatgaagtgagagggttggcattggaacttgagaagctgaatggtaatttaagacaggtggagaacagtaaggttgatcttgagaacattgtaaccaagcataccgaggaaattcatatccttcgtgaacggaatctttctactgaccttatgataaaggaccttcatcttgaattggacgcactgaaggatttgaacgtgaaacttcagacagaaatggggttacacataggtgaaaaagaagcacttcagagagaatttacttctcaaagggaagagaagaaaaatctagaggggatacaccacactctggttgatgagatgagtaccctaaaaaccactgcaacaatgaaccagaagctgattgaggaactgcaaattacaaactcaaaactgaaggaggtgtgtgcaaagagtgaggttgagaaggcacttctctcagaaaaactccaagaggtggagaagctatctgaagaatgttcactcttggagaactcactttcagatgcaaatgctgaaatggatgcattgagggataaaataaaggcacttgaggctttagaaagctctctcaaggatataatttcctgtcatgtttctgagaaggctgttcttgtatcagagctagagatccttggtaaaagattatctgatgcttcagagaagaattctatcatggatagctcattgtttgatatgaaaatggacctagaagacttgagaacaaagttgaaagattctgaagaatcctgtcaggctctccttgcaaataattcagctctttctggtgaagtggatgcattaagagagaagataaaagcactacaggactcagaaagctctctgaaggatgcaatttcctgttatgtttctgaaaaggctgttcttgcatcagagctagagatccttggtaaaagtttatctgaggtttcagagaagaactctattttggatatctcattatgtgatatgaaaactgagctagatgaattgagaacaaagctgaaagattctgaagaatcctgccaggctcacctaacaaataattcagctctttctgctgaaaagaacaatctgttctctcagttggagagcattacattggctatgaaagccctagaaggtatgcatgccaatctggaacagaagcactcctctgtatcaagagagaaggattttgcatatgatcaagtaagggaactgcaggatcaattgagaattaagaacgaggaatttgaagtgtcagcaaagtcacatcaacttcaagcaaacagctatgagaaacaaattttttctctacaagagaaaaaccattatatggaggaggtgcttcaacaggaacaacagaaaaacataaatgcttctattagtacagttattttggagaactgtttggtcgatgagcaagacaagaaggttgctcttttcactgaatgccaaaagtatgctgtggaaaatcattcagccaatatgttagtttcagagttaatggaggaagctagatatcatggggaggagagaaaaaaattgctagcgcacaatgaaaaactgagggaagggatttcaaatcaaatgaagtttctgaatatctgcaaagatctaggacctgctgatttagctgaggacgaagttctgttgcagactgtttcagatgaaactattaacattatgagacttaaggatgaaactgaagatgtgaataggctcatggacaccgagctctcagttctctcagtagttttgttgcaagtagggatggagcttagagacttgcatttacagaagtgtgcccttgagaaagaagtggagagtggagaaaaagagacgctttctttgcaaaatcaaaaccagcagatgttggaacagaatgaacaactaaggagtggattacaggaaagcagtgaaggggtggaggtgctgaaaactgaagtatttgtgatacaagagaaactatcttgcttgagagagtcctaccagacctcacaagatgaaatttccaacctgactaaaaaaaatgagtccttgtctaaggaataccagtccttgagtgagaagtacaatgccttggaagatgagaatgatactatttttgaagaatgcatgatgctcaagaacttgtgcctgttctttaggggacataataatgagattgcatctgcattggcttctcttaccgatgagatggctttgttgagtttggctaagggcgacctcgatctccaagttaatgagctgaacagaaggtcagtaatgcttgaatcagaaaattatcacttaaaggactatatcatctacttggtagagattctcaggactagattagtcctttcagagtttgatttggacaccaatcgaagtgtcttccaggagttagttgtggaacttgagaattgcatgacacagttggtgcagaaggatgatgagctaatggaagcagaagagaaggttcaactcttgcaagaaaagaaccgggaactctgtggagttgttgggtctcttcaggttgcaatggaaggtgctaaagtggtgaaaggagaactggagaagaaaatcacaatactgattgaacagtgttctagcaaggacgacaaaattttacttcttcaccaagacaatgaggcattgcaatcagagattgagcaatgtgagagggaatttgttgagctgatggatgatgccattactttttcagtgaattctgcggtctatgaagaaaaagcattcgagcttatgatgaatggtaaagctacagagaatagagcaatatcccaaaaggagttgctaatgaaggagatctcttctcgagatgctaatattgaggagttgcagaaaaggctggctggtattcaggatgaacatgcagaactaaaagctgagttgaacacacatctagctctcatagcatcattggttgatcatgtcagtgtgctggaagaagatgttcgttctctgtcaaaaccatgtagtacagaaggcaaagaggaaactgcaagggtacatcatgtgcaagagggcgacgatgggctggaatctcattgcttagtcaatggaactccaaagttacaagggttgattgcaagaatagaagcacttcaagtggttgtattaaatgctaaagatcgtcaagatcgtaaatcagccgagtctgcagctaaactggcggcagcaagtgcagaaattcaagagcttaaaacaagaggcggctcacgcatggaggcaaaagaaatatgttctgacaatgagaaacaagatgttgaggtctccaaagggaagcaagtccagatcatgaaggatattgagctggaccaaatatctacttgccctccatatggcgctggagctgccctctacccccatggaactggtgcaaatgctgaactagatgacgatatgcttcagctgtgggaggctgcggagaggagctgcaagaaccaaacggccaagtcctcgtcatctgagcacgacatacaggcggtcgaggatctggagagcgagtgcccttcgtctgagctagcgaggggaagagaccttggaaccaataagctagaagtgccaaagggagctgtagagcctcacgaggcgtggagcaagaacgtgcttgagaggctcacttctgatgcccagaggctgttgagcatccaagcgagcatcgaggaactgaagaagaaaatggaggggtcctcgaagggtacgaattctgagtacggcagtgtgagcgctcaggtgcatgagacggagggtcttgtcttggaacagatcaattccaacaacaagttgagcaggaaggctgagaactaccccgcattgtcagataatacgagcaccgagcgaggagggtattccagcaggaggaagatctcggagcaggtgcagagagggtcggaaaacgtggcaaggttggaactggagctccagaagatccagtacgtcttgctgaagcttgaggaggagcacgagtacacaaggctcaaagtctctgataagcgcactcgtgtgcttttgagggactacctgtatggaaggaaggaccgtggaggcgggcagaagggaaagaagaagcgggtcccgttctgtggttgtgttcgttcgaaatcaagaacagagccgtagcctttttgttctcgcacccctgcgcgttggaagaggtggtggtgtcctttaggatgaatcccctttgtaactgagtttagtatcctgatgaagaagcctatgtactagatttttggtttcctgtctagatgaggccgttcttctagccagtttaatctcaggtattactgtgatgtatcaaggactgctctttctatatatataataatagcttcatgtttgtatagcctat

SEQ ID NO: 33091 - DNA, 3605 bp, Zea Mays
ccgccgtctcactccgccccgccacgcgttcatccaggtcgggggtccgtacgatgcaaaaaaatcgcgatgagtccaccacgactccaagcagctgcggacgcgccgctctaaccggagatccgttaagagtccgccgcccccatctcagcgcctgagtcagccgttctctccccgtgctcgcagccactggtttccgcgggtctagggttcgtggaggcagcgtggagcttagggtttcggcgggatgagctaccggaaggggttgaaggtttgggtggagaagggggaagggtgggtagaggcggtggtgacggaagcgaaggaccacgccgtcgccgtgctcacgagccagcgggaaaaggcacggcagaggacgatggcaactgtccagcgcacacttcaggcaatggatgaggacaacatcagagatgagtctagaactggaaggctcgtcgtcttggcggcgctggccgccggcgccatcagcatcggcaagcgcatgcccctgctggcgccatctcccccgtcatcttggcggcgctggccgccggtgccatcagcgtcggcaagactgtcatagatgagattttcatgttctgaagactgaattcaagatgatgggatgcttgtgatatcgacagttcctggttctccaccaaagctgtgcatcaaggctgttgcattagaaaacttctgtccaagagcattttcattgctgtcgatcgccggactatctgggttttgctaggccatgcagtgtcctagaaggcctattaattcaatttgcagcagactgaaagctaaagaagtccgtattagagtctgggctcatcaattagctgctcattctccagtacttcattcccttggtcccctacaactccgacctgactggctaattgctgctggagaaaggaacaaaggagaatggagcatgtagtggatgcgccaatgcaggtttcagttcctcaagtatatgttcctatcggacccctttgttcctcaagtgagtgatggcgctggggttgtcttactaagcgagacatttgcactgaacaattgcagttccgctgaactcatagagttcatgtcaatctctctattgaactttaatttttgaaagtttggtacagagattttcataaaaaaaacagatattgcctgattctgttggcacctgatttcctgaatttcatttcgaaaaaagagaagaaacagatatggtctcattctattttatttcaatattatcatgtggtatataagtcttatcacacttgtgtgctgcccatgggagcggtagttcagaagcagttgaacctggagttggtgttccagatcattttctctgaattacatcatattatctgtaccaggtccagatgcaaccagggcagccatcgatgtctgcggtaagaacagttcaaatttttttctaagtcggccttgtttgatctgataaacgtaattccaatatgtaccttgcaaaatatggattaacatttttgctgaagagaaaatttaaataaaataaaataaaatggtcatctcaaccttgaagcatctgcttggtatggattgcagaacagggtttattatcaaagatctttggttagggagattgaagcccggttaaaagccaagtgtgacacattagctgatctatttgctatggatgaaaggtatggattaaaggtgtcagttactaaaacttgggatgaatagatattaaatttgcatataaattgtcaccatgtcttccatcagattgttttgagcacatttttagtaaggtctcgttaagcgccgcgtttgagcaccatgtccttccctggatgcacagaagctactgacttcgtggttacaatcgccctttgctttacctcctcccatgatggaaaggttgaggtattgtagttctttccttgaatttcaccatgttcctttctgttttcctgatctgtgtatattttgggtagtccactgaaaattgatgatagtcatccatcaattatatttctgtcaccaacccgtgcagctgatatgtttgcttgctctccactgcttgcttgctcaagctcctatttttgatatctgattttaagcgatgtctcaatttagaaaacttgttatgattattgtttcagtcatattcccaagaaatatgctatggagaaattactaagatgcaaaaatatcacaattctcaatctccaatcacaagcatttaataaaatgctataaacaaaatgatctgggcaaactcacaaaataacattattcataataaaggaaatcaacagctaggttgttcgcaagaatgatagtttgttattgcaatcgtgatctatgtaggtgagaatggaactattgatggccaaggcattgtgtggtgggatatgtggaagaaaggtacactgccctatacaagacctcaccaattgatctatttatgtggtgggatatgtggaagaaaggtttgtgatggaggtgataaaaactttgtggtgcgaaagggcctctagcgtaatggttaaggcttccaagtagcaactccaggtcccaggttcgatctctctcgggggcgaattttgggcttggttaaaataatcctctcgttgtgtcccgcccggtctcgggggtcgatatcctgcgcgccaccctccgtctgggctgttgcagagtggcctgttgatcggcccgttaaggctgggggcagagttcggggttttttttttcggtcgggaccatgtttcggtctcttcttaatataatattgagagggcagtcttttcatcccagccggagccgagttgataaaaactttgtggtgatcaatcagaagggcattgaccctccatctttggatctctttgctagagcgggggtaatctctcctctatttggtggttacatgacctaagttcattttgaaccctgaatggatttagattttcatttgagaacgtgaatctcatgaagttaagggttgaagaaggcattgactgattaaaactgctctgaaatgatcatttatgctcagattattgctcttcgagctatcacgtggtggtggagctatcaattcagttgatgacttgactgaaaattgtctaggctcatctgatcttgtctatgagtatgttctcgtagaagaaaagtacacatttgtggggaatgtgaaaaatccttgctcttgtactatactgattaaaggattcaaggatgatgttctgttaagaacacagttgaggatgaagcagttgtgttgttatcatccgtaaatttctttgtccaggaattaggaagaataaatttgtgttgatactgtgaaggtaccaggccgacacaaatttatttgataaaatacgtgttcccaaatgtgtgtatgtacgatcaggatcgaataatttatgtcctgtcccaatgtacagaggcactaaggaaacctgtcgcggttcacagcgaacgggtcttgaactcttggctcgctcattttaatattattatgtaaatttcctatcaagaaacgttcctgtgacattacatcgagaagacgagaatcatgactgcagaaatacatctttattcactactgtatc

SEQ ID NO: 33092 - DNA, 1422 bp, Zea Mays
  misc_feature (1421)..(1422): n is a, c, g, or t
gttccccatcgcgacccttgcaccgggtccacgctgaccctcttcacgggggcggcgaaagatctcagccgcgacgggttcgagcgccggcgagcgctcgcccacctgggcctataaactggccccggctcctcttctcgcgtcgcagagcccagcctcgggatgacgtggcgtatcgcgacaccgccacagctcactcaaccgcgcgggtctccaacgaaccccttgtagaagcttccaaaccctagcgcaggaggaagaggagcgtggaggagctccaggaatggcgaaggcgaggaagcagaagggtgacggtagcggtacgggcggaggcgccaccgttctccaccagaaactctgcctctccatcgacatggagaaccagctgatctacgggtacactgagataaaagctcttctagctgaaaacgacacatttgctctacatgctgacaatatgacgatcaggagcattctggtggatggtgaaactgttgagttcgactattcccctcattggaaaaatgaaactgatcaacctaattggtcttcaatatcatgtttgaacactgttgctgatgctgcatgttcaacatatacttcgtctctaaatcgagaagctacaccaaatcttattgtgtcatctgagagatcaatcaagtcaatgattgagcagcagttagatgaaaacagtgaaaaatatgaagaaaatagtggaaggcttgaaaaacatggtggaaagaccatccaaacttcctatgatcaaattgttaatggctgcaatggttctgcagtggaagagggaatagaaaattctgcagtggaagaagggaaaaaaaaggaaaaggaaaaagagaaggaagagaaaaatggaaatgagaagagcaaggaaaatggaaatgagactgaaaatgaaaaggtgaagaacataaaactggttcacatagattatattttggagaaggctgaaactggcattcactttgttggcaatgtcatgcatagcagtaatcagataaggcgggcacactgttggtttccttgtgttgatactgccacacaacgctgtccaatttacagtcagcacagatttcatcgctgtcagcaacggtgacttgctttaccaggtcttaagtaaggaagatccttcaaaaaaaacctatgtgtataaattgaacactccagttagtgcacagtggatatccttggttgttggtccacttgaaattctccttgacagaaatgacataaatgtgtcacacatctgtttatctcctgccttgtcaaagcttcagaacactattgcatttttccacgatgcatacagctgttatgaagactatcttgctgcaccgtttcccttaggtttatacaagcagatttttcttccatctgaaatgacagtattaccggcaagcttnn

SEQ ID NO: 33093 - DNA, 2058 bp, Zea Mays
tattttttgaacaagatggtgaaaacttcgatgacgcccttgcacgtgtgcgtcgctgtgttggtggtggagctgaggcaaataatgcagacagtgatagtgatatcgaagttgtggctgattttgtctctgtgaatcttcggtgccctatgactgcttcaaggatacagatcgctggtaggttcaagtcctgtgctcacatgggctgctttgatttagaagcttttattgaaataaaccaacgttcccggaagtggcaatgcccaatatgcctgaagaattactctctagagaacataataattgatccttatttcaatcgcatcacttctttgatcaaaagctgcggagatgatacatctgaaattgatgtcaaacctgatggttcctggagagttaagggcagacctaaactgaaggaccttacacagtggcatctaccagatggtactctctctctgtccacagatacagcagccaaacctggaatgtgcattgtaaagcacgaggtcaaagaagagccattgtctgaagaggtgggatgtcatcttaagttgggacttaggaaaaaaagcaatggccagtgggaaattagcaagagagtggatgctgatctggtgccgtcttctggtaacgaccatgaccattcaggacacgatgaaaacaaaaactgcatcactcactcaagcaatattgatgatacaaacattgcagatgaaggttataatttagagccagcaacaaatggttatcccatgacccatgtccatgatcttgactcttcatccgcagacgaaaatggtcctccagcatcgacagggcaggatatagtagttttgagtgactcggatgatgatgctatcatggtgttgtctcccggtgctgtgaactgtggctcgatgcataacactggaaatctgtttccacccaacacacctgaaaatttaggagtgtgtagtggagaaactggtggatgccccaaggagacatcattccttgcattaaaagaagattttggtgatccggggttgtcattttgggaaagtcatggtagtccccgagatgcttctacttcccagatccccgatgccagtacaaaggcagtagataatccaggtgaagtggacaactaccctgccaatgatcaatctaagcaagggcaagtttctggggctgattttggagtagcagcaaatccggtgccattggaagatgggcatgatagcgcactgcaaccttgttcaatgagtgaaagagatagtgccatgggtcttgctagcctgggagcggatactcaatcatgtgttgatgtccattctgacaattggacatctgtcagcattagtggccgtgatgaagttttaactgctgccaaaattgcatctaggaaaaggagcaatcctggagacagaatagaagatttagatgatgattttgaatctgcgcccattgttcctacagtttcatcaccatcactttgccactgcacaaaccttcacttgtgggaagcccaaaccaagatgagtgcagcggagggagatgttcagttcgaccgagattgatactagagatttcctcagattctgattagcacacatttgtgttggctgatgcctgcatgacttggagaaaaggaagggggtggatgtgatgctgtctaacgcggtcagcgaactggcaagcagctagaggcctctcctctatcctgtaattggagatcccatctctgttaggtggtagaacgtgacaccaggagcaacatatagagtggcataatagagctgaaccatatatacatgcagtgtaggcaattttgtaccatatatgtcatgaaccgaggtggcagttagttgatgtaaatatgctccctctctgtttttctatattattggctgaaaggagaggggaggatgcatgcttagtccggcctggttatttatcatttatttatgatatataatgaaaacggagtaccaggtaggtcgcagcggtagagaggtgcaaatctaatctaatcttgtgtcagacagggtcttcaaatcatatctttacttatgt

SEQ ID NO: 33094 - DNA, 1786 bp, Zea Mays
ttctccactcctgaattatcagaaaagctgattagaaaaaaaagttcaaccaggctaaaggttgccgaatcatacgcgccattgctcctgtccacgcaaataatccggagtagttatctgtctcctgttgcggtaagccgccactccgattttccaccgttacaacccaatccattcacagcatctgtaacggcttttcctgcctagctaccatggccacacaccgccactggctgctgctgctcttcctcccttgggccctcctctcccgccgcggcgcgcagcctcccgacgccctgtaccctgtcgtgctgctcccgggcaacacctgcagccagctcgaggcgcgcctcacggacgcgtacgagccgccgccggagtcgccgcaatgcggcgcgggcagcaacgagcgcggccgctggttccgcctgtggaggaacgccacggccatggacgaccccgccgtcgcgccgtgcctcgccgaccagctccgcgtcgtctacgaccccgccgcccgcgacttccgcaatgagccgggcgtggagacccgcgtcctcggctttggctccaccgccgacttcctcgccgacaccgaagccaacaaacctctgcatggggaggctcgtcgaggcgctgcagcaggccgggtaccgcgacggagagacgctgttcggcgcgccgtacgacttccgccaggctcccgcggcgcgggggcagccgtgccgtgccttcgcgcggttcacccggcggctcagggcgctcgtggagcgcgccagcagggagaacggcggcaggcccgtcgtcatcgtgtcgcacagccagggcggctacttcgcgctggagttcctgaaccggagcccgctgccctggcgccggaggtacgtcaagcactacgtcatggcgtccacgggcgccggcgggttcctgctccccctgcggaacctcgcgtccgtgccccgcgacgcgctggaggcccccgacgcgctcgtggcgctgccgtcgccggcggtgttcggtcccggcacgccgccgctggtcgtcacgcgcgccaggaactacacggcgcgggacatcccggagttcctggcggcgatcggagtgcccccgctcggggtcacgctgtacgagacgcgggcgctccccctgcagctcggcttccgggcgccggtggtgcccacgacctgcatcaacggcgtcggccagcccacgatggagcagctcgtgtactgggacggcaacttcagcgagacgccgcaggtggtgtacggcgacggcgatggattcttacccgtggcgagcatagtggccctcgacaccgtcatcggtggtgacccgaggcaggagtactacaagtctatcaagcttgccggcacgtctcacgctggcgttgtctcagatgctgcggctttgaagcgtgtcgtcgatgagattctttggagccctccaatatgagcaagtctgtcagagaccaactctatcgcctgtttttttttttcttttggcagccaatcgatttggaagtattgcctatgtccgaaaacacaataccactaaatcaaattccctacgccccgttccaaaattatactttttatatttttactagatagtttacttttattagatatatagagagagtgcgcgcgagagactgatagcatagtaaaatcatatatctagagaggccaagatgtattgtaatttggaatggaaggagtaaccgagtaagagctaataccctgttgtatactctagcttacatgtacaacgtcatttaatataaggt

SEQ ID NO: 33095 - DNA, 7627 bp, Zea Mays
cgcccgtcgcgttgcttcgatgccccccctcgcagtcgcgactcgcctcctccgcgccgttccccattcatcctaaaggcctaaaccctagcctccttgctcctgcgctccggtcgccggtgcgtcccctcctccgctggccgccggcgccggtgcaatcacccgccgccgccagtgcatccgtccagggctgcacggccacctgtgcccactgggttgtgcggtcctaacgcaagttcggcgccgaccaccgccgaactgaagccgtctgcccacacccactcgcggcagcaccgccggacggctcccggcactgcgccagtgcgtgctgcctccggtatagcggctgccggatcccgccgcggcacctgcaggcactaatcactaacagttactgcactgttggtatgcgagtcctagtttgctgctcatgctctaagatatgaggtagttctgtgtgagggatttgaaagatggcgtcaaaaggtccccggtcaaggctagaccatgacacaagagctaggcgtcagaaggctcttgaagctccaagggagcctcgacggccaaaagttcactgggaccatgtccttgctgagatgttgtggctggcaaaggagtttgattctgagagaaaatggaagttgtccatggccaaaaagattgctcaaagagcaaataagagcatagttgatcaagcagcaaagggcgagagaaaacagaaggaggaagaacatagaatgcgaaaagttgccgttaatatttcaaaggatgtgaagaagttctggatcaaaatagaaaagctggttgtctataagcatcaactggagcttgaggagagaaagaagaaggcacttgataagcaacttgatttccttttaggtcagactgaaaggtattcaacaatgttggcggaaaaccttgtagatatgccctattctcaaaacctagaaaccgagacttcgcagataaaccaaccatcccatcaagaggtagtagcagaagagaacttaaacgcaaccattccggatgatcttgataatatggaagtcgatgatgattatgggagctccttggatgaagagccagaagatgatgagcacactatcgatgaggatgaagctcagattaccgaagctgagcgcaatgaagaactagctgctttagaggcagaagctgacctaccactggatgttattctcaagatgtatacaaaaaccaaagttactccgaaccaggctaatgggtgtgatcatgaacttgctcactcttcaagtgacgaaggcaattcttctgaggaagtggatgatggtcattcttatgctgagtttgtgaagaagaatcatgaggacgaagattacattgctgctgaagaagtaaaggatgacgaagcaactttgtccgaagaggaacaattggcaaagaaagaagatcctgatcatctggaagagattaagttactgcagaaggagagcgagataccactagaagaacttcttgcgaggtaccgagaggatggctgtgcagatcatgaaacagctgagttggagaattcaccccattttgttgaagaggtcaataccgacaagtctttgaatgatcaatctgtgaacattttggaagcgaaaagtgatatttttgtggatcaccaatccagggatgtgctggaaactgagcacacgactctacaatcagaaattgcatcagagccttgtgctcaacaaaattttgtggaagagaataatctcactgatgttaagacagtcaatgaagataagagtgatgatgtaattgctgatgctgcagctgctgcaagatcagcacaaccaactggcaacaccttcttgactacaaaagtgcgcacaaaattcccattccttcttaagcattctcttcgtgaataccagcatatagggctggattggttagttgctatgtatgagaagaggcttaatggaattctagcagatgaaatgggtttaggcaagacaatcatgactatctccttgcttgcgcaccttgcgtgtgagaaggggatatggggtcctcatcttattgtcgtgccgactagtgttatgctaaattgggagactgaatttcttaagtggtgtcctgcttttaaaatactgacttatttcggaagtgcaaaggaaagaaagcagaagcgtcagggctggatgaaaccaaattacttccatgtttgcatcacaacatataggcttgtcattcaggattctaaagtgtttaagcgaaaaaagtggaagtatcttattcttgatgaggctcatctgataaagaactggaaatcacagcgttggcagacattgctcaacttcaattcaaagagacgtattcttctgactggaactccactgcaaaatgaccttatggaactttggtccctcatgcattttttgatgcctcatgtatttcagtctcatcaagagttcaaggattggttctgcaatccaatttccgggatggtggaaggtcaagataaagtaaacaaagaagttatagatcgattgcacaatgtccttcggccatttatactgcgtcgactgaaaagagatgttgagaaacagttaccaaagaagcatgagcatgtcatatattgccgactttctagaaggcaaaggaacttgtatgaagaatttgtcgctagctcagagacacaagcaaccctggcgagtgggaattattttggcatgataagcatcatcatgcaacttagaaaggtctgtaaccatccagatctttttgaaggtcggccaataataagctcatttgacatggctggtattaacatgcagctcagctattcagtctgcatgctccttgataagagtccattttctcaggtggacctgtctgatatgaattttgtgtttactcaaaatgaatttagcatgagttcctgggaagctgacgaggtcatctccgcctttccttcaagtatcacctccagggactgtgacctggatattttttgctctaataaggatcatcagggaagtaatttgacaaacatttttgaagatattcagaaagccctacaggaggagagaataaaggaatccagagaaagggcagcttctgttgcatggtggaatagagttagatgccaaaagagacctgtctatggcacaaacatgagacatgttttgactgtaaagcatcctgtatcaaatattcttaataagaggaacaatccattgtgccacatggactattcatcacgccttgcagatcttgttcttccatctgtggaacgctttcagaaaatgctttattttgttgaatcatttacattcgcaattccagctgctcgagctcctccccctgtttgctggtgcagcaaaggaaagtctcctgtttttattgatccagcatatagagaaaaatgcatgtacaagttttctcccattctgtctcctataaggtctgctatcgttcgtcgtcaagtctactttcctgataggcgtttgatccagtttgactgtgggaagttgcaggaacttgctattctgttaaggcgtttgaaatcagaaggccacagggccttgatatttactcagatgactaagatgcttgacgtcttggaagagttcataaatttatatgggtatacatatttgcgattagatggttctactcccccagaagagaggcagactctaatgcagaggttcaacacaaatccaaagtttttccttttcattttgtccacacgtagtggtggtgtgggaatcaaccttgtaggtgcagacactgttatcttctatgacagtgactggaaccctgcaatggaccaacaagcacaggacagatgccacaggattggtcagactcgtgaagttcacatatatagactcatcagtgaaagcactatagaggagaacattctcaagaaagcaaatcagaaacgagctcttgatgatttagtgatacaacgtggtagctacaatacggaattcttcaagaaacttgatcctatggagttcttttccgggcacacatctcttcgtgtggaaggtcaggagaagaattgctctacatccgtgggagcttcaaatgatgtggatctggctctgtcaattgcagatgttgaagcagctattagacaggcagaagatgaagctgactatatggctctcaagaagttggaggaggaagaagctgtggacaatcaagaattcagtgaggaggttgcgggcagaccagaggaggatgaattggttaatgaggaggatggaaaacctgatgagcacattaatgaagatcacaaatactactcttctgatgtagagaaggagaagcacattactttgtctaccaatcgattaaacaatgaaaaggctcttacattggctgttggtgatgaagatactgacatgcttgctgatgtgaaacagatggcagcagcagctgctgcagcagggcaagcatgttcatcttttgagaaccagctccggccaattgatagatatgcaatgcgctttatggaactctgggatccagtaattgacaaagctgctgtcaatcatcaagtaaatgttgaggaggaagaatgggagcttgatcgcattgaaaaactcaaagaggatttagaagcggaaattgatgaagaccaagaaccactatcgtatcaatcatgggatgttgattttgctacgacagcctatcggcaacatgttgaggctttaactcaaaagcagttgttggaagaacaggaaagacaggctcaggaagcagcaaaagagttggaagagaataatgataatatgagtcaccgcagaaagtcaaacaagaataaaaagaagactggcaaattcaagtcccagaaaagaccgcgtttgtcttctgaatcagaagtcattctggaggaaacctctgtagatacaatgagcattgatgacaatgcaccctcacctgagcttataagtgatgaatcgccacaccattattctaacaagcgtaagaagattatgtctgctactgaggaagatagtaacagcagaagtttaaaaaagtttaagaaaactaaatcaagttttatttctgagttgtcacctaggccgaaggaggaccttaatgattcagatccaaaatcagtggctagaactaaaagtgatggcagactttccatcccttgcatgccagtaaagcgtgttattgtgataaagcctgagagattgaaaaagaagggaatatggtctcgagattgtgcttcagactcatggacatctgaggaagatgcagttctttgtggaactgtgcatgagtatggtcctctttgggaactggcaagtgattttcttcactccttgccaggcgggtcctcctataggggaagatatcatcatcctttgcattgctgtgagagatacagagaacttttctgcaaatatgcaatatcagcaacagataattctaacagtgaaaaggctccttctgggactggaaaggctgtacttagagtatctgaggatcaagctcagatgttggtgaatgtgaccagtgaacttcccaacaatgaattgcttctccagaaacacttcatggctgtaatttcatctgtatggagatcaaaatgttgccgtcatccctgctgttttaggaataagcctggtggatcaagtgagaactggcccatggtaaactttagaccaagcgtcaatctagttagggaagcccttgcagctggtcaggctaagtttacgctaactgtgattccaccaccgtcaagaaaccaggaatactcacggaattatttagaattagagttagatttcttgaaagatcaacatgcctatgaggaagacttcccgtctgtactaaatgtatccatactggaaccagaatcatccaaacaggctccagagccagtggaacaatcattgttatctgaactttcatgtagacaggctgagaaccgactcaggtcagtgttgatgcaagtcttcattgctgttatgatggtggcggcggttgccgttatattagtttaaataaaacagtcattctttggatttcatgattttcctaatatttagctcacctctgctacacaaaatactgctaagcatcattttcacttttctttgcaggatagcgtcagaagcttgttatgatggtgaaagttttcattgggcatcatcatctttccacataaatgatgctgcccgccacaaatctggtttgaagtctatagggaagcacaaagcagcatcggaatctggtagacctcccaaatccaaagtccagaagattactgaattgcatcaggaagggccaattgccatgagtaattttctctgtatgcctgctcaactattgccaagtacagctgacttccacattagtgactccctatctgactttggtatcaacgattatgaattcaactactctgaggatctcttgcaagagtttgacgccctcgagttcttcccagatcagggtgactctggtctccttggtattgaagagttagaacctctttcggatttcacagatatcggatgaacatagatgagcaaattatggttgatgggatgctgtcctataccaagaggagacaagatcgcctctggcaggagcccaaggatataggttgagttgctcaaccatgcacagatgtgctgcaagctttatcatggctggctggagcaaagctgctggcttggtgaggtcacattgatctgacaagcttgaggatgggtttgcactaatggcggcattgggtaccaacagagaaggtaaaagaggaggccctcagcaccacccatttgttgctgtatatcgtgttcattctctgtttaatccaatgttgtttggctattttgccactgaaaacatctcacatgtcaagttggtggatgccatctctatcagaaatttaggatgtggcgccaatgtccaaagaatgatcagtcaagtgcagcttatcggcgcattatatttggtcaggaatcaatgcatgacatcaatatgatcagaactgctgttccagtttcatttgaggaatgcaatttctggtgattcgggatgcaagtttttcataggaggtaaagagcgtgggcatagttgtacatgtaataaaatgaataaggttctgtgaactctcggtctcggttatgccaattaatagccataatttgttgttagaggccagggggctttttgatcagcgggctgctgctgtgagccggtaacaatgtagctgattgtgcgcctccatattgttttcttggtaagtggactttgcatcactgccaagcaacgatgagatagagtaattggtctgtttcgcgcaaaaatactacgagcttgtattcagtcttgacctccagtaacctgaacgctgagaatgtttggccaaccacataatacgtaggctgactagctgagaatatctagctaatcccgtaatctgtaagctgagaatgtatggtgaatcccataatctgtaagctgagattgtttggccaatcaaggtcacaatgctgcctacaagctgagaatgtttggccaattaaggtctagctgatgtccttagcagaaaacaaaattttctaaacgcaaactgttttaataatagtaagaaaacagggctccacttatttgt

SEQ ID NO: 33096 - DNA, 2952 bp, Zea Mays
cgccaaagcagagcaaccacctctctctctctctcccaccagggaggcagggaccggtctccacagtccacacacacacagaggaaccaagtcacgaagacgaagagacaagggagcggttgcccggcgctggtttccctttccccgattcccagttaagcgcagcgatttggcgtctgatgattgcgcaatcgagcagcggcgcggggaggcaacaggacgcaccgaaaagggggcgcctttacaggacacgggcctcgcctttcccttgaatctcgccgcgccgcgcctcctttcgttttcccgcccgtcgcgacctttgcaactgcaaccacagcgagcgagccacggagggggcagagcggagccagaggtctctgacgcggcgcaggatcgcggcggcggaggggagcaagcagaggaggccaagaggtccgagggcctcgccgaagcgcgtgcggcgtagtccgcctctgtccgtccgggtccggcaacggcggcgagatggaggcggccgccgacctgctggagtacgagctgcagagggagatctccggcatcttgattcagaactacgtctgcggtttgcgccaggagtatgagatgaagttgtgggagcaccggaactgcatcagcgctctgaacaggaactgggcggaaaaggtttctgagatcacggcgctgcgagacgagcttcgcgatgttctctgtacttctgaacctgctactcatcatcaccatcaccgctcccacgggagtctagaagacgagacgatcattgcgaagacggaaggtgacagtgagcctccggtaacagagaaatcttctgagtctacgctcgagatcccagatttttccctcctgaagcacatgcacggcgaagaaatcacgagttttctcaggacagaatggctaaagctgcgaaggcagcacgagtccgagcttcacgagaagacagaggagctgttcagggtgaaaagggaacacgcaaaggagaaagcttcgttgcctcttaagaaagagcgggagcttgagctccacaggtcgaagctgctacagaccatcgctaggctgggcgagatagcctccaggaaagaggaatcttgctctgactgcaacgaggatgaggagatgtgcagattgaaggacaggatcggcgtgctactacaagaaaacaatcgtctccgaggcttgctggctgataagaagcaggaggttaaacatctctctttgcaagtgtcagattcaaggagcaaaatagcccagtactcactgccagagtcaaaactgtcgaataattgtgagaagcttagggctgaacttgaagattttaagatagagaggcacttgaacgatttattggactcatctgtattcagggaagtttgtcacaattatgaggatcagatatgtgatttgaatcaggagggatccttcctcagagacctgcttgatgaaaaagaagaccagctaagtatcatgtacgaagatagacagaagctcaagcatgaaaacgatcaactcgtatcgattgcagggtcaattatacagcatcatgaccaagccaacttggttcatgacgagcttatgatatataaggagaaattgtgcgagcaagaacttttgatattggagtcaaagggcgaatataactccatgaaaaggtgcctgtatgaggctatgcagcaaatccaggtatgcaagcaagaaattctaggcctgactgagaatttaacttctatgtctattgctttggagaaagccaaggaacagaatgcctcacttgacgccacaatccgagagatgaagaaaacaccagggcaaagcattggcagtcattgggggcaaactggggaatttgatcttaccagtatggagaagttatcaaagacatgtagtgacttcgaaagcagattagtagaaacaatgaaaagaaatgaaaccaggttgactagtatagtttgtcagtttagcccactggtgcagcaagttgctctcttaaggaaaaaagaattctggtataagcaaatactcgagattaaatgctcaaatctttggaaagcagaagccgaggttgatgtacttggtgatgaggttgacacccttctaagtgtgctgggaaaaatttatattgcactcgaccattattcgccagttttgaagcattaccctggggtaaggttacagagattttgatgcttgtgcagaaggtgttgaaaggagaaagcgtttaacaccgaaccactatgtgaaaatcttgacagatttcatgtccatattacaaacagtagcgcaagaccctaagaagagttagggcaatgtgctgtgggagaatatttacacgtacttactgcaaaggagcttcctagattagatttttttttttacgaacagtcgaagtactgaagtagccatgggtccaattaaatggtgtagagtaaccggttttcagcttgctagctagctttatttgtattacctccgttctcgaatatttgtcgctggctagctcatttttaaactaaaacacgacaaataaaaaagaacagaggtagtattagtgtgcagttatagttgaattcagactaggaattcaaaaggttggtttaacgatggtagctttacagtattagtgtttgggtagtataaatgtgtatgtaacggttgtaggtttaggttggatgatgctctggtgattattatttcaaggagcatagcttcttgtagtcatatggagtattgtatgcttgcagtgggtagggaagatggacttgtaacagctgcgtcccattcgttgcagttaaaatatacatgcagattctttgtgttgacaggaggtattgaaatgaacatgcttgactgatacattgcaaatgtctacggtatcatggatattccttcactgctaactcagcgcaaattcatggtctatttttgctcattaactatttg

SEQ ID NO: 33097 - DNA, 3414 bp, Zea Mays
gttcgtttaacgccaaatagcttaactgtacgaatactttagttctgtataaacagccgaccatgtgattttgtaaaacttcatcatagttgtctttactgcatcacaacagattttgcagcatgataacattatgcgcatttacctttgatcatcacaattttggggaaaatatcatttaagctttgtttttgagatgtcacctgtaccacatagcagagtctagataacattaatctgattggggatcaggacacctgaactttgtttgtgctcagttgtccatgcgaattgcttaattgtagggtagacctagtgaagggggcttccacatgaggccttgttcggtttgagggcttgttcgtttcacccttaacccatgtggattggatggtattgagttggtttaaattcatagtaagtcaaaatccattccaatccatgccaatacacttcaatccacatggagttgaaataaacgaacaaggcctaagggggattagatcccctcttgttcaaatttgaactggaggggatttaatccattccaattccaatccccctcaatccacccctaaacaaacaagccctgcccccccccccccccccaacccaagagagagagaagaggcttaaactgagacaaggcagagtctgtttgaaatccgtgacctcgttactgacagtgagatagctacgaacaagaagtgacttgcatagattttatcaattgtcctttgttttggtgccaatgatttttcatgcatcgtttcaatctggatttctcactcagtctggcttgacatatagttttattaattgtcatagttttggtgccaatgattttgcatgcgtcatttcaatctggattcattgcccagtttggctatttgtgttgatgcaagttggtgtaacaattgcagctcagatttcgtgatacttttgctttgtgcgtatttattctgtaggccacgaataggtattccgttaagtacaatggtcacagtttactcgtgtttccactgctgtcgagtcaaataagagaaatggaatatgtgtaaattgcatttctgtatggtctcctctctcctgtcatcttttatacccatggtatgtgtttctgcctcctgaaggagttcagccaagctgtatactggatgaaggatgatccacatgtatctggacatcctaatacaccttgccatactgatcggaaacttatatttataaattgtgaagtgtgtaaattctattgttcccagtatgttcatgaatccaggacatctcaatagcgctgtgagaaatcccaattgttaacctaaaggataaagtcaatctgtcatagtataaacaatctaaacttctcaactttgatgttcaattaattgcaccatttggtgtatatgagaagagttatcttatagcttgccagaatatgtttgttttagtggattattagttgatatctctgttttctatttttgtgttttcagaatatgcagatgaaagagcatccatacctcagaacacaactgtgctggcggaaagtcacagaagaattttctgtgccttgcaagtcagtggttactgactcaagctcaaagtcatgttcttccacggtagtgcaagatgaagatgctgcaattgctgcagtgattgatgccgctgaactcaaatcggaacaactcccgtctaaaaaaggacaaggcagtggaaggtttacgtcaggacgtaactatgggtcattggaaggggaggcacctccaccaggctatgtctgtcgctcttgcggtgttccaggccatttcattcaacactgctcacaggaaaacaagatacctccacctggatacatttgctacagatgccgaattccagggcattttatccatcgttgcccaagcattggtgatcccaagtgcgacaacaataaaatgctttgttctcttgtcccagtagttacacctgtcaatggcattttggattcacttgtcccggcttcccccgttagtgctgttgatgacttgccagcagagctccactgcaggctatgtaaaaaagtgatgagagatgcagtattgacaagcaaatgctgttttgatagtttttgtgatagatgcattcgggattatattattacagagtcgaagtgcatttgtggagtcaagacactagcagatgacctcattcccaatcaaacacttcggagcacaatcagcaatatgttgggaacacagactatcagtggtggaagtggtacaacaagacacagaagttcgtcaggcagcaaccctgaccccaaaatacagagccacactgcctcgacaagggaggtgaagcaatctagagaccaccagctaccagcagcatctgcacttgatgatgtgctccaggttgccacagaaggtgctctagtgaaccagcctcgggagaaattggtacccagtgctaaaatccttggtaaagatggaggcaattttgcacaagtgtcagcagagaagactgtagcaaatgctgaagccctcaaagtaaaggatggaactgaatcgacttcaaaggccaccactgtttcaggggcccgagaacacaatgtcacaaggacagatcaaccgaagaagtggaagaaggcagtcttaaccaagaactttcaacctaacaatgttggatatggttacaatgttccatttgaccctgcatattgcaatcccttcatcaatggatatccttgggcaactgaaccttacatgcctgaaactgagcccatgcatcgtgggggcactgcagctgcaccttcaaagcgccctgagaggagtgacaggcccaaggacactcgtcatcagccccaatcacgagagcacgagcgacaattgggctcttctcatgtctcagaatcgagaacgaggaacagaacaaggtcaagctccgagggaagggaccgtgggcattccgacagggcctctgttgaccaccatgaggaccactctactaggaagcggacgcgcgattcctctccgaagtacggtgatagacagagcgaccggaggtcgagtcacggttccaggagtatgatgactcctgaggaggatgcaagcgacgatgaatgtaatttcaagaggagatggggtcgcagatcatcaggaggcgtggacacaaggcactgaacggaagaatgtggactacggcggaccgaccaagtgcagcaatacattgctggtcaccagtgctcacctatccattttcttttactcgtaattgtatgtattcccctgcaaacaaaggggaacttccggttccctggcgaaatgtaatggtattaccatgcgatctctccaaatataaatggaagtttgctaagctcacgagttcttttttacttcttttaccctaacgccccgttttggaatcgaattccac

SEQ ID NO: 33098 - DNA, 2120 bp, Zea Mays
ggcggagggcgagaggcttcttctctgaccagcgaccggctcgccgtccagagaagaagaagaagaagaggaggaggaggaggaagaagaagaagaagcgctcttgggctccgtcgtcgcatgaagaaggaaaccatggaggggcatgtgccattgccattgccattgctcccggacggagaaactgcggtgggctacagcaaggacgacgcctcctcgcctctgcaagaggagatttcgagcctgcggtcaaggcagcggcgtgttgacaggagacggcgggaggcgctcgacaggctcgttgaactgaaaggaagcgttagggtcttctgccgggtccggccgctggctcacacgaacagcttgcatgcccagtcatcacctgttaccgtcgagcaggagaggatcacggtcaagcagccgggatcaagagggagttcggcgctgatagggttttcggccaggagtccacgcaaggaaggaaccggcggtaataagctcggcgtcgtgcctcgggctatccaggagctgttctctcgcgcttcggaggacggctcatgcgcctactctttctccatgagcatgcttgaggtctacctggggagtctcagggacttgctggcagcaccgaggcagcctctcttcaggcgaacagagtgcaaagcagcggcgtgtagtagtagcctcagcatactggcaacgaaaggtggcgccgtggaagtggaggggctgacggacgtctcgacgccggacctcaagaacgccagccagtggtaccgcagagggcggcgagcccggtcgacggcctggacgaacgtcaacgacgcctccagccggtcgcactgcctgacgaggatcaccataaggagaaggatgaggcatggaggaggaggaggagtcagcaagctctggctcgtcgacctcggcggcagcgagcggctgctcaagaccggcgcgtccgggctcaccatggacgagggcaaggccatcaacctctccctgtcggcgctcggagacgtcattgctgcgctcaggaggaagaggccccatgttccttatagaaacagcaagcttacccagattctcagcgactcgctcggcgatggttcgaaagttgtaatggtggtgcacgtcagcctatccgaggacgacgtcggcgagacggtctgctcgctgaacctggcgaaacgagccagatcgatcgagccgaacagagaaatcccacaggatctgaaaacgctgaagcagaagagggtcgcagagctggacagggagatccgcgccgccgaggaagagctgaagcgtctcgacgagcagataaggagagcggaggagaaggagatctcactcgaggaggaggaggaggaggaggaggagaagaagctcttcgcctcgtcggtctgccaggctctcagcgacgacgagaaggggtcgccgaggagcactctggtggtggtggggcacaccgatgccgcggagagcccgcgcgcgacgacggagaaggcgaagggcaggaggccgccgccggctcgtggccatggtacccgccgccggctgctgagctgagtgggagccagaacgcggcggccagggctagcaggtcggcgtcagtggcactctcgtccggtgtgcacaagttgaggtgcttgcgtgtcaacaagtccgatcaggtcaacgtaataagcaacagcagcgtcgactcgaccgctgcgtcggcaccgccgccgcggcggagggaaagctgcttcggctccaggccggttctacaaagagcggcagcgcccctgcatctgcacaggaggaggatgtctagcctgacatgaacaccgattgcacagttatgatttttcttaacttaattgtttttattagtggtgaaagggttctgaaagatgtttgtgtatgtatggttgttagcttcgtagttcttgactgctgtaactattggttggaggccccttgggcttttgttttttttttgggtttggcttggaaggggcaaaatgatgcgaggaataattgttgatacatggaataatggaatttacctgtggttctggttgcgatggattttgaatggaatttgcgaggtagcaaaacaatctaacaagttacgtagg

SEQ ID NO: 33099 - DNA, 5867 bp, Zea Mays
ccccactctcctccctcgccagttagcgggagcgggacagttagctgtaacctacctttccccgctcttcatcggcaaaaaagagggggaaaaaaaacgaaccctgaagaggagagggaaaaaactcgagaaaagcaaaccctaggttgccatgtcatcgacgacatcctaattcgccgcattgcatcgcccaggcaaggggcttttggcacaggtcggcgctcccctgtcatcggattcgattcccctgctcaatttgccgccgatccgtggttcggatcttctcgccgctcggcgactgtcgcgccattttttctctcgatccgtctgcgagacactaagcgcttcgccgacggtcgaccctgctgacgccaccggcgccaggtggcttgtcgcctactctggtccgccaaccgacgcttgatgcctccagggctccaaaggtaaaacactgcctccgtccacagatctgcgatgccttttaatgtttggataccgaatgggttgttgtggtgattgcgggcgaactgatggtgtaggattgctgatgagatcgaaactgtttctgttaatttatcgtggattcaactgaacccccatgctccacgcaaccgcccctggtctgggtcgaaactctacatatgatgggaggtgaaattctgaggaattatgttaacttgattcgtgggctcgtgaatggaacccagtggcagtgataaacccactgcaacagatgctaacgaatcagtggtgggtttagatggtgaggacactttgtctgagagggaatctgttggagcaaaagatggacctgccttgcctaatgggagtggaaaggaggctcatgcaagcagtccatctgcggcgaataagaggaagcacaacgacttgggttctaatcaaatggaactcaatgaaccagggacgccaagttccagctcaggtgattccacatggagcataaatggtctcgatgactgtcaccaactctcattgtctagaaataagaacgacgactctgaacattcggttacttcagctggagttacagtgatcaggcagcctcgtggcgtcttgaggttaagaaagctggctcagaatgttagtactgagagttggactggtggtcataatacttcacaagctaatggagttcctaggtcttcccaacacccgaggcggaacaataagagggaatcaattccgtcccaggagaatagagttagtggtgatgaacctgtcagctgcttgaggactgagaatggtacttgtgatcaggataccggcaccaagttctgttccaaaactgagttcttagctgaaaagcagtcacatctttcaggcgaacccccaaaagctgttcatgttgacaagggtgtctatgattatgtcaaagacgatgatggtgatagtttggaagaaaatgctgcctggatgctctgttctttatcagataacaaatgtgctggatcaccaaggaagggaactgataggttgtcaaagagatctttttctcagaattcaaaccattttaagaattcatatgaaaaaatcaaggatatatgtagtcctgctaggttgctgcggaagcgtgatggcaaagttccgttcttgaagcgtcgtcagcgtcggcatttttatgaagtcagccctagcgatgtggatccattctgcattgttaaagagaggatcagggttttttggcctcttgatgagacttggtactttggcatggtcaaggaatataatccggtcacaaggttacatcatgtcaggtatgatggtaaggatgaagaatggatcaaccttcaaaatgagaggattaaacttctgtttttaccagcggaagctcccaataaatctaaatgcaccaactcaaggtcagcgtttgagtcgaagcatgaacagggtgacagagaagacatgcatagaagcggaagcaatacagagagttttgagtcaggtcccatcagctcatggttggctcgatcaaaccaagcaaaatctgctgcactttgtgacatcaacaagcaagatcacagtcattccaatactgttccagtttcatttgaccaaaaacagtgtcgtgcttctgatgccaaggaatctattgattctgcaccatgtagttcacttgcaaatgggggtgtagaggttctcaaggataggaccatacctgaggacgggaggtttcactttgtttattctaggaagcgattttgcagaaaaaagaatgattttcttagcatttccgaacagcattctaattgccaaagaagagcaagttctatggttcttgcttcttgtcctgatatgaaatctagtattgcaactggtgcttcagttacatatgtcatacctgcattgagcctcccactgaaacctgtttataagttgctttgtgaagcctgttgtgtttcggtttccaatgctttctttcttcttcaatgtggtacaatggttgccttatggcctgttgtacatctggatatacttcttattgatagtgctttaggcttgaaacgtttccttcttgacacatgcatgagatcggcagtatcacttttctgtttacttgctggaagctttaagcagtgttctaggcagagaactaccaaggaatcaagaataccttgtacttcagtcagatttcagatatctggtgggcatggtagaagccaagtagtgtttatgtttttcagctttgttggtgtagagaaatggaaatgggaacaccttcaaggaaagcttcaatatcaatgttccaaaagggagttgtctaaagattccacaaaatgtacaggtcgaagagctcttccttcaatgggtctcttctctaagagtctaattattcagatatcaaacctgccatttgttgtttggatgaccggtgtaaattcactcaaagttttctggacatgacaactgcaccttcagtactgctttggcaccatagaaaaatgttaatggaaagcaattcgactaatggttctcagcaatccatgtcatgtgctttggatgaggatcatcagcagttggtaacagaacatgcatctgatacagtttgtcatgctccacttcaagtttgttcacttaatcttggttcatcaccttatagtccattggatatggtctctgctagttgtgcaaatccatctagctctactagtagggaacccaagattactgaaaggaatataagcccagaatgtaatgacaacagtattgatgatgcaatataattgacataaagtttcgagatcaaaatgagccttgtattggtgctgataggccatgttcctccaaccttagtgttatttgctcttcacagaagtttgcagaggatcgtatttccatcaatattcctcaagacaaagcaattgatgcaacaaatgataaacctcttgacaaagatgaaaaagaaaagcatcctatatctaacttggttcaggaattgaatgaacatccaattggtcgtgttacaccaactgcccccagaactacttcccatcggaaccggtttacgtctatatcacgtgcttttggagatggttcaaagttactgccagaagaccacatgttgactggcttcgctagtggttctaagaagccacgaagtcaagtttcatactcaggttctcctagaagtgaggaacttggcttaaaaaacaaagatcatttccgcaagatacaatctcatgtcagtgttaagacaagtgatgcaaaaaaacttcctgatagttctagaagtgggcatagcagtccagagctattgacttgcattgcaaatgttcttgttacagtgggtgatagaggttggagggagtatgatacccagatcacaatggattctgatgttcacagtgaacagaggatatgcgtgaaacttgctgaagggaccaagtatgctcacaaggtctgtcaagttttgcagcctggggccacaaaccgctatacacatgccatgatgtggaagggtggggctgagtggtgcctggaatttcctgacagaagccagtggttgattttcaagcaaatgcatgatgagtgctatagccataacatcagagctgcttctgtgaggaacattccaacccctggtgtccatttggttggaatccatgatgataatgatatggtatcctttgtgcgatctgaagattatcttgtccacatcggaacagatgttgaaattgctcttgatgaggcccgtgtgttatataacatggacagtgatgatgaagagtggatatcaagccggcagaaattcttagtaagagacaacaacgccacacttgagttggcagaagatttgtttgagagggttatggacaaactagagaagtttgcatatagccacgactctaatgaactcagcattgttcagatgaaggaactggagactgatgacctacctctggacattattgaagtgatacatgcatattggcaagctaagaggcagaaaaagggaatgccacttattcgacatttccagttcgctatgtggaaggtctacgagcaacagttacatgaatgggaatcgaaagtatgcagaatgcagggttcatcaaatgggtaccaaggaaaaaaaatgcctcccaagcctgcattgtttgccttctgtttgaggcctcgtggactcgatgtaccatacaagggaccaaagcagcgttctcataagaagcttatgtctacaggctgccatagcttttcaagacagcatgatggcttttaccggcaaggttctctacaagaacaggttctcttcgggcatttgagtcctcggaaagttctacaccaagatttttcaggacaaatattgtcaaaaggagtgcaaccgttgctttctctgatgatcaccagccgtcgccttccttccgccctcagagagttaaacggagcgcatctgaccattggaacactgtcattcatgactggcagaactcaaagcatctctttccgggctcgccccctgttgatattgaggagctcaaactgcgggatgctgcaagcgcagcacagcacgctgctgccatggcgaagctcaagagggaaaaggctcactgcctgatgcagaaggctgaccttgccctccataaggccacggtagccctcatgattgctgatgcaatcaaatcttccagcaggaacaagtctcgggattgccgaaggggatttgatgaatgaggaacgctgacttttttttgccttttgccgcgagcccttggcgtatacacacaacttgaactcgatgcttttgctgatgatgggagcgtgtttgcttatctaatgatcgagtcattagatagcatcccttccccccttctcccccctccccctcctttgcgtctcctgtacataggtttcttttcatcattcttttgtgctcttttacctcccgattaacatattgcccggtgatgaatgggccaggtcaccaggatgtaggttagcaatctggcgtgttgtctgaacagcggctagggaagtggcgctttacggagggttatggtcctgttgttgcactgtgatgcctttacgacattgcatattctagaaggagcacatggcatatcgtgggtcagtgggagcagtgccacatgacccctctgggtcataaataatctatttccgatggctcataggttgtgttcgatgacctaagccgtcggaaattttattgtggtcaacatatagtactcattggaattctggaggaacttgaacatgaggtccaacaacctcttagatatattttcgattccttgtgtgttctccaaatattttgcatccaataaacttacaaacactttcttaaaaatttccatgttttctcgatccctgtaggtgctgcgacatatgtt

SEQ ID NO: 33100 - DNA, 944 bp, Zea Mays
atgtcttcgctgccaggaggcttcctgtgcgtgcgcgtcctgcgcgggatcgacctcgtcagctgcgacgccaagggcagcgacccctacgtcgtgctcagcctggatggacagaaactgaagacgagcgtgatgaagaagacggtgaacccgttgtggaacgaggacctcaccttggccgtcatggacgcgtcggcgcccatcaagctagaggtcttcgacaaggacacgttcagcaaggacgacatgatgggggacgcggagttcgacgtggaggcgctggcgcagatcgtgcagatggacctggaggacatccgcagcggcaccgtcgtccgcaccgtccgccccggcggcacgggaagctgcctcgccgacgagagccacatcatctgggacaagggccacgtcgtgcaggacctcctcctcaggctccggaacgtcgactccggcgtcatccacctgcagctcagatgggttgccaccccacctgaaggcagccagctggaggccaacaagaaggccatgaacatccaggcaagatctgcatgcagaccttcatctgcaccacctccgaggccaagtgcaaagaacatgcggaggcgaggcatcccaagaacgacctctaccagtgcttcccccacctcaagaactagtaagcagcagaagcatatgctctgctcagctaaaagacaagtactacatatatatatatacgctgtgtgtcaattaatgggttctaggctgctgctgatgcggctgcttcgttcgtgttgccccgtctgattatgtactgtaacccttggctgtcagcctgctgtgctaaaaaccattggttctgtgtggattcatgctgcctgcctgtgctgtgcttgctcaatattttcttctcttttccttgtgttcttcggtgagaatttgggacattgcaaggatgccatttatct

SEQ ID NO: 33101 - DNA, 3203 bp, Zea Mays
acttttgcccttcgaactaaaagcgcctgcatctcaaacccgacggcgctctcttctctatcctctgtgtcccctccaccaaaaccgacgacgacgtcgctctcctccaccggtgctcggcgctctccctccaccagcggtggtccacagacgctcggcgagctccaccggcgggcgctggcggctggtcagatccgctcggcagtcatccatctggcacatcgggtagctcgcgcctccgttggcagtcccaccgccgcccggccctcccccagcgcccccggtgatccggaccgcacccgcttactcggcctaacgaccggctcctgccccgacgcagccgaagctcccagcgtcctcctgcaggccgagctgaaggttcagcgcgccggtggagttagacgacgaaactccgtcacgtcatacctctccgcctcccgtcttccagacgtctctaatcggggtcccagcgtctcggagaagaggagcagcacggcacggcagctgtggcgaggaaggctcctgtcccatcccaacccagttagcagccgcccaaggaggaggagatccaatcggcgtgcgggcgtccgcggtccatccatcgatccaattccaatctgcaggcatctcgagtgcaccgtcggccgcaccagcaggcagcatcccgacaccgccgttccccagcagacagcagcaggtcgccgtcgttccccagcaggcagcaacaggtcgccagcgctagtcctcgacggacgacgaccagcatcagccgccgccccagtcgaccagcatccacggcggcacgagcccacgaccagcagatcaacgcggtggcagatcaacgagcccacgactagtcagaaaatttttacagcagcatatccaccggatacccgatacccgacgggtacccggtgggcacgggtatgggtccatttttttacccgattggcttggtgcgtatggatatttgtaaagggtcgagtatgatatcgggtcgggtattatacccgaacacaacccgacccgctgccatccctaaacgcagctattctgtcaattccttaaatagagcagcactgagcatatccggcggagaatttagttcagtgccggtttccatttcacttcatatctgggcttaatcttgtgtcagcttacctacacattgcaattgttgtcacatagcttatgaatgaagcacggaaatgatcgagttatattagaactatctacaccgacgtattgtgttgaatttaagatgccatcgatgccttttaaatgtgtatagtgctttcgacagccttgtgtttgcatgccgaatttcttacaagtatcatacatgtataccgaactgtgaatttaggttatactcaaactgcacacagtagcatccttctggtacaggtgtatgtaattttgaagtaacaaaggatttggaacccagccctctgttctccaccaccgcttcgaagatgccgcaggtaatggtggtggcacggaacttcatggatatggtggctgctcttcctgcgggcaagcttgatatgctctatgactcagcctttatctgtgaggcagtactcaggtcacttcccccactggcaaagaagtatgcactgcagatgttgtatgtgctggcaccagtgaccgctgcagcaatggaagagtgggtgcttgatgaatatgctgccaagcataaggttgccattgataagcttctacagctcagggtctttgttgaagtgcgcgacagacgacgggacgtgagctacaagatgaatcagaagttccagggaaacatgcagaagtatttggttgatggtggaagtttaccaagggaacctttaccattaagtgtcactggtcgattgcccacaccagcagatctggaagcctatgctcttgatcaatgggagtgcttcttgttgcaattgatcaattcatctcaagtcgaaaaagggtcaagttttagctcctccatgatgaagacgtttcagcgtggtcttctgagttcaagggatggtgaagcttcaaagttgactgaaaatggcttccaatttcttctgatggaaacaaatgcacaactttggtacataatgagagaatacatttcatctgctgaggaacgtggagtggaccctacggagctgatatcatttctcttggaacttagctttcataaattgggagcggcttatagcttgaacactctgactgatgtccagaggattgccatcagggatcttgcagaattaggactagtcaaacagcagcagggtcgaaaggatagctggttcattcctacccaattggctactaatctttcagcaagcttgtcagattcgtcatctaacaaagagggatttgtggttgtggagacaaactttcgaatgtatgcatactctacttccaagttgcactgtgaaattctacgcctttttgcaagggtggagtatcaacttccaaacctcatcgtaggagctgttacaaaagaaagtatctatggtgcttttgaaaatgggataactgctgagcagataatttcatttcttaggcaaaatgctcaccctcgtgttgctgacaagatacccgctgtcccggagaatgtcacagatcaggttgtgggaaactgacctcaacagggttgagatgattccatcgcatttgtacgaagattttcctagcaaggaatggtttgaacaatgctgtgattatgcaagggataatgggtacttgctgtgggaggaccccaagagaatgagactaattgtacgaggggagttccaccccgaaatgagggagttccttcgcaggcaaagatgaggaacgaccttgtacttgacggaccatgctatgcttctttgtagtgcatagaaacactgtatcgggtaatagttctcctttaaatatcaggaaagggtctagaaaagggctcagtttttgaattattttggtgacctgtgagctgtggaagcatatgaataatgtggtgttcaatggagcaaggcccaacatccttgatctgcttctaaatgttactagtgactgtaccctatgctggtgtatggctggtggccaggtcctgttggaactcttaggtaggtagtatggtgggatggagttggtatgctcttaatttgttgttatttggattgattctatataggacggagtgattttaaaaatgaaaaaaactcaaa

SEQ ID NO: 33102 - DNA, 5404 bp, Zea Mays
ttccaagtaaatccagttctccctcgtctccgtcgctggctcgtcccggccccgcctgtgcgccgcggcccaggaatcatgccgagcaagtggcaggtctggggccagcccgacggcagcatcgtctggctccccgtctccgacgcgcccccaaacccgcctcggccgggtccgcttcgtcccgctcctcgtcatccgccgctgcccgacgaagcgccaatcgaagaaaccctatgcccggacaccgccggcggatgccgtatctcttctatggccgacctactccttcaagcgcgggagcagctgattgaaggcgatgcgatggatggattggctcagagtgtcaatacggctggactgttctccaccgggtctgggaggccactggctgtcagccagagagccgtaaggagggccagtgcgttggttggcgaggaagtggacgaggctactgataacaataacaagaagagaaagaaaccatttggttgtgatgctggtctggagggtgaactggcaaacttacatgttccatttggaggtggtgtgcataaagataacttcttcccaatgttccaaagtggatctggtaaggcagtcttgctcaacaaggactcaattcagaaggcaagagctgttctagaagaaaatgttgagaatgcagctggtgccaaacagccaatgttccataccagtacgggtagatctgtcctagtcagcaagagctcaatcgataaggcgagagctgttttagggggtcggatgattgcacatgaaggagatgtaggaggtgtggatggtatggaacagtttcctgtgtctcaagctggttcaggaaatgtggaaggtccaggtagaccggccaatcagtctctgatatttcaaactagttccggaagaccagttttgatcagcaaaagatacgtcgagagatctagggctctgctgatggatgaagatgttaaaaatattcgacaatgggatactggctgccagctcccaattttccaaacaggacttggaaggcctgttgctgtgaaacatagttcaattaaaaaggcaagcacaattttgggggatggagatgttaaaagaagtggtaatggacataccggtgtttgtaccacacctttccaatttgaaacaccaaaatccgttttgatgagtagcagtttgattattaatggcatgacagttacaccagaagaaaatacttcagtgcgagcagaaaaatgtttcaacgatgatggccaattgccgttatttcagactgggtcagggaggtcagtcacagcaagtaagggttcctttaaaagggcaagttctgttctggagccaagaaatattgcaaaggaattggaagatgaatctcatctcaatgatggttatgccacctcaatatttaaaactggacttggaaagtctatcttaccaactgagaactcaagagaaagggcacaatttgtattagaggctaaagaggctgtaaaacaagcagtaattagtgacattggagctggctttggtgaaaatccaatgttccattctggaaaacaacagttttcacctgaaaatgatacttcaagacctagggccagtacccccatggagcaaggcaaatttgcaacaaaaggatatgaagactgtggaagtccattgccaatgtttcaaactggatctggaaaatctgtattggtctgtgaaagctcgatgcaaaaggcaagagccgttcttgaggaagaagagcactacaagttggttaagatggacaaaaaaattgcagcctcagcttcaccgctcaagacaagccatgcaagaacagtaaacatatcttcaactggtgtttctagagctgctaccttattgggcttggaggagaataccctttcaacacaattttttggacatgttcagcactgcaggtggccgatcaatggctatctctgtcgatgcactacaacgtgcgaaaagccttttgggtgattcagatttagtggtttctccaaatggttcaattggtcgctctttggcatcagctatagagaatctaccaaaaccaactatttctccgaaaggagatgtatctaacctatcatatggaactagagcaataggatatgctgtacctgacacccctgtgactaaaacaagtgctaatcagtttcatatgggaagggaatatcgtccagtcaatgaaattccaaaggtccccaagcctccctccagatgtttatctgaaggcgacaatgcgagtaactctaaagacaagacccagtggcaccatatgccagctggaccattggttgacatcactaattacatggctacatgttctggaaatacggactgcttagcaaatggaaagagaattattggggggagaaactccgtatctccattcaaacggccccgttcttccaggttcatcactccaataaaaaacaacaaactatcttctgctggagaatccatagtgccaccaatgcagatcagtccctgtaggacaatgctatctgtacgttatcctttccaacatcaaaggaaaaattataaagaatattttggtggtcctccttgcttcaaatatttgactgaacatgtgactgatgatgtgaagctcatggatgcaagaagagctgagaagtttagatttcagcatatggatactggtgcagaagagtttcagaaaatgctgctcacatgtggtgcttcattgtcatgtgcaacaaaagaatgggtcagtaaccactataaatggattgtgtggaagcttgcttcacttgagaggtgctacccaactagagttgctggtaaattcttgacggttgacaatgttcttgaggagcttaagtaccggtattcacttgatgcatcattggatgtggcacttctggaacaactagagaaaagaaagcttttcgtagggcagaagcttcggatatggggagcttctttatgtggttggtctgggcctgtgtcatttcatgaggtgtctggtgttgtcaaattagttgtccacataaatggcacctatcgtgcaagatggaatgatgccttaggattctgcaaacatgttggactcccactggcattcaggtgcataaaagtttctggtggtagagttcctaggacactggttggaatcacaaggatatatcctattctctaccgggaaaggttgcctgatggtcgttttgttgtgagatctgaaaggatggaaagaaaggcgctggaactataccaccagagagtatctaagatcacagaagatattctgtttgaacaacaagaaaactgtgacagtactgatgataacgaggaaggggctacaatttgtaaaatgctagagcatgccgctgagcctgagtttatacttgcgggcatgactccagagcagttgaagtgtttctcatcttatatagaaaagcaaaagattgttaagcaaaatgaagtatctgagaaggttgagaaggcccttgttgttgctggccttagttcaagggatgttacaccatttttgaaagtgagagtgattggccttgtcaataaacattcagcttccacatccagtaacaaggaagggctaataacaatttggaatccgactgagatgcagaaagataatcttgtggagggacaagcttattctgttatgggattggtaccttcgaactattgcaccgaaatcatgtacttgcatgctagaggatcatctacaacatggaagcccttagcatcagctcagactacagattttaaaccattctttacccctcgtagagcaattgaactcttgaaatttggtgaggtgccgatttcaagtgaatttgatattgcaggtcttattttatatgttggcaatacttatttatgtaacaacaagaaaaagcagtggctttttttaacagatggatctaaatttgtctctgggcaagggtgtgaagagcaagattgtcttctagctgttagcttttcgtccgcaaccactgatgaagactctacattatttagttacactctctctggaaatacagttggttttagtaatctggtcaaacgacagaaagacgagacgaggcaagtatgggtagctgaggcaacagagagctcaagctacactctttccaacgagattcctagaaaatctcacctaaaagaagctgcagttttggctgagagatgggcttctagatcttatcataaaattcaagagctaaaagaaagggttttatgtatagttggcaacgctggtgtctgaattataataaacggtaccacctgctgtttttggaaatggtgcaagattttgcttgggggttgtcttagctacaccattatttctcactgatgttggttggttctggttggagcctttttaacgcaatatgaatggcccttgcaaaaaacttcaagagcagcaagatccttgcacaaacttcaaaaatcaacttgaagatgtacacatttgaagacacgaggcttcagggctgttttctaagtctgtgtataaagcctttttcagagggtcgattaactttgagccgtggaaaaggttatggagatcttgggcgccgcctaaatgcaaaacttttctctggctagccattaggaacaaatgttgaactgcagacagataggagaagagggctttctcacctagaggcctgccccctctgcgatcaagagcaggaaacagctcaacacatcctaacgagttgtgtttttgcaaggcttttttggcacaacattatggctcccttcggtatgggtacctcaccccgagtcagaatgaacttatcctttgcagatttgtggcgaaaagtgagcaacaatgtgcataaagagaagagaacaggaataaacaatgctattatcttggaggcctggtgcatttggcggcaaagaaatcgtacggtttttgaaggagatttgccagctgttagcaaggtgcagcaaagttttctagaagagctaacatgtttggtcttgactggggctcatcaccttagcattttagggataattgatactcttagagcggtcggattgggctctcttgatcatatgtaatttttgtttcagtttcgatgtggtgtgggtgatgatcttgctcagcaagatcctcatcttgtaggattttcttttctctctaatataaaatatgggacgcgttcgagaaaaaaaaacttcaagagctaaaagaaaggcttctatgtatagttggcgaccctggtgtctgaattataataaatggtgctgcccgccattttttttggagatgatgcaagattttgcatgggggttcttgccataactacatgtctacatcaatatttctcagtggtacaattagaagatcaacaacccacattggcacattgtatgcacaactttcagaacttcg

SEQ ID NO: 33103 - DNA, 7400 bp, Zea Mays
cccaaacgagaaaaaatgaaagggaatacacaaaccactgtgtgaggacctccgccaacctccagtggctcccatctctcctctagtccgtaccatcggtgaaggcagggcagggcgaggcgggggccgcctccgcatcgccgcctggctgggtcggtttccccgcgatatcaagctggctaccccgcgctcctcccaccacctctccgctgccgcggcagcgggggtctcgtaccccccgccgctgccccccacgccgcccagcgccgcggcctcgacgtccgacatgggcgctggcggcgccgccaagcagatcgtcgattccctcctcgcccgcttcctcccgcttgcccgccgccgcatcgagaccgcccaggcacaggatgggcaatacctccggccatgtgatccaagctatgagcaagtattggattctctagccatggttgctagacacacacctctacctcttttggaagctcttcttcggtggagagaaagtgaatccccgaaaggtgctcacgacgcgtcaacataccaaaagaagcttgctgttgagtgcatattctcttctgcctgcattcggtttgctgagtgttgtccacaagagggaataacagaaaaactttggattggcttagaaagtttcgtatttgattggctaattaatgcagacagggttgtgagccaagtagagtatccgtcattggttgatttacgaggtctactcttagatcttgttgcacagcttttaggagctttatcacgcataagattcagttctgtgactgaaaggtttttcatagagcttaatgtgcggcgtattgattcacttgctcttagaagtgagacactcagcataatcaacgggatgcgctaccttaaattgggggtgaagacagagggtgggctgaatgcttctgtatcctttattgcaaaagcaaatcctctaaatcgtcctcccaacaaaagaaagagtgaattgcaacatgctttgtgtaacatgctctcaagtatacttgccccacttgcggagggtggaaaaaaccattggcctccacttggtgtcgaacctgcactgtcactttggtatgatgctgttgcacgaataagagtccagctcatgtattggatggataagcagagcaaacatgttgctgttggctttccacttgtcacccttctactttgtcttggtgatgccaatgcattcaactctagtttttcccagcatatggaaatcctgtataagtatctcaaggataagaaccatcgatcaatggctttggattgtcttcatcggctagtaaaattctatttgaatatttatgccgattaccaacctcgaaatcatgtttgggactatttagacagtgtaacctctcaattactgactgttctgaagaaaggcttgctgacccaagatgtgcagcatgataaacttgttgagttctgtgtgaccttagctcagagcaatctggattttgcaatgaatcatatgatactggaattattgaaaccagatagtttgagtgaagcaaaggttgttggtcttagggctttgctcgagatagttgtttctccatcaaatcaacaaattggcttggatgttttgcaagtatttggtattgggcactatattcctaaggtgaagtcagcaattgagtcaatactaaggtcttgcaacaaggcatatagcctggcacttctcacatcatcaaagactacaatagataatgtaaccaaggataaatctcagggatcactcttcaggtctgtgcttaaatgtatcccatacttgatagaagaggcgggccgtaatgataaaatgactgagattatacctcagcatggcataagtattgaccctggtgttcgtgaagaagcagtgcaagtgttgaacaggatcgtacgttgcctaccaaatcgtaggtttgctgtgttgaaaggaatggccaatttcatcctaaaacttcctgatgaatttcctctcttaattcaaacatcacttggacgcctggtggagctaatgcgtttgtggagagtatgcctatctgaggaggccttggcaaaagacatgcaaagtggtaggcgtttgagtataggaggggatgcactacagaggtctccttttcataggtccagggatgtatctgaatttcgcgcctcagaaatggatgcagttggccttgtctttctcagttctgctgatgttcaaataaggctcactgccctggagttactgcgatgtgttcgagcactgcaaaataatctcagggattactcagcaaatgaatggggtgacaataagctgaaacttgaaccagagccaatatttatcatagatatcatagaggagaatggggaagacattgttcaaagctgttattgggatccgggacgaccttatgatctaagacgtgaaatggaccctattcctttggatgtgactcttcaatccattttggagagtgtagataaaaacagatgggcgcgctacctcagtgaaattgtgaaatatgcagctgaactttgcccgagttctgtgcaggatgcaagattagaggttattagaaggcttgaacagattactcctgccgatctcggtgggaaggctcagcaaccacaagattctgaaactaaacttgaccaatggttgatatatgccatgtttgcatgctcttgtccacctgatattagagaagaattttccatcaaatcagcaagagaagtcttccatatgatttttccatcattgcgtcatggttcagaagcatatgcacttgctgctacatctgcccttggtcactcacatttagaagtatgtgaaatcatgtttggagatctggcattatttgttgaggaggtgtcatcagaaactgaaggaaaacctaaatggaagaatcctaggtcccgccgtgaggatctgcgcactcatgttgctaatatacaccgaattctagctgagaaggtttggcctgggatgcttagtcggaaacctgtcctctgccagcattttttgaagttcattgaagaaacataccgccaaattactatttccttggctgatagctttcaagacttgcagcctctgcgatacgcattagcatctgttctgagatacctagctccagaatttgttgatgcgaaagctgagcgatttgacaacagaatacgtaagaagctttttgatcttctccttacttggagtgaggattctggtagttcatggggacaggaaagcagcagcgactatcgtcgtgaaattgaacgatataaaagtaatcaacatacgaggtcaagggaatcatttgacaaacttgcatttgacagggaaatggctgaacagctagaagctattaattgggcttccatgaatgctattgcttcattgctttatgggccttgttttgatgataatgcgagaaagatgtctggccgggtgatatcatggattaatagtttattcatggaaccatctgcaagagcaccttttgggcattcaccagttgatccacgaacaccatcatattcaaagcatactgatggacgttttggtgggagggacaaacagaaaactagccacttgcgactcctcttagcaaaaactgcgctgaagaatattttgcagacaaatctggacttgtttcctgcttgcatagatcagtgctactctccagaccctcaaatagcagatggctatttcagtgttctggctgaagtctacatgcgccaggagattccaaaatgtgaaatccagagacttgtgagcttgatcctctacaaggtggttgatcagacaaaactaatccgtgacagtgccctccagatgttggagactctctctcttcgcgaatgggctgaagacgatactgatggtgttgggcattaccgggcttctgtcgttggcaacctccccgattcctaccaacaattccagtataagttgtcttcaaagcttgccaaggaccatcctgagctcagtgagcatctgtgcgaggaaataatgcaacgtcagcttgatgcagtggacattattgcacaacatcaggtccttacatgcatggctccttggatagaaaatctcaactttgtgagactgaaggaatctggctggagcgagaggttactgaaaagtctttattatgtgacatggaaacatggtgatcagtttcctgatgagattgagaaactttggagcactgtggcaagcaatactcgcaatatcatcccagttttgaacttcttgatcaccagagggattgaggactgcgatgccaatccatcggcagagatcactggtgcatttgcaacttatttttctgttgcaaagcgtgttagtctatatcttgctcggatctgcccacagcagaccatcgatcacttggtcttcgagctatctcagagaatgctcgaggacgacgaagaaccagtcaggcttgggaaggttgatgtctctgcaaatgttgtattggagttttctcaagggcctactgcctctcaggttgcaacagttgtggatagccagcctcacatgtccccccttcttgttcgtggttcacttgatggtgcagttagaaatgtcagtggaaacctgagctggcggacatctgcagttaccggccgaagtgtatctggcccattgagtccgttggctcatgaggtaagcattccaaacccaacggcaggccgatcaggacagctacttccagcgttaattactatgtcggggccattgagtggtgttcgaagctctgctggtaatctgaggagccgccatgtttccagagatagtggtgactactactttgataccccaaactcaacagatgatattttgcatcaagggggcagtggaattcacgggatcaatgccaatgagctccagtcagcactacaagggcaccaacacttgctttcacgtgctgacatagctttgattcttctggctgaaattgcttatgaaaatgatgaagactttcgtgaaaatttacctctgttgttccacgtcacatgtgtttcgatggatagctcagaagacattgtgctcgagcattgccaagatttgctcgtgaatctcctctactcgttggctggacgtcatcttgaactgtatgagatcgaaagtagtgaaagagagaataagcatcatgtggtgagcttgatcaaatacatccagtctaagaggggcagcttgatgtgggagaacgaggaccctacccttttccggatcgaacttcccagcgcttcactcttatcagcacttgtgcaaagcatggttagtgctattttcttccagggggaccttcgtgagacttggggttctgaagctcttaagtgggccatggagtgcacatctcgtcacctggcttgccggtcgcaccagatataccgtgccttgcgtcccagtgttaaaagtgatagctgcgtattgcttctgagatgcatccatagatgcttggggaatcctgttccagccgttctgggctttgcaatggagatactgctgactttacaggtcatggttgaaaacatggagcctgagaaggttatactttacccgcagctcttttggggctgcgttgcactgatgcataccgactttgtgcacatctactgccaggtgcttgagttgttttgtagagtaatcgatcgcttgacattccgtgaccggacaacagaaaacgtgttgctctcaagcatgccacgtgatgagtttgacatcaatgggtatgcaagtgacctccacaggctggagtctagaactacttcagagagattgctatctgtgactgggaccgggaaggtgcctgcttttgaaggggtgcagccgctggtgctgaaggggctcatgtccacagttagccatggatctgcaatcgagttgctatctaggatcacgatacctacgtgcgactctatatttgggagccccgatacaaggttactgatgcacatcacaggccttcttccatggctcggattgcagctcacgagggaagcaccaccttcccttgggtcagcttcgccactgcaagagcagaaccagaaagcttactatgtgtcatccaatatttcggcatggtgccgtgccaagtctctggacgatttggccgaagtgttcagagcgtattccttcggggaaatcatgtcgttggaagatctgtttgcacgagcttcaccaccaatctgtgcggagtggttccctaggcactcatctttggcctttgggcacctgctgaggctcctggagagaggccctctggattaccagcgggtggttcttctgatgcttaaatcgctgctgcagcaaacccctgtggatccgtcacagataccccaggtgtacaacttcgtgtcgcagctggtggagagcacattatgctcggaggcgctgaatgtgctggaggcgctgctgcggagctgcggcggcggcgggcaaggcgaggaggctgggtttggtgataacggcgggcatgggagcggggagaaggtcctccagagcatgctgcttcctcagtcgtctttcaaggcaaggagtgggccgctgcagtacgctgcggggtcggggttggggtccttgatggggcaaggcggcggtggcagcagcagcgccgcagatagcgggttggtggcacgggatgtagcgctgcagaacacccggctgctgcttgggcgagttcttgatacctgcgcgcttgggcgcaagagggatcacaagcggctggtgccatttgtggcgaacgtcgggtagaccttgccaacatatagcagcacaattttgagtgggcagggcagcagccgccagcagagcgcacgcagagtgcgtgcgtgcgtttgtgaccgggtcagtgtcgtgcaaaggtggccacgcacatagacgtagctgcagttcttgaaactatttatttatttgtttatttattttattgttttgttttgatgagtgaggccgtgtgtgatgtatgtatgcatgtaattcgaaaccaactatggccgtggatggcatttgtattgtggaaaggagagtagaaattgatgatgaaacacaacaaacaggtttggaggcgtccttgtgtggtgtgtggatatgatcagccagtcacagtgtggggatgagagtgaaagttgctttcttgagtttcttccgtcgtgtgtccgggcaccaaggttgtcttcagtggaccgtataaagcaagagatttgcacttagatgatactatttgtatagtaaagtttaaaatagggaatgagataggatacatggtgaggatagccaaagatgataggtgattcaaagtctcctacatagcatcctgactgtgactttgaatcatgacacaacatagcacaagattagttggttaaggctgtctccagtagatcctcgattttatccc

SEQ ID NO: 33104 - DNA, 3841 bp, Zea Mays
accacggcatccaccattccagctccaggccaggagaaaacgttccgggactgggactgcgttcaccttgctttttcttcccacgctcaccccgcaccgcgtgccctctctggctctctccctctcgtggggacgactgggcgaccgccgccgccgccgccttacgccaggtgcccaggtcttagtcggccccttcgccggcgacgaggacctaccagctgtgaataaggttgtctggaacggccgtgggctctgcggatggcaggttctgtggtaacggatgattcagctgctagcacaactggaatgagggatgatgaaaacagtctctctggcgagtccttctctgagtggaggtcctgtgatagggcagacagcgataccccttcaacatccccacccttctgggatagcgatggtgatgatgatgatcctggcccaaagccttcagaattgtttggacatcacacttggaggattgaaaacttctcaaaggagaagaaaagagaaatgaaaagtgagccatttgaagctggtggttacaaatggtatattcttgtataccctcaaggatgtgatgtctctaatcatctttcattattcctttgcgttgctaatcatgacaaacttctcccaggatggagtcattttgcacagttcactatagctgtagccaatatagatcctaaaaagatgaagtactcaggttttggaagaaggaacatgattggggatggaaaaagtttatggagctgtcaaagattcaggatggttttcttgttgacgatgttcttgaaatcatagctcaagttcaggtcatcagggagaaagtggatagaccttttcgttgccttgatcgtccttatcggagagaattaatccgcatctatatgacaaatgtggaacaaatctaccgacgtttcgttgaggagcgaagaagtaaattaagcaagctcattgaggacaaaatgaaatggtccaggatggaagttctggcgaggtttacaaagtttctatggagcgtgaggaaagacgcctaactgagcttgctcagaagatactagagacatttgtgctatctcatatatttagcggaattgaagttgcataccaagaagctgttgctttgaaaaggcaagaagagcttattcgtgaagaggaggaggaggctggacttcttgaacatcagatgaaggggaagcgtggtggtggtgcaaatgaaaaggacaagcgtgccaagaaaaagcagaccaagcaaaagaagaacaaccgtaaggctaaagacaaggaaagagatgtgaaatgtgaggttaaaattctggaaaggcttcatgatgaaactgttattgataacagtgatggcttaccagctaaggtggaagtgatagccaaggttgatgccttggaagaaggttcttcagatgggtcagacatgccaaatagtgttacaggtggttcaggccgcaatagttctggctgctgcacagctccaaaactggatcaggatactgttctgcttaccttgagagataaacttcgtaagctagggcagcgtctgcaagagaaaaacattgaggggcagaaacttctcaaagctcattttgaagctagggacacaaaagtgaaggtagaagaatcttctgactcatctaattctttggataggccacctgatgttccagagagctcgatgcattcttcagaagatacagttgatcttaaagttaatggaacaccaaataaggatgcctctgtggtcaaccctgtcctggaggaatctgtttcaggcataccagtcactgcaaagaatgaatccttgccttctgccagaacaaaagaaggcccagtttcaaacaaagataacgcatcaagtttgaaaatgaaaaccatggcatcttgcttgaaattgcatccagctgatgtggataaagatgccccttttccttctaaatcaccacgaatcaatagggctgctccagttccctcgaagttaccttcggctgataaagctactccagttcttccaaaatcatctctgtcagtaaacaaagcagctctggtccgtcccaaatctccagcagttgacaaagcaactccagtttgtcctgaatctccagcagttgacaaagtaactccagttcgtcccagatctccagcagttgacaaagcaactccagttcgttctcaatctccagcagttgacaaagctactcatgtttgccctcaatctccatcagttgacaaggcaactccatccattgacaaagcaactccagttcgcccaaaatctccagccatagataaagtaactccaattcctcccaaatctccaccagttgacaaagcctctccagcaccaccaaaatcactatcaggtgctaaagatgtgcctgttccttcaaggtcgctgcaaattgataggttcattccagcccccccaagattatcgcaagttgataaagctgctctgccttcttcagaacagccacatatatctccagctactaattctgaagcccaaggggcaactacttctaggaaggtcacagccagctcagttttggaggttgctgcagcatcgaggccttcaagtgctcctgtgttacccacaccaagatcaactgcaccagttgcttcacatattcaaacttccacgttgctttcccgctcgatgagtgaggcagctgggagaaggtcagtaaatgatccttccttttctgccccatcttatactccccagacctaccgaaatgcaataattggtaagactggtctggctactacctctgcaaaccttgcatatcagtcctattctctgggtcaagatactgctccttcacagcctctatcagcatatgcatcaagcacagcagtcatgatgcctcctgctggaagatctgatcaatcatcagctaggcatggattcaagtctgggtctggtaagctagaagcacatgacagctggcagcagtggaaaggtgataataatgttgatatgcatctctggagggatcacactacctatcaacaaatgaccaggggtcaagcgtatgaccaatctcggagggacgatacttatcagcaaacatgcagcagaggaacagaaaagttcagcaggcacgcaggactgcaagctaggcagttccaaaccgagacacccgccagccatgtctggcaccaacaacaggggcaagtggcagaagagtttccacaccttgacatcataaacgatttgcttgaggaggaccagatcaacggcagtataccagagtcatttcatcaagattacaatgtgtttggcctgccattttcaccaagaggaaacgtgtcagatatgggaatggcttctgttagaagtcctgctcggttcaattcaaccaagtatgagtatgacggtggattctcgggggcttatgacataaatgcggtcaatgggttgagggaacggcagtttccctcgttggatagttactctaatggcctgtctgacgtgagtgcatcaaagccttggctgaatggctctcccagtccatcggtgatgagccttggggttaacacaaatggataccacccccaggttgcggactaccccagtctgggaaatggggtgaacggagtctccttgtggcgccgccatgctaacgggcgctggtaatgcgaggtgcctgtatacaatcatacagatggaataatgtttgttgtaacaaatggtttcgggcctgagctgatgtgccatgtaattaaaagttttaagttttaaaagggaaagaaagcgatacatgctgcaaaatctgccccgtgatttggttaatttgattgcttttctggttaaactctgttc

SEQ ID NO: 33105 - DNA, 691 bp, Zea Mays
gtcttgccatggcctttaactactaccgaagcacttggtgtgggtctgctgcagctaataagaacaatgaagaaattgaagcatgtgctgttttggttgcaacattgaggaagaagcggcgttggggagggtctgttgttggccataagatgaaaaatcgcgaccgtattggtggcgacattcaactgaataatgactactttattgagaggtcgttgttcaaccctgagcaattccgcagaaggttccgtatgcaacaatcccttttcttggagattgaagataaattggcagctgcaaataagttctttagacaaaaaagaaatgcagctggtgtgtttgggattctccagtagacaaaagtgtactatggcttttgcggatgttggcttatggaggtccagcaaattttctagatgaaggtctgcgtatgggagaaagcacagtccttcaaactatcaaggagtttgctaaaacagtccttcaaacatttttctgcttagcttgtttcttccctcctctagatggcagtagtgattcctcagacgtcaaatgaaattgggaagaccctagctgatgtatccccttcatccatgttgtactgcacacacacaacagcagtagtaatttgtaacatatgcaacatcagggtagcaaggttaatttgctaatattcttccaatcctacctc

SEQ ID NO: 33106 - DNA, 600 bp, Zea Mays
atcgaaagtattaattagtatattcataatgcgtaataattatggtcagctacttctttttaggaagattggagaagttctaaaaagtcgtcatcgacttgagtgtatgatggcaatccttttaggaaggggtgcatggagcatattctaccctctcaatgatacgtcctctgcaggcgacgacgacgtgatcaggaaaataaattccctctgaagcttacgggttcgatggatcggacccttctccttggatctgcatgcgtgcattatgatctgcgtacgtgccttctgccattctgatctccggtgttaatacatatagtactccttaagtacccagttctgatctccataatggtctccttggagtacacatgtcctggattcggtcagagatcgagagccatctgaaaagagagattcatcaatgcagtgcaggtgcagtgcaatcctcaggggctaaggtgttgagtacttactagtagtggtatgtagctcctaatataattgccatcatggtcatcatcctgttcttgatacttggtggtactatcatccatcgtgtgacaacctcgcctcaataaaaacatctttaattat

SEQ ID NO: 33107 - DNA, 737 bp, Zea Mays
gcgggtcggggcagccagcctagtcggcgtcggtgtaaaccacgagctccgacggcgggaaaggtcgaaggaaaaggtcgtattcaatggagtcgtggaggtagcaaagggtccgcttgagtgcggtgagatggggctcctgtggggtgtgcatgtgaaggcacacctgctggacggcgtaggcgatgtcgggcctggagaaggttagatattgaagggcgctggtgaggctccggtaggatgtcgcatcggcgaccgggggctcgtcgtcctcagagagctttgcctgagtgtcaacaggcgtggagcagggcttgcagtcgaacatgccagcccgctccaggatgtcaagagcgtactggcgctggtgtaggaagagaccctaaggcctccgttcagcatgtgatgccgaggaactggtggagaggccccaggtccttcatcattaactcgcgctgaagggcgacgatcgtgcgctgaagaagatcggcactagacgccgtgagcacgatgtcgtcgatgtagaggagcaggtagacggtgtcatcgccgcgccgatagacgaacaggagggatgtgtccgacttggccttgacgaagccaagggaggccaagtggaaggcgaagcgactgtaccaggcccacaacgcatgctttgttaggaaagtaatccttgattggtgctagtttacttattctgttttaggaaatagctagtatggtagtggatcagtctt

SEQ ID NO: 33108 - DNA, 1707 bp, Zea Mays
gggaaggaagacgacagcaaacagcaaaaagcaaaacccgcttctccctcctgcactccactacttgccttcccgcccgtcctctactcccccaaatccgccgggccaaaccctagagaaggcgatcggcatttccccgacggcgagcgggcggaagcggacaattatgccccgctgccgccgcgacaaggggcaggcgctcatcgacctcgacagcgacgccgaagacgagtgccaaagcaagggttctcaaacaagtagaacaacaacattgaagacatctgggagattgaaaaatgtattaacaacaacattgaagacatctgggaggagatccaaaaatgtattgccttcattttatgataacctcccccagggcagagcctcacgccatgcaactagcaggaggaacaagacaaatcaagacaagctaaatactgatatttttgaattatacatggaagatctttggaagcacattgatgaagataagaagagtgcttatgcatacttggattctttatggtttaacatgtattaccatgggagtaataaacctaatgtccttaaatggataaaagctaagagaatattttcaagacaatatgtttttgttcctattgtttgttttggacactggagcctccttgtcttatgccactttggtgatgcaaactgttcggatattaagaaaggaccacggatgatggtgctggactcactcaatacgacagatccgacaaggttgcgatcagcaatcagaaaattcattattgacatttacaagactgaggagcgggaagaaagcaagcagttcataaacaaaatctgcctcgagtttcccaaagtgccacagcaaaatggggatgaatgtggaatttatgttctttatttcatccgctgttttctactgaacaaaaaactgacagaagttcttgaaaacaaaaaattggaagaaaaatttacccagctgtttgatgatggctggtttaacccagaggaactagagaacttccgcaaggatatccattcattccaagcgaatcgaaataacaaagttgcagagtagggtatatagcaaaatggtgccaagtatataaattgcttcatccaccatgtagattgctgagtttcatcttcctttgtggctcattccgaggacatttgaaggctgttgaggatatgttgtatttccgttttatccatggaagagggagtacatagagcttcgctggcagacagcaaactagccatttatcgtatttaaaatatcgaacttggtagtgtatatatattatatctggaagtgctagattagcatcaccctcttggataatgttagcatttagcagggttacacacgatgtactagtgtatgtattctcattctagagatgctgtagagtctcctgcttatccgggtatagacgttacagtttcacatctgttgtgccgagatggtgatggtaatagtaagtaaaaaaaaaaaaaaactcgcagcagcttcctgtttcagatatcctgtagattctgctgttgctgttgtgacggggatagattagaatcagactttttccttgttcatgttttgcttacgtgagggcatctgctagattgttactgttatgtcagttttttaacctgatttgggtataaataagattctgtgttgaacatgccaaatgccctaagcctgttaaatttgct

SEQ ID NO: 33109 - DNA, 1342 bp, Zea Mays
gtgcctccctccccacgaaacccccttccccaaactaccttcgccgctctccttgatccgcaattttctcccacatctctcttctgcccacttgcctccatcttggcctccccctccactccccacccccgaacatccggcgccgtccacacccttgcaccccgactcccctcgtccttcgtggccacgatgggggcgtccatggcatcgccttaggggcgatcgatctgggagaaagtgctggagcacgtggcgtcgtaccaccagcagcaacggaggcagaagctacgcaagagcctcacctacaccggcagtgagttctcgttcgctgtccggggtcgtggggacgaccccgcctccacgtccgttggggcacagaacgaggacatgcctcttgagcacgtctttaaaatcattaggccaaagtttgtgcgaccgttgatgtgaatttcctctgggcccaactttgatccgatggcaaaagtgtgtgtttatggttcctgagtcagatgatctttcttcagttttagatgtgatagatattagtatgaaagataaaactagaatgctatgtctgtcaaaggagctttcttcagtttcagaacacacctctccatctttcggtgctaggtggatcaccgtctaaacaatccaccaccagaaccgccctaccccaagatagctccatctcagtcgttgtacccattcaatggcgagctggtggcagcgatgtaggagatgatccatgacgaggtgcacaagtacatgttagtggacgacacctgccaaagatacacaatttctactggtacacattttattttttcatgtttttcagttggagaaaacatttaagacaatattttctcgtttgttctccatatggggcttgttccacgccacttgaaggaagaagggaatggtggtgttaagttcggacaatacatctacacatcttggagcatcggcatcaatgttttcaatcttctcaaatttcaaattattctggtctcttcgtgcaaccataaaagtttattaagtcacttatctgagtggtctaaaagtctagcatatttttgttcctctgcctgtcgagacggatcaactgacatgaataatatccagtgaatactgcaagagctattcatgatctgccgtgaactagctagtatgatataactcagtttgtggagtgctaatgcacaaacaggaaataggatgatacttcatgtatatttttttatttcatgaaaatgaactataggatactgttcacaatccataccaagcttctgcagttatcaacatgttttctatgttcaaccttgttaacatattaaaa

SEQ ID NO: 33110 - DNA, 4667 bp, Zea Mays
ttttactagcaatggaaaggagaggagcaaaagagggagccaaaacatagcaaggaaaaggaaaaagaaaatgatcctctctccccagcacttgcgacaggtactagcaggctagcggctgcctcccttgtccccaccggccgccaccaccaccaccacggcaccaccacaccgacccccttcccctcccctctccctgtcgtgcggtgcctcctccgcccaaatccccaaatccgcgcctccgatccgccgccgtccacgatctgccgcagccgttgacccgctaaaaatggcctccgggccgccctcgccatccggcaaaccctactcgcgcaaatctcacgccagctccaaggctcccagcgtcccttccttcgacgcccacaacggccagctcctacccaccgtcaccttttcgctgccctccacgaccaccgcccgccgggagctgcgccgccgcctctcttccgagctctcccaggtgcgcgccgccgtcaagcgcctgaactccctcccggctcccgccccctcctcggcgctctctgccaccgacccctccacgccgcatccgccgtacccgccggcgtccaagcacaagtctaagaagggcggcggagtcccgcagccgcacctctcggcggaggcgcggcgcaagctctacgcgcccgtgttcaagacctgcgccgctctgctctccaggctgatgaagcacaagcacagctgggtgttcaacaagcccgtagatgcgagcgcgcttggcctgcacgactaccatacaatcatcaccaaacccatggacctcggcacagtcaagtcaaagctaggtgccgggcagtacaagtcaccacgggaatttgcaggtgatgtgcgtctgacgttccagaacgccatgacgtacaaccccaagggccaggacgtgcacttcatggccgagcagctgcttaacatgttcgaggagaagtggccggagattgaggctgagatagctcagctatcaccacagcctcctacaccatcctcagcagcacccaaaaagccaaagccaaaggagatagataattctaggccgttagagaggtctgattcgacagttcatgctgccgggatagaagctaccccgaagacacacactggcagaccccaagttttaaagaagcccaaggcaagggagcccaataagagggatatgacattctgggagaagcagcggcttagcaataacctccaggatttgccaccagagaagctagacaatgttgttcagatcataaagaagaggaacttgtcactcagccagcacgacgatgagattgaggttgatatcgatagctttgatgttgaaacattatgggagctcgatagattcgtgacaaactataggaagagtataactaagaataagcggaaggctgagctttctgcggtaaggccggatgaagctgatcctgatcaggagccggagaaggtagaacatgtgaggcagggcaaggcggatcaggatcaaattcctgcagtacaagaaccgattccagaaccagaaacagttgatgttgatccacctaaggaaagtgcagcagatgataatgagagatgtgtgggtgaatcatcacctggtcatttggaagatcagaagggagagaatgctggtagatcaagtagttctggaagctctagcagtgactcgggttcatcctctagtgatacggacacagatagttcatcagcagatggttctgatgctgggcaatcacccagaacgtagcatctataagccagatgttgatgggggcactggaaaccataacaccttagttcaagaaaggattctagcatgaatttatggggtgagattgctgtaaattttggccatttatggtgatatgcctgttcacaatcttctgtggagggagtgtgcaaagtcctcaagtgacgtttctgcacgattggcagtgattcctttggtccaggaagccagaggtctcgatgctggaccaaggttagtccaaaggttatctggttttggggaccatcgatctgcagacattgtggcaagagtagcagaggaagagcttgcacatgtttctgtaggtttgtattggtttctcaaagtatgccaaatgatgggtcgtgaaccaggcgatactttcaaagacttgataaaggaatacagtgttgtactgaagggtccatttaactatccggctcgtgatgaagctggtataccccgagaatggtatgacgagaagttcaaacaagaagcagcacaaaaactttcagaggtccatgatagattagcttgtattgttgagatggagaaagagagtgcaagtttgaatgactaagtgccacttgatgtacatgggagattgggttttgtctggctggagtggaaagattaacgaatcatcaaagtgtgtacctaccagtggatgcttggaaagttttctgccgtcggatgggaaaccagatattgtaggcctggagccgtgaactaataccattaggatgctgggttactttttttttggaaactagacgctgtattacttggatgtattatttggaacaacactgacggtggattggtatgatacatgtccattcttcattctactgcaggcttagcgagtgccaaatgttgtgttcagccctctgatctatgatctgaacaagcagttatattgactgtacagtgagtaccaaatgctcgtgggcgcccatgatgcctatcaccctatagcacctttttttgtctttacttgacccactttgtttttaaactaactctcagcttccaaagttattgatgctccataaatcatgagtgatcccatgatttttgtttcttctccaagataagatgtatcctgctcagattagaattaaagatatgtctctcccttcttttagcattgctcttattgttaaaagagctttcagttgttttttgcagtcatggctgtttcaatttttgtgagctagggcccttgcccatgtataccagtgctaaactgctgacataattcctcagtaatccctcataagatgtttcagcttttataggtcctcacactgtattgccactgtacacagaattccaatcactagattaaagatctgctctgctcatcagctcatacatgagagttgactcctccagtgctgattctgaaggccagagcagccatccaaaaacgacacctcaggcgatgtccacagtgacgacggcttctagtccacccacgtacgcttataaatggcagcgtctcttcgctgaacgctgcaaccaagcacggataggagtttcaggcattccgggcgtcacgcatctgatcagaaatgctaagggcggtggcgttcgccgtcttcctcctctctccgccactcggcaccacggctgttcgcagagctacaacgcgatctacagcttcggcgactccatcgccgacaccggcaacctctgcacgggctccggcggctgcccgtcgtggctcaccaccgggcagccaccctacggcaacacccacttcggccaccccaccggccggtgcaccgacggccgggtcatcctcgactttctagctgatcactttggcctgccgcttctcccgccgtctaaggcgatcggcgccggggacgtcaggaagggcgcgaacatggccatcattggcgccaccaccatggacctggagttcttcaataagcacggcctcggcagcagcatctggaacaatgggcccctgggcacccagatccagtggttccagcagctcatgccctccatctgcggcgccgattgccagagctacttcaacagctccctgttcgtcgtgggcgagttcgggggcaacgactacaacgcgccgctcttcggcggcaaggccatggccgaggtcaggagctacgtgcccgagatcgtggaccggatcgcaagcggcgtggagacgctgatcgggctgggcgcggtggacgtggtggtgcccggggtgctgccgatcgggtgcttcccgctgtacctgacgctgtacccgggctcgagcaaggacggcgactacgacgaggccggctgcctcaggagctacaacaacctctccagctaccacaacgagctgctgaggcaggcggtgtccgggctgcagagcaagcacggcggcggcgtccggctcatgtacgccgacttctacgcgcaggtcgcggacatggtccggtcgccggagagctacgggctgcaatacgggctgagagtgtgctgcggcgccggcgggcagggctcctacaactactacaacaaggcgcggtgcgggatggccgggtcgagcgcgtgcggcgacccggagaagtacctggtgtgggacggcatccatctcacggaagccgcctaccgttccatcgcggatgggtggctcaaggggacctactgcagccccggcatcctgcgtcgttgaggacctcgccatgcatatcaatcactctatctatctatacgactatagtaataatcaaataatgttagggccggatgagactgtggtggcaaagaaaattgacagtttctctatactttgtgcgcgctacggaagggtcgtcatttccgctctccaatacctttggctagggagaaatatcttaaatataatataggatttaaatgtttaatttgaagatct

SEQ ID NO: 33111 - DNA, 5753 bp, Zea Mays
cgcggaccttccttgatccgaaagctcaactcaaaagtccattgttttcgcgaatgaaatcaatcaataaaaactgatgaaccaggccatcaccatggccggcggcggtcactctgcttacacaccacgccgagccacccactaaagcgtcgccgtgaaaaactaccaaaccccttcactgctccctcccatccaaaaccctaaccctacagccaccgcagtggctggccatgggggcgccgcgcgagctcgagctctccgacgaggtggagggcgaggaggacggcaccaccgactttgttttccgccttgccggtgaccccatcccgctcctcccgaccgactccaacccgctcccgctcttcgacctgctgtcccctcccgcgcgcccgctcgccgtctccgaccgacacgccaccgtcttcctcgcccaccccagcgggtttatagctgtgaggaccaaggagttaatcgaagccagcaaggaggcgcgcgagaagggcaagtcgagcactcgctgcgcgcaggactgctgcgtcgccgacgtgcccctccccggtgtatcccttatcgcgctctcccatgatgagtccgtgttagccgcctgcacacatactgagatccagttcttctcgctggcgtctctgctcacacataaggacgtggtaccatcctcatcatgtagcctggaacgagctgtcactgtgaaagatttcaagtggttaaatcatgcctctgcagcatatattgtactctcaaatggtgggttgctgtgtcatgggaatttgggtgaaggcctgaaagatgtgatggaaaacgtcgatgcagttgactgttgcaaagaaggaaatcatattgctgttgcaagagggaacaaacttaccatattatcaccagattttacggaaacatgctccatgtccctcttgttccagttgtggtctgacggaagtgattcaaagggcactaccatcaaagtggattctattggctgggtacatggtgatagtattgttattgggtgtgttcgattaaacgaagatgacaatgaagaaggataccttgttcaagttataaggactgaagaaagcacattttgtgagagcccaggcaagacagatgtttatacctataacgattttttccatggcattatggatgatgttttaccacccggagctggacctaatcttcttttgggttatctgcatcgctggggtctcatggtggcttccaataaaaagagcgtcgatgaacacattgcccttcttaagtggccatctgcacatgatgatgaaaaaactgtaacatatcttgaaatgttggaggataaatacagtcctaggattgacttgcaagagaatggcgatgacaatgtcatactagggtttggtgttgagaatgtttcattatttcaaaagatcactgtaccagttggacctgaacaaaaggaggttgcccctcaacatattctcctatgtttgactggtgagggcaaagtagctgtatattacctcgccaggatttcggacccttctgatttacctcatgctactgtgtctaccaatgaggactatggtgaaaaacatatttcacctgcaactgtatctgaaaaggagttgactccaagtgttgcaggctcagtatataagagtactctcacagaacatggtgctgagccatctagtgcgcaaacaggtagcaaccagcaggaatcaataaatgtgaaaaacagtagctcagcttcaaaagaacaggaaacaactgacaattcattgtttatctcttccaataagaagcccttagacaccaagcaagtgaatgtgactggtccacctgcagccttgcgtagcttagcgttaacaggaaacacaaaacctacaatattttccagcttttctactgaaggcatgaatccaacaggaggcaatgcacctaatgaattagcttcttccttgcaaccaagcagcagaagttttggaaacaaccaaactggtaaagaaggcctggattcagttcaatcagtgggaatatttggtggatctcaaaactccaataaagatggcaatgtctatggtttcaagtcttcattattcacctctagtggatctgtccctgccaagatcggagaaaggaatgaggttggttttggagttccttcgctgcaaaccagttacaccgctgatagaaaagtttttggtgctccagttgccttaagctctgtaccttcatcatctatatctccggctaaaccttccccaattggatattcatcaagtggatttcggacagcaaactctgaagcacctcaatcattgcgtggatcacctccgtcacagcaatctatgggcaaatcacataacagcaggacacaagcaccggcagaatattctagaaactccaagaagggcacaggattcgattctgaacaagacttgtctaaaaaattttacagtataaatgaaatgacgaaggagttagatgccctactagcatatatagaaaaggatggtggttttagagatgcctgcataaccatccaacagcgtcctctttctatgtttgaggatggcttacaaaactttttgcagctgttgcaggtcttcaagggcaaagtagaggagcaatgttcaaaaattgaagatctgaggaacaacatgtttcaagtttctgctaggcaaacttacatgaaaggaattgttagccagtcttcagataatcagtactgggatatatggaaccgtcagaaattgagtccagaattcgaagtgaagagacaaaatattctcagagctaaccaggatttgacaaatcagctggttgagctggagaggcacttcaataatctggagatgaacagatccagtgaaacaggaagagtggcttctaatcgaagagctgtttattctaacaagacaagttcgagtcagacacaattatccagtgtatatagtgcactgaactcgcagttggcagctgctgagcagctatctgaatgcctttcaaagcagatatctgtgttaaatattggttctcctagtaggaagcaggggatggtgaccaaaaagttgtttgagtcaattggtttagcccacacaactgatgcaaccaaattttcaggcagcactcctaagccagttaagcggtttccatcagtgaatgagcattcaaagggaatattagggtcttccaagggtggtgagcctgagactgctcgaaggaggagggaatcactggatatgagcctggctagtttggaacctcagaaaacaactgttaaaagaataacacagcaacaacgcctcaagatcagcagtgatctaccattcaggtcaaacaagaaaatatttgattctcaaatggcagcaatatcacaggaaaagtcaagcgatagctccaattcatctatagtagaatcatatgtaagcagactgcgttctctgagtgaagatgtaaacgataaactgtcaggaccccaacagaaccctttgttcaaatgggtaaaggaatcaactgggtcatctcaaacctcagagcaaaagcatttcgagttaccagggcaaatgaaaagtactgcacagtcttcaaaactgacaccatcttcaccaccatcattcagttacacacgtatgggtgcacaagatagtatcaacccatccagtgttccatcctttggaacaaaacatactgtgtctaagccaaatactctaaccttcaaaaccactataagccctaaaagtaatgccaacacagagccaaatatattaccttctataacagctccaaaaacttctctaagtccactgtctgtaaaaactgctggggagtctggagatttgcctacattaactatgaagaacagacaggatggtcagtcaatgccatctttggggaacataaaaggaccgggtgcttctctgcagaacaagggtggcatatttagagatctcgacaaatcgtcttttaattctgaacattccaagcctgctgcattacatgagaagactgaccagctaagtggggttggcgatgctgtgcagaacactgtgaaagatacctccaaaatggcacctcaaccttctgctttcttgccagctcctgttactcagaccaattcatactccttaaggccgactgtttcttcttcagccacatcaggtgcgaaaacttcagatgttttatctagctcaatgcagaaagtttctccaatagtacctgggggtactgtgtctagctcagtccctactcctgctaaggattcatcaactggattgagtcaaaatgcttccaaacctgaaacgctaatatcaaaggtaactagtaccatagtttctgcaagttcgacttctgtcatatcagtcactgaaagcaaaccttcagtgcctccaacaactggcgccagcttgccttctactcatgtctctgctcctcaaacagcaccaacaacatcggaatcagttttcacttccacaggaaaaaatgtaggaccaaacactgacaccatctcaaccgatgaagatgacatggaagaggaggcaccttctgcaagtgccgaactgaacttgggagcccttggtggattcggccttgggtcccagccttcttcaagtcctcaaaagtctaatccttttggtgcctcctttggtacatctggcaataaaagttcaggcacaccatttactttgacaaccagtccaggacagcttttccggccagcgtcgctaagcattccttcagctcagccagcccaaccatctcaatcaactagttctagttctttttctaattcgttctcaagtgggcttactggatttggacagcctgcacaaattggatctggccagcagtcagcttttgggaagcctgcacagattggagctggccagcatgcaggatttgggcagactgcccaaattcaatctggttttggccagcctgcccaaattcaatctggttttggccagtcagcacaaatcggaactgggcaacagtcaggatttgggaagcctgcacaaattggggctgtccagtcaggatttgggcagcctgcacagtttgctgctcaacagacacttggatcagtgctgggttcttttggacaacctccccagttaggaggcataggttctggaggatttggtggattttcaagtgcttctacatctgctggttttagttctttatcttcagcttcatctggtggtggttttggaggtgcctcccagggaggtggctttggcagtggtggtggtggattcggatcctttggtggtaatcaaggagctgggttctcggcatttggagcaagtggggctggaagaccggcagctgatttcttgacgcagatgagaaagtaggctccaggcaaatccccagacaggtttacgcattagctatagcatacacatgaggtgtcaacagcagcatcgacggttccatggctgcatgaaatgtagaagaaaaaaaaagaggtcgtgtaaaggtcattgcttggacgtgattcccctccagctttgtcaatacaattcccagcctctttcccacaatattccctgtcacgagcctgcccgcgcatcaagatgaaacccgccaccacaccaaagagcttgctgcgatttgcaaaggcatggagaagaaagggatcgagagaaacaaaagcataagatacccagacacttaaacaagtaacaaccgaacacaatctttcgccaaatatatatatatacacgatataatataagaacggaacaaag

SEQ ID NO: 33112 - DNA, 2643 bp, Zea Mays
cgccagtttcccaccgcgcgctcgctgaaaaatgccaatgccgccgccgccgcgaaaagacttcccggcgttcccgtttgcgccgtacccgatccagtcggaattcatgtcgtttctctacgccgctctctcttcaggccccggcgccctcgccctactcgagagccctaccggcacgggcaagacgctcagcatcatctgcagtgcgctgcagtggctcctcgatcaccgcgaagctgccgtagttgccgctacggcattggcccaccccagcggcgcctccggctccggtggtgacgatgacgagcccgactggttgcgggatttcaagccggcggcggcggttaaagagagcactaagaagaaggcgaagcctcccgcgatgaggaaaacgctggtttcacggaaaccagatggatttggggaggaagacggcggcgacgacgagggggagttcctacttgaggagtatgagagcgacagcgaagacgtcgcgaggcggggtgtagggaaacgagcacattgcggtagtagtagcagcagtagcagcgaggacgacgatgagatgacgcccaaggttttcttcacaagccgcacgcactcgcagctctctcagttcgtcggggagctcaagaggacggagttcgctgggcggatcaggacggtgtgcttggggtccaggaagaacttatgcatcaacaaggatgttctgaagatgggcagtggaaacaggattaatgagaggtgcttggaactgcagaagaacaagaagagcaccaaaattaagttgaaggcagtcctttcctgcctggatgaataccttgatagattttacaatgttttgggagctgggaatcgacgatacatccagaccttaacagttttaacaaagtctttcatacgtgttttgatcaacaatcaagatggtgccagcactatgtcttctatgaccataaaccaattcttgttttcccttgacattgataacataaacatagtaaaactttgtcagtttgtgaaagaaagcaatataatccataaggtttgtggatatgcaaacaagttaagtagcatccaaaatcagtttgatctccagctccatgatgaaggaagcagtatagcatgctttcaggcattggttgactttctacgctcccttctgaacagcaatgatgatggaagaatcatagttgcaaagcaaaagctaggtggacaacctgatgaagcatatcttaaatttgtgatgctttgtgcggaaaaaatattttctgaggttacgcaggatgcttatgctgttatcctggctggtggaactctccagcctattgaagaaactaggctgcgcttgtgtccaagcttaccaccaactgatataaaattcttcacttgcaaccatattgttcctcctgagagtattcttccaatagcagttacacgtggaccctcaggcaaggcatttgatttcagctacaattcaaggagctctccttccatgattgaggaacttggtcgtttcatctgtaacattataacagtcgtgcctgagggagttgttatgtttttttcttcatatgattatgaaaggcgtgtatatgatgcatggatgacaacaggcacaatttccaggatttctaaaaagaaacatgttttcagagagccaaggaacagtgctgatgtcgaggctgtcctcaacaaatacaaggaggcaattgaatcctgtagtaatttttcccaagacacaggtgtcaatggggcacttctattagctgttgttggtgggaagatttctgaaggcataaatttcagcaatgggatgggtcgttgtgtcataatggttggcttgccttatccaagtccatctgatgttgagcttatagagacaataaagcatatcgaaagtatttctagctcattttcggttggagatgataaggccttaagcagaaaatatgatgatgaatgtgaacttcagcctggttatgatatattacggaagtgcactagaggtggaagagagtattatgagaatttatgcatgaaagctgtgaatcaatctattggcagagcaatcaggcacataaatgactatgctgcaatgctattggttgactcgcgttatgcacagacttcatcaaccaagagtttttcctgcccggctgataagcttcctcaatggataaaagcacgactctcttgtgctcaaaactatggagaagttcatagatcgttgcatcagttcttcaagttcaataaaaaaaatgttgaaatactctagaaaccaccaagcattgccattgttgattcattgcaaacaaaaatacaggtgtatgtactcgtaaaacgtagcattgtgtttgtgtatccttatgctgcttacttatgagcaaggcttcagcctgcgcctgcgaatgcgatcagagttatgtacagaattatggtgacagtaacgcttcctcttaaggaattatggttagatccatatttcttttgctcgagattgtaaaacaatatcacaaatgtgattattcagtccttatcattgtttcaattctttcatgatagcaaatcttatagacctcattttactgacgcagaacaaatgaaattcatgtgttactacactaatatgttggtatattttcg

SEQ ID NO: 33113 - DNA, 7858 bp, Zea Mays
caaaactctgctcctcgcttaaacccgcgagcctccggacccggatgttgttccggttccgcccggccccctcgtagccatcgcctccttttagcgccgccatcccacctcgccggcggccatggcgaccccgtcttatgcggcggtgaagtgcctcaacacgtcctcgtccagccgcaagcgtttctcgtttaagagcttctcgcagcgggtggaggagatcgacatcgatgtgtaccgcagcctccacacactgaaggcggagccatccagcggatcgtccttcttcctcgacgcaattgtggagtggagggagcttaatactgcagaagacttcatctcattttatgaggagatgataccattggtacaaacacttcctcaaattgtcttgcaccgggacaagctcttttccgcacttctacaaagggtaaacatgagtgcaagattgtccctggagccaatactcatgttgattgcagctttctccagggatattctagaagattttttgccttttttaggaagacatgctagtgcacttttatctcttcttaacgacggaggtgatcgcgaccctgaaatcttggagcaggtcttcacatcctggtcgtatataatgatgtacttgcaaaagtatctagtgaaagatactgtccaaattcttaggatcacagcagcgttgagatatttcccgaaggactatgttagagaatttatggcagaatctgtttcatttttgctgaggaatgcacctaataatcagctaacgcaaggtctactgaaagttctacttgaggctgctaaacaaccatcacctgcacggatagacggggtggtctctttgctgtggcatgtcatgaaaggaacttccacaaagctacactcaaaagctgggcaggtcttgaagttcttgttgagcaagtcaattgtttccactctccgtgataaatttcctgatgataaggtgaagatgattaaacttgttgagttgctggttagtagatatgtgttccctggtagcaacataacaggatcttcttcaattgaggttcttggaagtattcttgactttatgctttctgttctggatgttccaaccattttgggcaatttgtccatcatatcacctttctatgccccagtgttcaaacttaaaaatccgagggtgattgtctttataaagaaacttttggtaaaaggtccccaagttgcacaacattttgaaagtcaaatattaagagtatcatccatggaagtgacaaaagaatttgatccacaaaatctcttggagctgttctccatctttgctttcaatttgagcagtccaaccaaggatgttcggattttaacattgaggattctatcatattttgtgaagatggatcaacgtctaatcacagatgaggagcgaccacacaagaggcagagaacagaagtttctggagaggaagctgttgctaaatacgctaatgttgtggatattcttttgattattgagtcaatgccaatttcagtatctactagccgtaaaattgctatcttcatttctcggatacaaatgagtttatcttccaagatggttcatgatgattacatacctcctctcttacatggtattattggcatattgtacaatagatttagtgatctatggccacaaacactggattgccttgctgttctcattagaaaacacaaggagcttgtttggggtcagtttgttccgttcattgcaattcaccaatcaaaaggactgactgtgaaaaatcaggagaagctggaagctgcaacccaaccacagtctatttttgactgcttcaacttgtatcttgctatggactttgattgcacaccagctgtgaccgtggctaccttattgcttcaatcgctccaaaggattcctgatgttgctgaatcccgctctcgacaacttataccgctatttctcaactttatgggctatgatgatagcagcatctttagtgctgattcatatatgcctgaaaaatgtaaaggcaaacaatggaaagcgattctaaaagaatggttaaacttattgaggttaatgcacaatgcaagatcgttatatcagggcaattttctccaggaagtactaactaaaagggttcttgatgacagtgatcctgaaatacaagcaaaagcattggattgccttttgaactggaaggatgaattcttgatcccgtacagtcagaaccttaaaaatctgattgatgtaaagactcttcgtgaagagctgaccacatgggcagtttcacatgactccttgtcaattctgaaagaccatagaagtcgtgtggttcctctggttatccgcgtgttggcaccgaaagtaaggaaactgaagctactaggttctcgaaagcacacaggtgccagtcatcgaaaggcaattcttcgtttccttttgcagtttgattcaaatgaacttgagctttttttttctttacttctgaggtccttgatccctggcagcctccagcttaaaatgtttggttctcagccagacaaccttcttggaagtttctctgacattgttggaacttcaacagaaatttgtgtagagaattttacatggaaaaaggcaaatggtttcattcatctggttgaagaaatttttggtacttttgatatgccacatataagcccatttcttaatgttttattaatcattgtcgctcgcttgctggagagttgcatgaggaatcttagaaatgagagtgatgggaaatatccttgcaaccaaacaaatgaccatggtaatggttgttccataaattctgaagtgggcaattctgtgaacgtggatgaatgctttaaagaaatgcatctagaaggccatatggagacaagtgtatccatcaagcagttgaaggatttgaggtcttcatgtattagagttgtctcgtcagcccttagtcactatgaaagccatgagtttggagaaaacttctggggtgtttttttttcttctgtgaaacctctgatagactgctttacacaagaggcttccagtagtgagaaaccaagttcattatttgcttgttttatggctatgagccggagcccaaaattagcaccactgttggggtcaaataatcttgtaccagctattttttctattttgactgtgaagacagcgtcaggatccatcaccacctatgcacttgagttcattgagaatctgttgaggttggatattgatttgcagcagcaagatgaacatttagtgaagaaagttcttcttcaacatatggatgttcttatccatagtctccatgattttgttaatcatcgcaaagagctcaacaggagatctggtacatggcttgggcaacgtgaacttaggctgttcaaattattgctaaattacatcacagatccctcagctgctgataacttcatagaccttattcttccatttttcagcaagaaagatttgaactccgacgattgtttggaagcactatgtgttgtgaggggaataattcaaaatctgagatgcaaagtatctgaaaaagttctaaatgcactgaacccattacttgcaattgttggattggaactgcgactatgtatctgtgatatttatgctgggttgtcattgaatgatccttcgatgttgtttctggctgggttaataggagatctgaatgcagtttcagcttcagaacttggtgaactagattatgacacaagacttaacacctatgataaggttaggccacaattgtttcttggcttgacagaagagcatgtgggcgccatattatctcattgtgtgtatgatatgtcatctgaagaattaattttgcggcaaagtgcatctagggctctgcagtcgttcctggacttttccgcctcagttatgaataatgatgtgtccaaatactctattgatgataaatttagagagaataataccagaagcatttgcacgatgggctgtattcagaagatattggaaaaaacttatctgcacaatatgggagtagcaatgactaaagatgtatcaattcaaaaggaatggattattttacttagggagatggtctccaattttaatcatttagcatccttaagctcatttaggcctctctgtaaggtggatatagaagaggattttttccacaacataactcatttacaggctggtaaaagatcaaaagcactgttgctttttagacagggaatcaaggaaaacaacttttcagaggatatcactatgaaagtctttgttccactatttttcaatatgttttctgacgatatcactatgaaagtctttgttccactatttttcaatatgttttctgacgtaaaagctgggaaaggcgaacaagtcagagatatatgtttggatacactatctgctgttgctgccaaagtgcagtgggaacactatagaacaatattgaagagatgcttccgagaattaaaccttagacctgataagcagaagatcatattgaggctgatttgttccatattagatgcattccatttcatgaaacctgcaaatgatgcctcaggaaattctgatgctttgagtgaagatattgattcttcccttacattctctttggtcacagtctcttctgataagcaacagtacatgcaaaaggtagtgtttccacaggttcaaaagttgttaggatcagatccagagaaagtcaacgtcaacataaacctggtagcactgaaaatacttaagttgctaccggtggattattttgagtcccaactttcaagcatcattcatcgaatctgtaacttcctcaagaatcgtcttgaaagcatacgtgatgaagctaggtctgctttagctgcttctgttaaggaactggggattgggtatttgcagtttgtggtcaagatattaagagctatacttaaaagaggttttgagttacatgttctgggctacacacttcattatttgttgtcaaaaaacattactgctgatatgtatggtaggcttgactactgtttagaagatttgttggcagtggttgacagtgatttacttggagatgttgcagaacaaaaggaagttgaaaaacttgcctccaaaatgaaagagacaaagaagagaatgtcgtttgagactcttaagctgattgctcaaagtattacattcaagaccgatttactgaagaagataatctcacctgtttctttacatcttcagaagcaacttactccaaagttgaaaaccagacttgagatgatgctacacaacatagccttagggattgagtgcaactcatctactgaaacatcaaacttgtttatcttcgtatattgtcttattgaggatactattacaggaagcagatctgaatgcaaagagaatacacaatctagtcctgatcaagacagtactgtaagaaagaccttcctgggactaggtgagagtggatcacagaattcttatatacttaccaagtttgcacttgacttacttcgtaatcgtctgaagagcatcaagcttgacaaggaagatgaacaactcgtgaagatgttggatccttttgttgaccttctgcgaaagtgtatgagttcgaaacatgcaagtgtcctctcagccacatttagatgttttgccttgttggtgaaacttccgttgccatctctgagggacaatgcaattactataaaaaatgtacttatggagattttacagagagctggaaactccaatggtcatttagtcacatcttgttttaagctacttgctgatctacttagaggattcaggatttcactttcagataatgagcttcagatgcttgttcatacccctatgtttgtagatcttcagacaaacccttcccctgttgccttatcgcttctcaaaacaatagtcaggctaaaattggtttctcacgaaatttatgatatagttgttaagataggagagttgatggtaacaacattaactgaatctatacagcagcaatgcattcaaattatgctacaattttttctgaactatccactttctgagaagcgcttacagcaacatattgactttttcctggcaaacttaaggtatgatgaatatccatagttactttatcatgatatctcactgtatgctaacactctggaaaattgcagttatgaacatccttcaggaagagaagcagtgcttgaaatgctccatgacattcttaccagatttccccagaggattattgatgagcagggtcaaaccttttttcttcatcttgtagttgctctagccaatgaacagcatcagaatgtgtcttcaatgatccttagagctattcaaaagctgttaggacgcattggtggtcagggaaagagttacatttatgagtattcactttcgtggtacactggtgagaagaaaagtttgtggagtgcttcagctcaggttattggtttacttgttggcgatcacacattacaaatgggcaagcaccttaaaagtattctggctgttgttaagaaaataatggaatcatctattattgcttctggagctatacaattaggcttatctgatgaagctgccctgccattgtggaaagagacttactactctgttgccatgatggagaggttacttcttcgctttccggagttgtattttgagaaaaacatggaggacatatggataatattatgcaagttgttgatccatcctcattcgatgttgcgtagtatttcaagctctctggtagcatcatattttgctacagtggagaagaggaaacatgaacagaaattggatgccccatcatggttgcttgttcaaccgagcaggctattcataatagctgtttccttgttgaaacaattgaggagtgagctgagtgatactacggcaaataatctgattgtacagaatgttgcatactcagtctgcaacttgcatatgttgattaggcaatcgacctccacacatcagttttggtctagcattagttctgatcgtggtgctttccttgagggttttgaattgcttggttcaagaaaagcaaaaaatatatttctcctttgtacttcaacatctagtgatgtatctggatctagcctcgacaccaacgaagagcctacatctttgttagtttcgtcaatcctaaagaagatgggaagaattgcaatgcaaatgcaggatacacagataaagaacgtgttcaattgcttcaatatgatttcatcagctcttggtcctgatgaatcactaacctatgctgatcacctcttggccccattgtataaagtttctgaaggatttgctgggaaagttgttagtgatgaagtgaagcaactggcccagggggtccagaacaagttacgtgacctgattggttccgagaaatttgttgaagtctacaagagcgttcggatgggcctgaaacagaagcgggacggtagaaagcaggcacagaagattgttgcagccgtggacccagaacgcaatgccaagcgaaagcagcgaatggcagccaagcaccgggaacacaagaggcgaaagataatggcgatgaagattggcaggtggatgagatagcttggtatttaggctctgcggaattcggtgaatcatataattgtagaggataatttttcgtgctacaagtgctggcataaaattatgtttctgttttatatgctgtctcactgacttactgcccgacgtaattttattgttgagttaccgaaccataccgtaagtaaaaattaagaggcataagcaatgaagacatagaattgattgaattatatttttttggggtggatggataagtaacaatatattattaaatgtgcaattaagagttttctggctgaggtttgc

SEQ ID NO: 33114 - DNA, 1664 bp, Zea Mays
tgttacccaaatcgtcagagtgagggggaggcggagggtgaatgtgaacttccggatgtctccaattgcttctgatcctgtccactccattaccaagaatagcactccatgtatcttggagtagagggaggaggagggagctcagccagtcatctatggattggtgccccaaacaacaagaccggccgagagggaagagcggaggccggaggggtcagctcttgcacttgtcaggggaggctagtctaggctaggggatctctgattgcctcctatcctctcctagccctgccctgccgcagcgcaacgactccgaaatctgaatcgccgcctccctccgccattcgcgtcagtgacatctattccttcaattcattcagtcaggcgacagcccatgcccttcacacaatcaaaatcgaatgttggttacacaactggaaaaataacgcacaccccgcaacatactaggcacgtctttatctcggatcagtattcgggagtaagaacgacagcgcattgccaggatagaaatcgtcctgatgttcttcgtaagtctggcatttagaccaggctgacaatgtcagcttccgagttcaggattccataccagcaagtttcaccttcgcagcctgctgagaatgtaaatcagtttaagacctgtcgatgtggggagggagacccgaactccacttctgaaactggtgacagtccaccggcctcttgtcctaattgccaggtccttaagagtggacatttactactttcatctaaaggaattggatggacatcatggaaaaagcgctggtttgttcttacgagggcatccctagtgttcttcagaagcgacccttcactgacaacagcctacaagtttggcattctaataattcctagagttgaaatcagtgtgctgctgtacaatccaagtcattaccagaatgtgccgccacccagaggagctgaaccaattgttacacttggtggaattgacttgaataattctggaagtgtcgtcatcaaagaagaaaggaaacttttgacagtgttctttcctgatggccatggtgaacgaactttcactctgaaggcagaaaccacaggagatctaaatgagtggagaaatgcactggagagtgctatagctcaggcacccagcatagcaaatacaatggggcaaaatccaatattcagcactgatgtagaagcagaatctgctgaatctccagctgaacattttgtttgtggtgcagcggaggaccgttctgttattggcagacctgcaaaatttgcacttgtagatgctgatggtagtccatcattcttggagaaggccctgaagttcattgaagatcatgggatcaaggtagagggcatcctgcgtcagtctgctgatgttgaagaagtcaaacgcagaattagggattatgaaaaggggaaaaacgagttctctccagaagaggatgctcatgttattggtgactgtattaagtatgttcttcgagagatgccatcatctccagttcctgcatcatgttgcactgctctggttaaagcatacctgacaaggcaagaagacttgatgagattaatagagtgataaatgaagttttcccagaaccaaatcgacaattgttgcagagctggattttcattcttgatggggg

SEQ ID NO: 33115 - DNA, 3609 bp, Zea Mays
gttctgttctgcttttgtcttcctctctcgctggatctactactcccaccactgcctctgcctcggcctcgttgctgctggctgcgtgcgtgactgcgtgcctttgcccaaagcaagcctgcctgctcggtggctcgcttcggttgcagctgcagtgacctcaccctgcctctatgcttgctctcccaccatgtggtggtggtcttcgcgctccaactaacccccaccagcagcgcatcacaccaccgcatcgcaccgcgatgccaaccctggtggcgtcacgcggcccggcggcttcttccgcgcgccgcattgcaatgccgccaccgccgctggacggacccgtgaaggagtactagctagctagctagcccagcggcagcgggcgaggcgaagggagcggaggtcgttcttgcagacatgttcaagtcgcggtggcgcggcggcagggccaaggccgtgttcaagctgcagttccacgccacgcaggtgcccgagctgggatgggaggcgatggtggtggtggtgacgccgcaggacgctggccggccgacggcgcggtcggagcccgcggaggtcaccgatggcgcgtgccggtgggcggcccctgtcatggaggccaccaagctccccaccggcaaggacaagatctaccagttcctcgtctatgagaccgggtcgagcaaggcggcgctgctgggggaggccacggtgaacctggcggagtacgccgacgcgttgaagccgtcggtggtgacgctcccgctcaagggcagccccggtgcgctgctgcacgtgaccatccagcgggtggtgggtggcgccggtgggtgcggagacgacgcgagcggcgagaacggcgacgctctgccagcggtggcgaagacgccaaagaggaggacgacgctgcagagccagctgagcaagtttgaggacgaggacagcgagaaggcaagagcagccgcggatgcgatgagtcctgtgcaagatggattgttgataagaaaaccgccagacatgaggtttccatcaagaagaaatgtgcctatgtctgctgatccagtgggccatctccacaatggcagcagtttcgatgccgtctcagtgtcgggttcagatggaagttctgggcgatatacccccaaaattagcgcaagcacacacaactcatttcttcaggatagtagcaatgctctctcgccatttgccaacaatcgcaccgtgaggaacccattgaccagttctggtgactggtcaggaagctcagctcctgatgctagtacggatgggtcaacaagcaattctggtgaggcagggttaagaggggaagaggatgatgtagataagctaagaagtgagatagccactttaaccaggaaagtggatgtttcagatatggagttgcagactctccgaaagcaaattgtgaaggagagtcggcgtgggcaagatctcttcaaggagatgagtagcctgagggaggagagggatgcactcagaagagaatgtgaaagactcagaggggcaaagaatatgatccatgattcaaatggctcagagaaacggctctcagatggggatgacccatggtcacagattgaagaactgaagcaagatctgagtcatgagaagaatctaaattcagatcttcgtctgcaacttcaaaagatgaaggaatccaactctgagctgcttctggctgtgaaagatcttgatgagtcgttggataaaaaaaacagagagatttccattttgcaagaggatacacaggaggatcagcaggaggcagaatatgagcatgcgctgtcaaatgtgcacaactctggacagaaattagccttatctgaaacgagttcataccaagagaaggaagatgagcttatgctggatgcactggcaaagaagcgtgatgacatctctacctctgagcttgaaaagaaagtccttgagttgagcaatgaaatcgagttgtacaagaaagaccgtgaggatatcgagatgcaaatggagcaacttgcacttgattatgagattctaaagcaagagaaccatgacgtgtcttcgaggctggagcaagcacaactgagggagcagctaaggatgcaatatgagtgttcggctcatttagctattataagtgatcttgaggccaatgttgagagcttggataatgagctccagacacaggctaaaaagtttgaagctgacatagcagaaataacgagcgcaaaggtggaacaagagcagcgggccattaaggctgaggattctctgaggaagataagatggaacaatgcagctactgcagaacgacttcaggaggaattcaaggtgttgtcttcacaggtatcttccgctttcagtgcgaatgaacgacaccttgtgcaagcaaggaaagaggtcgcggagctgcagttgcagaagagccagttagaagagttgctgcagaaggcccaaggagatcttggatcagttcaggatcagcaccgggcgaaggtccaacagttaataaccctagtggatttcaagtcaaaggagatagacaggctactgacggagctcaaaagcaagagtgacgagttccatgaccaaaaaagatgcgatgaagcaaggctgaatgctctgtcagaagaaatggacctactcaatgccaagatcgacgagctatccagcgagagaaacgacctctctgaaaagaacgcgcagaaagacaaggaactggccggaatcagtgaaaaggacatgcagttgcaagacaagactgctgagatcacttcactaaataaggagcttgtatctctcaaagaccaagtgaagacgcatctggacgaactgcacgatttaaaatgtctgaaggacaggaaggaggagacaattggaaaactgcaaatagatattgggtcactgaaactccagtgcgacaacttgaagacttcgctgtccaagaaggagtccgagaaagataaccttgcctctcaggtgctggagctgagaagatcccttgagacccgggaagaaggggcaaaggcaaatggccaaaattcagacgcgaagaacaatccgcatactaataataagcgcatgaagcacaataccggctccaccgggagcattgctgcactgccaggcaccaacggacagggtgaagacgatggtgactgcaatgggcatgacatgaggaacgccgcagcggacggggcacagcaaggcggtggaggaggagctgaaggagctgcacgagcggtactcggcgattagcctgaggctcgcggaagtggagggcgagcggcagcagctcgtgatgaccgttcggtcgctgaagaactcctccttgcggtgactgatgcatctccacccaaattgctgtagctaaaaggatttagacgataggtttgtccgtgacgtggttttgtccgtcagagttacagtacacagcatgtagatctcgtcacagtaaaatgtgcagtaatatagccataagttgtaatagttgtcttaccctctctacagtgtcagtgtgtcgtgctgtataatttccgtggcgtcattgtgttgtgaagtaaggaaaatgagaaggaaaagagtggtctttcagtttaatctcagaaa

SEQ ID NO: 33116 - DNA, 2768 bp, Zea Mays
cggcaggtcacccctagaggcctatccaccgccacgcccccaccagatttcgccggatctcagcccacatgcggacggactccgccgagagctcaagcaaataccttggcatatccgtctcgcactccgaggtccaccacgctcgctctccgcttcccgccttccccagccccacacccgtttttattcctccccgctccgcacctcgagctcgctctcggcgctataggcagctcacggacttggcggttttacattggggggctgcctgcaactgcaagtgcatagccgccctccactcctccctctctttccccgccgcttcctcctcccgcctcggattcccacccccagctccggctcctcacctcacggcaccaacccaaaactctagcccgcgcatggcgtcccccgcgcgccccgctgccgcctccgtctccggcgccttcggcctgcccccggacgcgcgctgctcctacgatcagcccctgccccgccgccgcgagggcttgcaggacgggaggctggtgcggacgttcgtggccgcctacggccagccgccgccgccgcagcagcagcagcagcagcaggacggtttcttgtaccccaaggacgccgtggtggcggccgtggaggagtgcacgcggaagcaggccgacgcactgctgcactcgctcggcgccatcgggggcaggctctcccagctcgagctctactgctacaagctcgagaggtccatcggggagctgcgcagcgacgtcatggactaccacagcgacagcaacgccaacttcaaatgcatcgacaggaacctcagacaggtagataaagactggatcccggtgcaccggcttctcgcgccgacgagtgcaatggcagtgcgatttggacttctcacttatgtttggtttggtgtagtaaaatgatagtctgtttccctgaaacctagtacattcagtggagtcaacttatggttcccggagatgagattctgcatcactttggatgtgagactaacatcatcttttgataactactagatctacattttgggttgccaggtccacaaatcgctccagcttcttcaggatagacaagacttagccgaaactgcaaaagaactcagcaagcttcagatagcacacgaggcgccttctcagacgaagggtgaggccgccggtttccccatgctcgcggcaagggaaaacggccacagcacgcgagccccaaaacacgaggtcgcccttttgccgcttcaccaggtcaatgggacgatgcactcccctgccgtgcccgtgcaggtccagaccagcaacggcttcgttctgcagcacctggtgcccgtcgctttgagcacgcagcagcatgagcagcagcagctgaaccaggctcccgtgttctacgtgcaaagccgggaccgtgctaaatgcaccgagggcaaggcggcgttggagcctctggttcaggttgtgcagccgcttgcgcacagccctgatgccgtggtgcaagtcgagctgcctcagaaagctagtcaagcagcagcagctgaactgtaccctcagcctcagactcagagtcacaggctgcagacgcctacccagcaggttgatctgcatacatggcatccccagcagcccatggtgcaagtgcaacagcagcagtacagtatccaacaagtttcacgacatatggtggtggctcagcagccgtcctcgtctcctcagtctcagctgagcgctccacaagccacacccttgtttcctccattcagttccgtgaaaccttcgagttgtaacacggagacaattacaagaagaatggctgggcagcctccatactcttcatcacagcagcaataccagcagcagcagcatgaagttgcccattcattctatggccaaggcaacacagtattgcttcctgtagcagatcataacgctcagcatcagcaaccgcaaccagtgcagctacacagccagggcccctcctgtccacctcagccaggcaagcccagtcactgcagcgccgcaccctatgctgttcaaggaaacggccagacctacagctccgcatacaagaacccttctaactgccctgcaactgcagccgttgtagctcttctgcctcagcctcctgccatcgcctgtatggcgtaccatcccttgggaccacaggtcgtgcacaaccatccatttggaaatactatggttgaaacgtccaggtccagcgtggtagggtacccacgggatcagtttgagatgctcccggcgattactgccgcccaacctgtactaccggttgataagctcaatgctggcagcaatgtaacatcgtcccctagggaatggtcagcatagcggtggacggtgcgcggtcttgcatttcactgcttccacacagcattctactatacgtattgcagctgggagctcgtcgggtctattttatctggctcttttttcccccatcagccagcagattagaacggatccttctacctttttcagctgaaggtcggtatggaataagataagtaggttggctgagtgatcactggtcgctgttggcatatgccctcacttttaatgggcatatgtgcttgtaaccaggtgcgagcttatattatatgcctttcttatatgagtacatgacgggtttacatcagcttgtcagatgtttttttgtaactgtgaattgcattactcatcctctgcaacagagatgtcaatagaaaatttcccaccaggtacggacacctgttacccatt

SEQ ID NO: 33117 - DNA, 2428 bp, Zea Mays
gccccggcccaaagcaccagcaccggcgcggcggtccaaagccagaagcagaacagaaaacaactgagacagctagagcagagcccccttcacaccaaaaatttcctctttgcgtcgcgccccgtcagctgagtccccgcggatgggctcggtctcgcggggctagggtttggtcggtcgtctcgtcggcgtcgagggcgccggcgctgctagctagtagtagctcgctcgcgctagggttctcaggagccatggtgatgcagcgcttctcgtggccgtacggaggccggagcgcctccttgtgcggcagcttcaccgggtggagggagtatcccatggggctggtcggggccgagttccaggtcgtcttcgatctgcctcccggggtttaccagtaccggtttttggttgatggtgtctggaggtgtgatgagacgaaaccctttgtatgtgatgaatatggactgatcagcaatgaagtgcttgtggaaaacaatgtgcaacctgttgtgcagccagagccttctatcagaggaactaatttggatgagggtaccgttttgacaacaatgcccccggagtcatcatctcagaacccaggcgtgcaaatagcagttttccgccatgtggtctctggaatattattacacaataccatatatgaagttgttcctctttctagcaagttagcagttttggacactcagctacctgttaaacaggcatttaaaataatgcatgacgagggtcttgctctggttcctctttgggatgaccatcagggaaccataacaggcatgctcactgcattagattttgtattaatgttgagaaagttgcagagaaatattcgagttactggcaatgaagagcttgaaatgcatcccatttctgcttggaaagaagcaaagctacagttttatggtgggcctgatggtgctgccatgcagagaaggccattaatccatgttaaggattccgatagtttggcggatgtggcactgactataatcagaaatgaaatatcttcagttcctatctttaagtgcatgccagattcatcaggagtgcctttccttaatcttgcaaccctccaggggattttgaaatttctttgctcgaagctacaagaacaggctggaggctgttcccttctgcacaatcagcttctcagcattcctattggtacatggtctccacatacggggaggtcaagtagcaggcatctcagaactttgctactgagttctcctttaaatacctgcctggattttctgcttgaagatagagtaagctcaattcctatagttgatgacaagggagcgctccatgatgtttactcactcagtgacatcatggctctggcgaagaatgatgtttatgctcgcatcgaacttgaacaagtgactgtgcaaaatgctttggatgtgcaataccaggtgcatggtcgacgacagtgttatacttgtttacagacaaataccttgctggaagtcttagagggattgtctattccaggagttcgacggcttgttgttattgaacaaagtaccagatttgtggaaggaatcatctcattgagagacatatttacatttctccttggatagcatctgtgtagccattccatacatgaaaaagcttgttgtacttggttcaaacgaaataaaaaggttacaaatgtgatagccatcttctatcttccttcttgatttggttcatattataccgcagacactacataattgagttgcaccgaaggaaagaacaggtaggtgctgcaggatggagaagtgttcagggggattttttgaaggaaatgaatctcgtggatttttcttccttggaatgaagtcgaaggacctcttcaaatgcgagcatatatatcttttttttgtggaaacatgaacgacgtcatgcaaatgattttcttgaagcattgctgtcattccagttctataagatttgaagtgtttctgtacaattacaatgcttttcatgaccccatttggttttgctttctgttttcaaacaactctgagatttggctcatgagaattgtatatgttcaattatcagtgcatcttggtgtgagtgacattaggcaacggaattttgttatgaaagactgaactgtacaagaaattgctatcataaggaaagcgaattaaggaattttggttgatgctcgaaatatgtcaattattcgcactgtgctagtgattatgtacagaatcagggaatgtctcgcatccaattagggagtgggttggttgggttggactgtgttatactgtctttggtggatcatgtaaaatatgtgatgcgatattgtagatgataatgtttgatattgtttaaaagtttgacattgtttgtagagtgaagtttaaaataaaagatgagatagatgataatgtttgatatt

SEQ ID NO: 33118 - DNA, 1430 bp, Zea Mays
ctccaatatcgtatactccatgcctcccatcacgcctcatccgcctgattcatcgcaggtgtgggaaacatggttgctgtcggcgaacggcgttaacagccgcacctccgttcctccgggcgtgcctccgttcctccggctgcgcccccgctcctccgaccgcccccggtacctctggttgacctcgcccccattcctccggctccgcttcgtgttctccggcctcgcccctgttcatccaaccttcggttctagcccctcgtgaaggtcgaccgttgtatctaatggtcgttgatccggtgacctcccccacaacaactctacccaaagactacgatggctctagggaagaggtccacatggacctcacggaaacccgaagaacttgtgccaactgattacgagaaaataagggctatgaatatgatgaagaacaatcaattgtttcaacggctaggccttggacaattgaaatcactggtgactgctacagctgcaaacaacaaagaagactgtcctcagcaatcagagagtttatatgatggtgaaaacactgacaattctaatgaagaggaatcccaatgtactaacggtggttgtgccaacatctccaatgatggtgatcagatctcaacaaaagtaacaagaggaaataaaataattgtggcacctacggaggagcgaacaattagagtcactaggcaaagaattgctaaagatagttgtatgaagaataaacttaatcgtgaaaaagtacagtatcaacaatgcataggatcccaatcatatattgcaaaagcttatttactgaaagaagagaaatataaggatgctgaaccgagtgcaatagatcttttcaaggacatgcattgcagcaagaagaaaggtttttctgaaaatgtaaagaaagcaattgttgacatggaagcaagggtgacaacaccagttgaggatggacaacaacaaaagtctcctatagaagttgtttctgaagtgctatggggctccagtttatttctacagaatgttggtctgcaagataactccaagaaaagctccacaacaactgtttttgctaaggttcaagaacttcataatcaattggagtctgagaggctagaaaaagatgggcttcaagaagaagtagaaaccttaaaggctcaggcacaggcctcaaaggagaccatggacaatatgaagagatcgatggaagaaaataacagtctcctccgtcaactgttgagcttcaatcgaagccaaacgtccccatcttaagtctgctatagtatcatgttatattagttctggattcaggttttataaatttggaatatgtttaaaactttcatactttgagttgaagttataggatttcctttgtattttaagttacatgatctacaatcatatgatttgaagttataaaagta

SEQ ID NO: 33119 - DNA, 1168 bp, Zea Mays
atgaggataagaacaagcgtgcacactgccgcgttctgccagccccgccccgcaacccgcagccgccccacgccgcaacccgcagccgccctggcaaccgcccgcatccgtggcttccatccggaaatctcggtcgcgatagcatcccgcaaccgccataatccccccaatctcgcgctcccctgtgctctgcggcctccacatttcacgcagccgatctctgctccctgcgccgtgttcgttcgcgaggttggggccgatgatggcggcggcggggcggactccgatttctgcggcggccaagtcggagacacaggcgacgcccggagaggcgctagcggaggcagccgggtcccacggctggctgcgcgagtacgtggaccgcctcgcgtcctcggcctcctccctctccgggcggtggagcgcgcggtggagccagggacaccacagccgcagccagagcaaccttgcgagattggggccagaacaatagctctatttgctatggaaccacctgctttggttttggatgtccagaataatatgctgctttcacaagacagacatcttgctttctatggagttgaaccaggatcaagcgaccttactggcccatttaaccaaggaatcatgcagccagaattgatgtgcaccattgccaatcctgttgatgttttgcacggagctattcacgacgcgtcaacaatgaaccatgtaattttacagagtgacgtactgacatatgtatatgcagttccatatgtgcttccaaaactgtcatctgtcacccatgcccacatcgttgttggcggagagcacgcaagtcatcgtgagttcgacctccatagtacatactaaagagctgtcgacgacatgacgaaccgtctcaaggatgccacagtcaggatgatgaaaattgaggcctacgaaaccctgcaaactttgggctcatccagcacctatagtggaaaatgcctaagctgcatttcggaggcatgataaggagtttctccaccttcctttaatcatgctgcttcttgctgagggtggcgtgaaaagagaggctactcaagatgaggaatttgaagttatgtatagtgaggacgatgatgaagacaaagatgacgaggatgatgaggaatatcacttcaccctttccagcttctaa

SEQ ID NO: 33120 - DNA, 3872 bp, Zea Mays
atacggaccttccggtgacgacggcatgacacaggcaggcagcgtgctggttacacggcgtccgaatcagcagttacccgcgtctctagtctgtactttccaggccatcgtctccttccccttctttcaccggcctcgagtcacacgcgtgagatctgtgccttccgccgcggccacatgccacacaacgacgcccggcgagcttcaccgcgatagaggagctccaggaggacggccgctccgcgcacgccctccgcctccgcgctttcttctccgacccagcgcttttcccgcccgatctcgtcgcccgctcatcctctgcgccgcccggtgctgatccacagattttgctagaagagaaaatagcagcagaagaaaagttggcactcacggagtatgatctgcgcctagccaaagaagacctttcacagttgaagcttgaattacaaaaacaaaaagaatcatctcctgatgattcaaatgggctccttttgggtgcttctatacgcgaaggatatactaggcaacaagaaaattgggatgtgaaaatttcagcattaggccctctaaaggataatgaacgaaaagatcttaattgcgctgtaaaagaatacttgcttttggcagggtatcgacttgctgttatgacattcattgaggaggttcctgatcaagaccttgatgtttggccaaacagttcagcttgtgttcctgatgcccttcgtcgttattactatcagtatctttcttctactgcagaggctgcagaggaaaaaatatccatacttcaggaaaatgaaacattactcaaggacaatgaacgactcaatgctgaaaatgattccttgatgaagagcagggaaggagctaatagtcaggttgccgctttaaggaagtctttggaagctgcacacaaggatataaaagacaaggaaaaaatgattcaagacttgaggcagtcactggatgtccagaggaaggagctgaatgactgcagagctgaaatcacagccctgaagatgtacatcgaagggactcaatcaatcaaacaattgtttgttggaactagtgatggtgtaaagtcgcattcctttgctaattctgtgggagcatcatcattgaataatgaagatgaagattcaaaaggatctgaagccataacaaataagctagcatcagcagtaaatattactgatgatacgcagaaagatcgccaagttctagaaagtagcgctgaagagtaatctgcatggagcttccatgactggtaaaagccaggggagttcagatggcatatccatgtatttatctattgagaaactagagagcccaagtaaacaaaaatcttcagataagattgctttggagactataaagatagtttcagatgcacttccaaagattgttccttatgtgctcataaaccatcgtgaggaacttcttccattgatcatatgtgctatagaaaagcatccagatagcgatgtacgggattccttgactcatacattgtttaacctgataaaacggcctgatggagaacagagacgcatcataatggatgcttgtgtagaattagcaaagagcgttggtgagatgaggacagaaactgagttacttccacaatgttgggagcagataaaccaccaatatgaggagcgcagattgcttgttgctcagtcgtgcggtgaacttgccgtttatgtccgtccagagatacgagattccctcattttatccattgtgcaacaacttgtcgaagatgctgcaacagttgtaagggaagctgcaacacataacctggcattgcttcttcctatgtttccaaatctggacaaatattataaggttgaggagctaatgttccaattggtctgtgacccgtctggggcggttgtggaagttgcactcaaggaacttgttcctgctgtagtaagatggggagataaattggatcagatatcaagagtactattggctcatatcctggcatctgctcagcgatgtccacctatttcaggtgttgaaggtacaatagactctcatcttcgtgttttaggagaacaagagcgctggaatattggtgtccttcttcggatgttgactgagttgcttccatttattcatcagaaagctatacaaacttgcccctttgcatcagctgatccaacaagctctacaccagagaacttctcagcatcctgcctaaaatcatatgcaacaggtgactctgagtggtcagcatttgagtggatgcacactgattgcctgccagatttgatcaagcttgcctgcttgttgcctgtgaaagaagataacttaagaaccatcatcacaaagtacctcttggaagtatctggactctacggtaaagattatctggagcacattatgctacctgtatttcttgtagctgctggtgacattgatagtggcgattttacctattttcctctatcaatccagccaaaagtccgtggcttgcgtccgaaaacttcaactgctgaaaaacttgccatcatgtgtgtcttcccattattgttatctggtattttgggttctccttccagtcgtcaacagttggaagagtatctgagaaaagtacttatccaaaacaccaaggatggttcattttctatgcatcatactactgagatcattaacgcagttcggtttctttgcttatttgtggagcaccatagtgtcatctttaacattttgtgggagatggttgcgagctcggataccagcctgaaaataaatgctgcggctctactgagagcacttgtaccctacacggatgtgaaaatagcatcaactcatattttgccagcacttgttacccttggctctgatcaaaacttgaaagtaaaatatgccagtatagatgcatttggagctgttgctcagcatttcaaaaatgacatggttgttgacaaaatacgcattcaaatggatgcttttcttgaagatggatcacatgaagcttctgtttctgttattcgtgcacttgcagtagctgtacctcattcaacagataggctacgtgaatatcttttaaccaagatatttaagatgacatgcatcacacctgtcggcaatgatattgaacggcgtcgtgaaagagcaaatgtactctgtgaagcgctccgggctctggatgctacagatcttcctgctatgggtatacgtgatttgcttctgccatcaatacaaaatctgttaaaagatctggatgctctagaccctgcgcacaaggaggctttagaaatcataagccgggaaaggtcagggggtacgctggaaagcattagcaaggtaatgggggcgcatcttgggattgcatcatctgtcagcagtttctttggtgagaacagtctcctcacaaagaaagaaggtggcgaggaacatgatcctgctggccccaccgctcctgagcaaaacctgcaggctcagccagagagcacgaggtttggtcgcataatgaggagcggctttggagacatattgcgaggtcaaagcaaaggacagtgatgcacttagattgaaatgatcaattacatacatagctgccgataccacattctttgtttgtaagttgacagaatatacctcaagggttgtatgttatttgccgagataaaaaaaaaggatttgacgttgcaaatctagcatcaaacttcctgtatgtaagttgcctgtagttagctgctcatttataagatgctaataattgtgtctttgtttcatttgtttttataaataaaatatataactagatatgagacactttgcccatcttttctgaaatttggatgttatagttggctgacatcatgtaattgatctgctttggttgaaggaacggtggg

SEQ ID NO: 33121 - DNA, 4229 bp, Zea Mays
gcgtcgtgtgtctgggggctccaaccgaggttagcgtgggccctcccgatcaagggcccgattaaaggaacgatagttgggttaagcccaatccagtctctattgaccggctgtagaggacacacccaacactccaatctcaggggatggtggtgggggtggaggtcaccacggcgagatggatcaatggattagggggaacggagatctgaggagaaaaccaaaacactgccgagtaggaatacctgcgagaggaaatgcacaggggtcagcaagatctcgatgacggaggatgaagaagaagaacagaggatccacgtaagcaccggagtctgggtcgaagcacaccgacggcgacagtgcacggctatgccatcggcaacaactggcgaaagaaagaaatgaagaacaacccgagtcaacaacgggagaaggtgctaatggatttgaagtcaagctactaacgagaaatctcacgcgaaacggaggcagaggcacgaaggggaaccaaaagttgttaatggcgatcagcaaaagctgttgccatatctttaaagagctcggttcggttataataccacgaatgcaattatgtgcttcgtgttgctatttctacgatgccgcatccataccggatgccaaattgccaacaggaaatattgtaattgtaacgtcaaactttccatgctcgttcgactacaacgtgctgcggttgacataagggtcccacgtgttgaagccccaccgatcagccgcaccagcttccccgcacagccgtcgtcgttatccccagtccacaccggccgcgccgcagcggcccatcccacccgtcagcgtcggcgtaggcccccgccggctccttcctctcgccgtcgcgagaccgagcagccagtagcagcaggagtgggtgctccgtgccccgccatccaacaccaaaagtggaacccctcacacccacgcgaggtggtcgacactcgacggagagccgcaaaggaggaggagctggcggtggcgggatccagcaggccgcccatgtcgagcggcgcggacggatcggatccgatcacgggccttggcccgtcgacgatcccagagccgccggaccgtgagccgcctcatctacagtctccgtcgccggcggcgcagcaggaggtggcggcgtcgcaagccgagacgccggtgccagcggtgaccatcgtgatctcgcggccaggggaggaggttcagacgcctgatgcaatgggtggctccccggcgtgctccacgcaggccggtgacggcaaggctacagccacctcggtttcgttgaccgcttcggcggctgccaaggaggccgagttggcaaggtccgacagcttcgacgactacgagcaatgcaggtattcagtcggtgtgggattccctgcgcgcaagctcagggtattttagtgaattgcgagttggaaaggggacgagggtgtgttctgcttgggagtgttccaattttgtatgggtaccttgttaggtttagtagttgcgcgttttatccatctatgaatcacctgctatggctttgggtgctccctatcttgggggcgttgcttcctcatgcggtgtagtgattgtaggtgtatcaacaaatttccatttatgatgtactgattcatttcttgaagtcaccctagaacatggatcatgtcaactggactgtttactttagctgcccttttctgtctgtaactacaccaatagatttttgcctgcagttgggtggatgttgttcatcacatataacatgcgagcaataagtttgtgaacacgttcattgtcagtttatctgcatcttcattagtattgactttgccggtgcttgtgacatgtgcttatttagaggccatatattagtgcaattaggctgtcacagagtgcaaatgggactacatagcattcctgttagctatgatattttagggtctcgagggtatttaggcgttgatgagaatgtaggttatgcttccaatgcagttgggttgaccttgatccttgaatgtagaagcaaaagatattcgcaataagtttgctgatggtaagatcatttgtgtgtagaattattaaagattgggacttcatagattcaataattcaatgaataaatatgatatttgattcttggttatgaaaggctaactggcagctatgagctgcaggtgaaaaacaatacgaggaagaatgctggaaactgataatcaacttctggctgagtatttcttgtaccacaaatgtgctgtgagcatgaactgcatgcaccgttgctttgccatgtattgatgttcttgtgttgatctttttttatatactcattgcaagtaataacatatccaatctgttttctgctggctctttgcaatttttgaatatagataggagcactatgtttactaatcagaacaattatctttaggagtttaattttcctaatatatgtacctgaaataataacatatccaatctgttttctgctggctctttgcaatttttgaatatagataggagcactatgtttactaatcagaacaattatctttaggagtttaattttcctaatatatgtatctgaaataaaaaaaaaactcgacctacgggggggggggggtaagacagccccggacattatattaagaagaaaaccttctcacgcaggtcgagaaaactcccgaacccctgccccacccatacacagcggcactgtagcccatgtgagaacacgaccgtgaccggaattgggccttagacctgtattttgcgtggtacagacaagtggatttttttaaccacagcctgaaattcgctcccatagggagtcgaacccaggacatgagaagtgctacttagaccaaactaaccaactcggctagagaccctttcgctatgtacctgaaatcaaatattggtcttttgtttcataggattaacacctgtactcctaataatcccagatcccattaaggtacctgaggatcatccttgttttggaacaacgtagaatgcatcggcttgtactgtttgaagttaatagagccaacattgttcttaacggaagtacattttttaactgttagacattgcaatgccatcccataattagattcagtcatcccggtccaaaaaaaaaagattcagtcatgtaaaacagacatctagaagcccttcagtacatactgccatttactttaccttcaaaattttatatattgctgactcttgccacttattaccttattttttatggaggatgaatacctttttcacttctgcagagtttgtcaacagaagacagaagaacctctggtcgaccttggatgtagatgtcgtggtgatcttgcaaaagcacatcgcacatgcattgatgtttggtttcgtactagaggttcaaacaagtgtgagatatgccagcaggttgctgccaatatcccccctccagagacgcaagcaagtacaagttattgggtttggagggttgattcgacttatggaaggggacgaggaggacgtgaaaggggatggtttagcccactttgggttgcatttgcaatcctgattggtggtctcttattggatgtgctgatatctgtttctcttggtgtttccgcacttcctgtcaatataataattggcgttcttatagttctcggattgggcaccgcccttcgtcttgctctcgagtgctgccaggaatggggctcaaggaggaacgtaggcaatatgccgaggctggagaacataccgccgactgggtaccaccctgcagtagtataatcattatgggacttgtaaatagcggtaggaacatctaaccttgtgctggctcttggattgtattagctttagctcacacgttgctcgttaatgtcgagctcaaattcaaagcttgttgattacgatcgggtccatactccactagtccaatgcaatgtaaatgcagagttactgatactcggtcttcatggactagtgctgatgccgaattgccagcatcttaattggttgtctggctaatcgttcagcatgacagcgcttggtttcttcttccttgtacggtttgctctcacaaatcacttgttgtgtttcatcttatctgtggcttgttggtataggcatttgtgaaggccatttgagcgaatgctgttttcatacgtttatgcacagagttgtgtggatatagcatttttatgtgaactaataacctgctg

SEQ ID NO: 33122 - DNA, 2302 bp, Zea Mays
ctcaaagactagcaaagaggtcaggtgaccggctcaccgctcggagtcgcggcttcagaaatcagaatcagagcacctgcctctcttcagtttgttgccgtctctctctctcctcttgacgcaactcctctcctatcttctctctctccatcgctccctcctccgcgccgcgttggcaccgaaccctcctgtcatggcaaggccgccgaaggaggcgattgataccttcatcagcatcacgggggcggacgaggccgtcgccgtacgcaaactcgaggaacatggtggtgatcttaatcgagcaataaattcacatttcaatgatggagacagcatattgaacggaatcagtcaaaacgccatgcctgctagtcgtgatgatatgatggacctggatggaccacttgataatacatttcaaagatctttgttgccagagagtttccgtgccccttttgctctaatggatccaaatttccaggaccaattttttgacagagttggctccactgatggtgtcattcgtgaaccgctagtttcacatccaagagaggtgagggagatacctatcgaagttaaggatggtgatcctcaaacaggttcatctggccaggatgttactggaaatgagtcttcaaatggccctgaagtccctgaaactatcataattgatgatgtggacggtggattgttatctgcaccatctgttccacatcctattattcctagcaatacatctactgtgccaactgctcctccattggttcatgttaatgactatgatgaggacatagaagaggaaatgattcgggcagcaattgaagcttcaaagaaggattctgaaggactggcaaatatagtcgagcaaggaggccagcatcaagaggaagtgaatttgagggaccattcttctgataaagcaggcatggaaaccgcaaatggaatagttgagaggactagcttcagaaaaggctggaacatctaggcaaccaatagatgacgagagcttccaggaggaggctgaagatgtagaagaacagccgttagttaggcgtcgttctcggcgtgccccttctgaggacaatgaattaccaaaaatagtgcacccaggtgctagccctgttctgaacaatcaccagtataatggagatgatttcccatctgagtggggtggcatttcttctgaggaacatgatgaagctgttatgcttgaggctgcaatgtttggtggagttcctgaaggaccaacatatcctttctctatgccttctcacagaacctctacttattatcccccaatatctcattctccatcaccagcattaactgaacagcggttattacgagagcagcaggacgatgagtaccttgcatcgctacaagctgatcaagaaaaggagttaaaggccctacaggaggctgagctccgtcgccttgaagaaacagctgcgagagaagctgttcttgagaaacagaagcaagaggaggaggaaaggcgtaaaaaacaacttgaggaagaggaggaggagaacacgcgtgacgctgctgccgacaccagagaagtcgccggcaatgtacccttggagtcatcgtcaccggctgttgagtacaggcctgcacagaatgcagctcaggttgcaagggaagacaatgtggacccagataatatgtcatatgagcaactacaagcattaggggaagcagtaggaattcagtccagagggttatctgatgagctgatatcttatttggagccatttaggaacaagtgcactttcttctccaggaaaaagaacagtgaggaatgtgtgatctgcaagacaacatatagaagccggcagaaattgataagactaccctgcagccactgttatcacgcagattgcataactcgttggcttaagatcaacaaggcatgcccagtctgcaacgaggaggtgtttggatgaactgcaaggttcctggcagatgctgcggtttcatcgttacttgcttgcggcatgcttttgagaagacgttggacgcataaggtccattgtttgtgattatgttgtgagcctagtttggtgccctttgcttaagaggactggctctgcccatgcatgggtcggtctacacgtgtgctagtaactggaccaggtcgcgttttgtgatgcgtctatccatcttggttttatcacaaattgatagatctgttgtgtgggtagtttggttgccgttttctgaatataatggatggtgtttttgccccctttttgggagaagttcaagcaaagagcagttcaatactgtcggcgtttcg

SEQ ID NO: 33123 - DNA, 5115 bp, Zea Mays
gcgtgaagaaaaaaaatattgatatgtgaacctaatctgcatctagcttcagatcgcaaatgttgctgacaatgttgaagaagatgaggaactaattctccggagcactatgcaaaatttctcaactttgaagcacattcatgtgaatgaagattttgttgagagtgacagtgatgagtctatttctgatgtcactttaaggctaaaggattcatgtctttcagaacaaccaatgaaagatgtgcatatggatattcgtattgtccagcgatctccaacttgtcctgatttttatccacttgagcattatgattgggaaagtgatatcatttggaacaattcaccagcaactgatcagcaggcttatgcaaaaatctgtgaatctgaagagagtgaggacactcatggtgaagaccagggtaaggattatggccaggcctccaggtgttgggatgtacagagtaaaaccaatggttctccagtaattaaagagactttttgttgtacagaaatgcctgctccagctaactactgcccccctgggaaaagttaccctccattgacaaacgaagataacttagatcacataatgccaaataacttagatgatgcagttaaaattgacaccatggtgcgtttaaataaccttagtgtactaaacagggaattattagaaggatcatggttggacaacataatttgggatcctaatgaggttaccccaaagcctaaactgatctttgacctcaaagatgatcatatgctttttgagatcctagatgaaaagaatgtggaccatctccagtctcatgctcgtgctatgattgttagccagtcaactaagacttcaacaccaacagttgacaattttggcgatcaaccaaagccattgagtggcaggttcaacatctccaatgacaagttttattcaaataggaagactccacaacaagctaaatctcatactaaaaaacgcgctttaatgggcataaaggtggtgcattctgctccagctcataagctgcaaaccatgaagccagtgttgagcaataaggaaattgcaaactttcatagaccaagagctaagtggtacccacatgaaaataaaattgcctctcagttacaaggacctgcttgtagccatgggaggatggctgttttacttatgtcattgggaggaaaaggagtcaagattctggtcaatgctgaggacactccggtctctgtcaaattaaaagcatcaaagaagttcggttgaattgaagccttctgagaagatcaaattgttctgttctgggaaagagcttcaggatgacatctcgttagcaatgcaaaatgtgcgaccaaactccattgtgcatgctgttcgcactgaagtgtacctatggccaaaagcacagaaattacctggtgaggacaagcctctacgccctcctggggctttcaggaaaaaaactgacttgtctatcaaggatggacatgtttttttaatggaatattgtgaagagagacctttgcttctctcgaatgcaggaatgggagcccgtctctgtacatattaccagaaaactacccctactgatcagacagctgcatcactgcgaaacaacagtgatggactgggcacagtgcttgcaattgatcctgctgataaatccccttttctaggagagatacattctgggtcccaccaatcttgtcttgaaacaaacatgtatagatcacctgtatttccccataaggttgcaccaactgattacttattagttcgttcagccaaaggggctctttccctccgtcgcattgacaagctatatgttgttggccaacaagaacctcatatggaagtcttttcaccagggactaagaacatgcaaaattatcttctgaaccgagttcttgcatatgtttatcgtgagtttcgtgctagagagaggcctgatgctattcctcagattcgagctgacgagttacccatacaaagtcctctgacagaagccatagtgaaaaaacgattgaagcattgtgcagatttgaagaaaggaccaaaggggcattttttctggacacagagacctgatttccgggttccatcagaagaagaactgaggagattattgacgccagaaagtgtttgctgttatgaaagtatgcaagctggtttgtatcgtctcaagcgcttaggaattctgaagcttactcagcctgttggattggcttctgccatgaatcagcttcctgatgaggctattgagcttgctgctgcatcacatatcgagagggaactgcaaatcactagctggaatcttacaagtaatttcgtcgcttgtactaatcaggacagagaaaatatagaaagattagaaatcactggtgttggagatccatctggtcgtgggttaggattcagctatgtgcgagtagcaccaaaagcacctgcctccaattcagtgctcaagaagaagtcagctgctgcaaagggtaccactgtaactggcactgatgctgatctccgcagattgagcatggatgcagcccgtgagttgctgctaaaatttggcgtacctgaagagcaaattgataaattaacaaggtggcatcggatcgctatggtgaggaagctttcaagtgagcaagctgcatcgggaattactatcgatgaaattcctgttagtaagtttgcacgtggacaaaggatgtcttttctgcaacttcagcagcaaactagggagaaatgtcaggaaatttgggacagacaagttcagtcactttcagctttagatggtgatgacaatgccagtgacacagaagctcacagtgatctagactcatttgctggggatcttgagaacttgctagacgcagaagaatttgatgatgaggatactagtacagcagacttgagaattgacaaagcagatggaatgagaggacttaaaatgagaaggtgctctacgcaagcccaaattaacaaggaaattgaagatgatgaaacagaggcttctctggcaaagaaactacttgaagacgatggcaatgatgtgaagaggaaaaaacagcctgtggaattgacaaattgtggcacctctttagttgccaataaaatgaagcagagtaagactgggcaaacgatcaaatcatctggttatgctggtgcattaaccccaaaggagaacacaccaagagaaggaaaagaggttgaaaattcttttgttgagggtggtttgtcctcaaaactaaaaccaaagatggcactcgatgtaaatgagactgttctagttaaaaagaaaagtgttccaggaaaggatggacctaaggaaaagaaacagggtgcaagaggggatagtcttgtttgtggagcctgtagtcaggttgggcatatgcggactaacaaactgtgccctaagtatcgggaggatccagaaatgtcagaaatggatgctaattcagttaagcccaactctatggatataaaccatttgcaagcaaagacacctaaaaggttgataacaaaagtttcctctgaagttactgaaactgaagggccagaaggtattgagaagacaaaatctgtcccagtaaagttcaaagtaggggcacctgataaatccttggagaggaacatgtcagtctccgtttcactcgtttctgataaacgtgtcatggatgttacagacagtagatctaccggaaaggtaaacaagatagtgatacctaataagatgaagtctgatgatttccctcctgacactccaaagccatctgttgtatttcggcctcctgctgaagaaaaggatgtacctcgcaaaaagatcaccatcaagcagcctaaaggcatagaccagcaaagacatgttgaatctaggagtgttcaggaacccaccagaaagacaagaaaaattgtagaattgtcgagttttgaggataaaagtagagaggatgatcattgggttggtggggaacccagccaggtgaattcctcacatgggaggaggctgggtctggaaggaaaaataagcaaagccacaatggaaaatgaaagatcctggagagattttgaggagcgaagagaaatgccacaagcaaggctctttgatgctacgatatatgcatcaagggaggaagatcatctaaaggcaaaaaagaaaaacaagaaaaagaaaaaacatgaattcaaagatgatgacttacttgatcacaggccatacagaaatgacaggagggtacctgaaagacatcgagcactaaaacgatctagtccagctcctgtggttggatatgcatcatctgccaagcgtcgcagaggaggagaggttgagctctccaacatattggaaaaagtagttgatcacttgcggggtttgagtggatcactgctgtttttaaaaccagtgacaaagaaagaagcttctgattaccttgatatcatacggtacccaatggatcttggtaccatcagggacaaggtgagaaagatggtgtacagaaacagggatgaattcaggcacgacgtagcacagatacaactcaatgcacacatatacaacgacactcgctatcctcacatccctccgcttgctgacgagctcatggaggtctgcgaccatctgctttacgaaaacgcagatctgctcaccgaggcggaagatgctatcgagtagcaatataaaaagctagatttagcatttggatcttgctatatcctaacatagatgatgtatctatcttctgatctgtaggaggggaaaaggttgtacattttttgggcctagcagcaatctacatgtgatcccgaatccagccagcttctgttggtattgtgttgagaggtagtggaagtacaaaatgtctaggttagccactcaatggcctcatgttgtaaaaatgtagaatgtaatcatgtccatatacatggcatatatcggtccaataatccgattgtgttgcagtatttgatatgatatggaatggcgtttcaattgcagcgtgaatcaagcacgggcctgtgtgcacactttcttccaacttgaaccttatttcttatctggaggtgtatatgcattgaaccctgaaccgcaaagctgatggacaattttttttccaaacatgttgaag

SEQ ID NO: 33124 - DNA, 3489 bp, Zea Mays
ccccctggtatcttcagatctctactgcaaactacaagcatgtactggcctggcctagctcatctatctatcagatgtctaccaagtacaaaaaccccccctgatatctttaatcccggcaaaacctgcgtggcatatctgcttcacatgttctttaggccggcttcttgtttcattaacccaaccagatttggctctccgattggcccgctggctgcactttccctgatctttcctcgagctcgataaacaaatatcgacgcgcagcgtgcctcccgctaactaaacgatctccacagctcctcatccttctgcgttgccgccctcgctgtaccctgctgcttacccttcaagcctgccgaccatcgcatcatcactagctttttttcttcacttctgctcggcgtctcttgtttgctgttggctgttggcttcataagcgcaaggaaggacgagagatagagcgacgaagtatcttgctcggaactctcccacagctgggctctgagatgagtaatgggttctgaggatagagccgcgcgagcttcctcccgttctgcgtccctgcgacgtatgggcactgcccgggggctatgacctgtaaccaaagaagagggaaaatgcgagataagcagcggctggaccatgataaccagggatgcaggtatggctgttgatttgcttcgtgttcacagaatcctctccaccctgttggagacaaaggggataaccgtcacgagatatatagaaggtagaggtaatacccagaaaacaaccgaattgttgctggaagctggtgagcaagagcttttacgcacctgggaagacccaatggacgagcagtgcaaacaggacagcaaggactcgattcggagaacaatcgtggagcatgataaggtcttcaggcagcaggtacgtagcaagcagcaccataatttgtgaggtatatttgcacacatagacgacgagaagctaacagactgctccagttctgtaatatattgtagcacactactacttagctgcgtaatacctccatctttctagtgataagttgacgaccagttgttagtcagacctaagttgtcttgtcatccatgcaacaagaacttttgcatctgatactgatactgcttctttgcatcaggtgcatgagctgcatcgtttgtaccatgtacaaaaaacattgatggctgaatgcgatagccataggtatcaaccgagagcagaaggaactcatgaagtggtgcagggatcaaggtcgaacctcaagtgcagtccttctacctcagggacaaaccaatctgctctccttggtaatgcacaatacccagctccgcagcaagtacaagaagatttgagtctccatgaatgcaagccggtgaactgcctcagcctcttcggtgaagaaaactcagcagccaaagaaaggtttcacggggagaaccataaatcagttgaagatgaaagctggagcgccgctgtagagagtgatcttgacctcaaactgagcatcggccccagctcacattcaccagaaacaccgcgctggctattctcaggaagcagggaaagaaacccttctggccagcatcgatgagagcaagctagtaaatatctgatcattcagtttgggggcaggagaagcaaaacacagcacactagagtttcatatgctgagaaagctgaagcctccattaaaaatggcatgtggatttgtggaaatacaggtctcaagaaaaatacacttctagctcctatggcgggcgccttggccaaaaacagaaacaaagcccagaaaggcttccaccagatttcaatcagaattctttagtatgccaaaaatgtagaacctcaaaggtcccaatgcttgctatgggtaggataggactgcactaatgttatggcaagtaaaggattggtaacaattcaggtcttgcttgccttgtgcataattttgagtttcagagcaaaagtgataagaaaaaacattaggtaagtattgaatttgaaagaaccaaacaatccctttcagttctcatacaccaataattatatagtcacattcagcagtatacttagtgtttttcaattacccatcatgattgatgttttgcaatttgcatttgtactgtgggcactccatggtccatgcttttaagtatatatatattttttcaaatcagtgtgtccacttttgcaatcaaacactgacttcctcattacccatgcattaccgaatagatctgtcaccagatgtttagctcttcattgcaaacaaagattgccatcactcaattgctttgaattcataagcagtgttctaagctttgctctgctgttcagagttgaccttcctatattggaaaccaagtcagataaataagccggacaaggaactgttgtcggtgaaggtttaggccttgttcggttagctcggattgtggctaggaactattccaactaatcaatactagtacaaataaacttatcattccaaccggaatggttgtcgtggaacggttctggagtaaacgaacgggcccttaatggtttattcacccatgtttatttttttaacaaaatccatatcatgcattcaccagaatccactgcatgagcattctccatcttcgaaatgatgggatctcaagttgtccctgtctataatctcgatgggcccaacttttgacaccaatcttataaacaaatggcagtcctcacatatccttagattctttactatcctaattgaggatctagactcgagtttgagcaaatccaaatgacagagcaagcttctcactatgacccattgacaacctttctttctcttcctcacttacgttataaacaactgaactaaggactggcacataacttgcaagattcaattttgcccgtagctccaataatcttattctatatttcatgcatccatgggtgtgtattatcaccagcaaagaacccgacccgacaactgcattcctcccaagaccattccattctacaattccctgaacccaggcgtctcgcctcaccgcaccgagctgagcagattgcaccggtgagtgaagcttcatcaatgggcatgccggccacctccatctgctcaaatggctccagtgccttcactggcatggcattctgtgcatacgccgtcaccattgccgtccacgccaccatatccttcaccagagcgcacacacctcctcagctgaacccatatcacggctcctagaatacgctgccacaatgcttgtacacgaaatgacatccttcaccgtcatttcgtgaaacaccttacccgcggcaccaacatcgccgcacgcgacgtacgcaccgatcaacgagttctcaacaaaccgatgcttatcggaggagcgacaccggccgtggcggacgcaggtgaagaggcggacggtctccaggcgcggctgagtgaggtgcgcgaagcggagcagcgcggcggcgaggagagaagaatac

SEQ ID NO: 33125 - DNA, 4831 bp, Zea Mays
cgttgacgaaaccccaagtccatgtgggaggttttgacttgatccaaccaagaacgcgcatttcagccgtaaaatactcgtaccggtttccaggtccggtcgcgtcttgctctcttccgtccctcatttgccttcccgtccctgctattcgcgtgtgggcctttgcttacccattcttgcttccgctgtctttgctgcgtgtaaatctgatccagtacttgtgtgtccgcgtcactggggattctttactttaagttggatttggcaatgtcaatggaaggagcgatatctgatctgaattggtgacatttcttgctgctgctttggtcctggggtgggcggattggagagcgaccactgtcttgccggttgcttttggggtagctactgttcttgtgaatttctgatgcggagtttcgctcaggatagggaaaggagtgatctatagatttctaggcttctgtagggaaagaagtgatctttgatagatttctacgcttctgttggcgattcctcttcatctcaacttggggatttctgccgaggagactttcctgactggtttgggttcagctgaggagcagagatgaggttgtctgttcgtgtgatcgaggcccgcaacctgcgggccatggactccaacggcttcagcgacccgtacgtgaagctgcagctcgggaagcagcgattcaagaccaaggtgatcaagatgaacctcaacccgacttgggatcaggagttcagcttccttgtcggtgatatcaaagatgtgctcaagcttgatgtctatgacgaggacatcctccagatggatgacttcctgggccatttgagggtgccattagaggatgtgctgtctgccgatgacttgtcgcttggtacccggtggtaccagcttcttcccaaaggcaaaaccaacaagaccgtcgactgtggggagatttgtgtctcaatatcgttagaatcatctggagcatcacgatcatggtctgaggaccttggagatgaaattactgatatacagagagactattcactgtcaagccaaaacacggctccatctatttcatttgcttatcgagaaactgaaatttgtgaagaagacgatgagtattctgttacatctgaaattcatgcagaggatagaagtagtgaagttactgatagaaatcaagctgctgcagaggacaagccaaatgggaattctagtgcagatttgaatggaactgaaacttctagtggtgaaacagataagtctgataagctatcatttgttgatcgtgtctaccaaatatttgctaagaaaaatggcgatacaatgccaacctcctctggaagctctgaggctttagaagaagttcaagaggaagcaagtggatgtgagcttctggtcagtcaaattgataatgtgtgcccagagactccattcagtgaactactgagatctcttgaattgcgacatgaaggagtcgatatgcctgtaaatctacaaggaattcttgttaatcagtcgtatcttgcctcacctagtgatctgaataaccttctcttctcaccagattcagattttaaacaaacaatggttgagcttcaaggctgtactgatttcaaaactgaaccctggaggcttgataatggtggggagtccttaaagagagttgtaacatacacaaccgcaccatcaaaattggttaaagctgttcacgcaacagaggagcagtcttatttgaaggctgatggaaaagagtatgcagttttactgagtgtgagcactcctgatgttccatgtggtacttattttcggacagaaattcttttccgtatcatgccaggtcctgaacttgattcacagcaacagacatcacatctgagtactatgataaaaagtatgatagaaaatggagcaaggcagggcttggagcaaaactatgcacagttttcggatttactatcacaaaagatcaagcctattgatgtagaaggttctgggtctgacaaggaacaggtcttggcctctttgcaaggaggcgaggaatctgattggaagatagcatttctgtacttctgcaactttggagtcttatcctccttttttgtgtctctttacattattctgcatgttctacgagtgaatccaagtgctgttcaaggccttgagtttccaggattagatctgccagattcgctcagtgaaattatcatgggtgggctgttgtttcttcaagtacagcgcatacttaagaatattacatgttttcttcaagcaagagaacaaaaagggggtgatcatggcatgaaagcaaaaggtgatggatggttgttaacagttgctttaatcgacggaatcaaattggctccagtcgatgctactggtttatctgatccttatgtggtatttacttgcaatggcaaaacaagaacaagttcaattaagttccaaacactagagcctcagtggaacgaaatctttgaatttgacgcaatggatgatccaccgtcggtgatgagtgtacatgtatatgattttgatggaccattcgatgaagttacatcccttggacatgcggaaattaactttgtaaaatcaaacttgtcagagttagctgatgtatggattcctcttaaaggtaacctcgctcagtcttggcagtccaagttgcatctgaggattttcttgaacaactcaaaagggaccggcatggtcactgagtatctgagcaaaatggagaaagaggttggtaagaagatgacactgaggtctcctcggaccaatactgcattccaggaactcttctctttgccagcagaagaatttctcatcagcagttttacctgctacttgaagaggaaattgcctacacagggtcaagttttcttatctccaagaacaattgggttttattcaagcatgtttgggaggaaaacaaaattttactttctatgggaggatattgaagacatacagggaatacctcaatcaatatcatcatggagtccatccattataataactcttcacaaaggtagaggcatggatacaaagcatggtgcaaagagcatggacaatggaaagcttaagttctgcttgcagtcttttgcatcatttagtgtggccaataggacaataatggcattatggaaggcaagatctctgagcacagagcttaaagtacagcttgctgaagaacaatcccaaattaacacccttcagagtgaggacagtggggtctttgttggtattgaggatgccaagagccttcagatgactgaagttttctcctcgaccatttcgaccaatatggcctcgcttatggaggtgtttgcaggaggatccttggaaatgaaggtaatggataaagttggatgccagaagtactcggctacacagtgggaatcagataaacccaatgagtatcaacgacaaatccattacaagttcagcaagaagctgtctcccgttggcggagaagtgacaggaacccagcagaaatctcttatgcctaataagaaaggatgggttatcgaagaggtgatggagctccaaggagtccttcttggcgacttctttacgctccacatcaagtaccaggtcgaggacctcgctcccaagcaaagagcaagcaatgtgcaggtctccctgggaatcgagtggtcgaagagtaccaggcaccagaagcggatcgagaagaacgtcctttccagttcgtccgcccgcctaaaggagatgttcaaccttgcgtcgagggagctctcgcacgccagataggcggcggagcgtaatggcctttcgacgtctcacccaccgtccctgtgcataacaacaacaggaccgatcattgagtgaacatttaacacccactaactgtatatggaaagcttggctgaagactgacagacagcaacgccaagaagaagaggaggaggtactgtaggatagctcgatagacaacgatatagctgtatgttctgcttgcaagttgttctctctgcttgtagcagtatgggttgccctcaggtaggctctgaatgattctttggtcacaacacacaacacatgttggaattatacacagtacacgtccgaggctcaagagatggaacaaagctatgaagtttacaacattcattatagtcactattccaggcaggggacaggcttgcgtctgttgcccgttcattcatggcggcggttcagttgaacgccgactcgccgagcaggaagaagatcactgttttccggcggaaggagacgtgacagtgtgacaccgaaccgaaaccaccgttcccgcctccggaagccttgctgctgctgctgaagcatgaaccatgaagaaaggaaggatccagaccggcggcagcaaagcccaggtcgtcttgttgtcacgcccatgcccggagacgtcgctggcgcggtgcctgccaatgctgccagtgatccggagtacgtacttggctggcctccgatccaagaaaagaaaccgacttgctgtgacgggcgccgcgcgacgtgctccccatccatccatccaatcatctctcgatgagatcatgggaaggaacgtcgcgatcgttggcgtggattccgctggccccgtgcctgcctgtttcgtccctgcaccgccgccagccgcttctaccgccggtgaggtcgccttgaccgatcacccaggatgcgggccggtgcagtcgagcaggcgcgcgcgcacgccatgatgtgacctgcgataggctaggggatggcttccagcggcggcttgtatgctgtccgccaggaagatgatacagcaacttcactactctgacaggctaggcggtgaagatgagagagaca

SEQ ID NO: 33126 - DNA, 1418 bp, Zea Mays
cttgtgagttgtgaccttatctatcaccaaggcaaaaagatggagaatggaagtggtgcggttgtaccttctaattcttcagataggtccgacaggtctgataaacctttggaccaaaagacaatgcgacggcttgcccaaaatcgtgaggcagcaagaaaaagtcggctgaggaaaaaggcatatgtgcagcagctggagagcagtaagctgaaacttgcacaactggaacaggaactccagaaagctcgccagcagggaatcttcatttctagctctggagaccaaacccatgccatgagtggaaatggagctttgacttttgacatagaatatgctagatggctagaggaccaaaataagcagataaatgagttgaggactgcagtgaatgctcatgcatgtggaagacacctgctgaaaggtgcttcctatggcttgggggttttcgtccatctgagcttttaaagctcctagcgaatcacctcgagcctctaactgagcagcaaatgctgggtttgaccaacctccagcaatcttcccaacaagcagaggatgcgttgtcacagggcatggaagcactgcagcaatctttggcagagactttggctggatctctcggtccagcaggttcttcaggaaatgtggcaaactacatgggtcagatggccatggccatgggcaaactcgggacgctagagaattttcttcgccaagccgacaacctgcgacagcagacgttgcatcaaatgcaacgtatcctaacgatccgacaggcttctcgtgctcttcttgcaatccacgactatttttcacgattgcgcgctttaagttctctgtggcttgctaggccacgtgaataacgaagggccgtcagtattttgagttccctctgccttacggtgctgctgcgtcgttcgcagcgatgcatcacagatctttggtggtactgtttttgttgtacaattacttttggccgctgcttggtccaaattgtactcaggtgggtgtacaagtaggtcaatataatcctgtaagttatggtgatttatgggtgtgttagcaatgcaataataattagagagggcaggatcagggtttctgttgtttgtactggttagagatttagtcctaatgtaacttcctgggacatggggggcggaatgggaagagagtaacaagaatcttcctttggttactgtagtatatgttggtattgttgcatcccattttctcattttgctgttaggagaatgattattctgtccatttgtgtactttttgattaatgttgtttgtagccccaacatgattatggatatgactgctagttcattcccattcataccactgcagtagctggccttattattaatatcatcatccatacaagagcagtggttgaagttgaaggcggc

SEQ ID NO: 33127 - DNA, 6474 bp, Zea Mays
  misc_feature (6473)..(6474): n is a, c, g, or t
gctgaacctggttgagcccatatatcaaaaaggtgttgaccagcaaagcatggacgaagcacgagttttattggggcgcatattggatgcattcgttgggaagtttaggaccctgaagcgaacaatccctcagttgcttgaagaaggtgaggaagggaaggaacaaccgaatctgagaatgaagcttgaagtcccattacagactgtgctgaatttgcagcaacctttggagtatactaaggaaatcaacgattacaaaagtctgataaagactcttgctgtcggaatgaagacaataatatggagcataacccatgctcactggccacgcccccaggtgcggaagacatctggtgttctgaagtctggcgttcactgtctggctctttttaaggaaaaagacgatgatagggaaattctgcaatcattttcgcagatgctggctataatggaagctcgtgatattatggatatgttctccttttgcatgtctgacctctttgattctatgataaccaacaaccagctattgcacatattttcaacccttttgcaagctcccaaggttctgcggcctttcacagatgtattaattaatttccttgttagctcaaagcttgaagccctgaagcagccagattcacctgctgcaaagcttgttttgcaacttttccggttcttgttcattgctgcagctaaagctccagaaagctgtgaacgcacacttcagccacacgtgccggttataatggaagtctgcatgaggagtgccactgaagttgagaaacccctaggttacatgcaccttcttcgaaacatgtttcgtgcattgaacagtgctaaatttgattcattgatgcgtgatcttataccatctctgcaaccctgcctcaatatgttactctccatgcttgatgaagtcattcttgctttatggtctcatttaaggcctcctccatacacatggggcacaaagtctttggaacttttagggaagctggggggacgaaataggcgatttttgcgggagcctcttgcacttgaatccaaggaaaatccggagcatggattacgtttagttctgacttttgagcctgcgacaccttttttggttcctctggacagatgcatacaccaagctgttggtgcagttatgcaaggcaatggcttggaagcattctacaggaagaaggctcttcaattcattcgggtgtgcctcgattctttgttaaatctgagggaaaatgtacctggcgagggtgtgagccctggtgttctcggtacattgctaatctctaacctggatccctcaagacgtcggaatgatgcttcagatatgaagggagatttaggtgtgaagacaaaaacacaactactggctgaaaaatctgttttcaagactcttcttgtagctatcattgcagctaatgctgacaccagtcttcatgatgagaaggatgattatgttgtcgatatatgccggcattttgctatgcttttccatgttgactcaccatcctccagccaatctggatttatgcatcctattggttcttcactcccatctatcatcatgggatcaagatcaagatgcaacacttcatctaatctccgggagctggaccctttaatatttttggatgctttagttgaagtgctatccagcgaaaatcgtcaacatgcaaaagctgccctatctgctttgaatatttttgccgagacattaatctttcttgcacggatgaaacacactggtatgctaaggggaggtcctagcacccccatgctagtctctagtccatctttaaatccagtatattcacctcccccaagtgtgcgggttgctgtatttgaggaattgttacctcggttattgcattgttgctacagtagcacatggcaagctcagatgggtggtgtaatgggtctcggggcattggtcggtaaagtgtctgtggataccctatgcatttttcaggtcagagtcgtgcgtggtcttctttttgttcttaagaggttaccagtgcatgcaaacaaagagcaggaggagacaaatcatgtcctaacacaagtacttagagtagtaaacaacgcagatgaagcaaacagtgaacctcgacggcaaagttttcagggagttgttgaattccttgcacaggagttgtttaacccaaacgcttcaatggttgtgagaaagaacgtgcaggcttgcttatcactgcttgcaagcagaactggcagtgaggtttctgaattgcttgagcctctctatttgccattgcttcagcctctgatttcacgacctcttcgttcgaagaatattgagcaacagaagcactacaaattgccgaggctgatgaaactatatgggtcactaggatgatgaatgcgaaagtagttctcacatggaacaaactcagaaccgcatgcattgaactactctgtactgcaatggcatggggagatctaaaagctcaaaatcatactgaattgcgagcaaagattatttcaatgtttttcaaatctctaacatgcagaacaacagagattgtcaatgttgctaaggagggacttcgtcaggtggttcaacagcaaaggatgccaaaggatcttctacagagcagcttaaggcccattctagtaaacttagcaaacacaaagagccttagcatgccattgctacaaggattggctcgcctgcttgaattactgtcaaattggtttaatgtcactttgggtgccaagctattggatcacttgaaaaaatggctggagccagaaaagcttgtccagactcaaaaatcttggaaggctggagatgaaccaaaaatagcagcagctatgatcgagctgtttcaccttcttcccccggcagcaagcaaattcttggatgaccttgttaccttggtaattgatctggaaagggcacttcctgaagatcagttttacagtgagatcaacagtccataccgtgctccactggcaaaatttttgaatcgttatgttctggaggctgttgactattttcttgctcgattaagccatccaaagtatttcaggaggtttatgtacataatctgctcggatactggggacctaagggatgcacttgcaaggtcacctcagaaaatacttgcaagtgccttttctcagttttactctcaaagtgaagcatctgctgctcaattatcttctgtaaaggatgaagcccttactggggctgtatctgagagtattactgtacaatcttcatcaaacatggttactacttctgagagttactttaatggattagagcttgtctcagcccttgtgaaattgatgccagagtggctccgtaacaaccgggttgtctttgacaccttgctacttgcttggaaatcacctgcaagacttgcgaggttgcagaacgagcaggatttgagtttaccccaggtgatggaaagcaagaggctgatcaaatgcttcctgaattacttaagacacgatcgaactgaagttggtgcactctttgatatgttatcagtattcttgtaccgcagtcgtatagattatagctttcttaaggaattttatgtcatagaggttgctgaaggatactccccgaatttgaagaaaactatccttaatcattttctgaacattttccagtcaaaacaatatggacaagatcatttagttgttaccatgcagattcttatacttccaatgctagctcattcatttcaaaatggacaaagttgggaagttgttgatcctactataattaaaactattgttgagaagcttcttgatcctccagaagaggtcagcgctgaatacgacgaaccattgaggatagaacttcttcagctagctacattacttttgaagtatctacagactgatcttgttcaccatcgaaaggaactcataaagtttggttggaatcatctcaagcgtgaagataactcgagcaaacagtgggcctttgtgaatgtttgtcatttcttagaggcctatcaagctcctgaaaagattattttacagctgaagcttattgttcgccatgcggacctcttctatagttgcagagcccactttgttcctcagatggtcaactctcttagtcgccttggattaccatacaacacaacagcggaaaatagaaggcttgcaattgaacttgctgggttggtagtggcatgggaaagacagagacaaagtgagatgaaagtggcgcaggaaagtgagagccagaatcaattaggtgacatgcttaatccttctgttattggtggtgatccaaaacgctcctctgatgttccgtcgtttgctgatgatttgagtctacctgatgaggagtataaacctaatgcagcaatggaggagatgatcattaccttcctaattagggtatcacttgtgattgagcctaaggataaggaatctagctcaatgtacaagcaagctcttgatctactgactcaagctctggaagtctggccaaatgccaatgttaaattcaattatctggagaaattacttgggaatctgtcacccactcctcagtccaaggaccctgcatcagccctcgcacaaggacttgatgttatgaacaaagtcttggagaaacaaccccgtctcttcatccgaaataacatcaatcatatttctcaaatactggaaccttgctttggcaacaaaatgctggatgctggaaagtcactttgttccttgctcaagatggtgttcagtgcttttcctcttgaagcagcaacaacgccacaagatataaagttgttgcatcaaagggttcaagaactcattcacaagaatcttgctgctgttacaactcagcagatagcacttgagctcaacaatgctcactcaatcattagcttttcattgtttgtcctcaatgcacttgcagaagtacagaagaatttcattgacccgttcattggcttgcttttccgtgttctgcaacgtcttgcacgtgacatggggtcttctgctggcagccatatccgacaaggacagaggcctgaactggattcatcagttaactcacggtctaccatagattctactgtcatatctaacatgaagactgtcttaaaacttataagtgagagggtgatgtcctcttctgaccacagaaaatctatgggccaaatacttcaagctcttctttcagagaaaggcactgattccagcattcttctgtgcatgctagacatgataaaaacttggattgaggaagattgtaggcttgcttcatcaactggttctgttagttcacttaacccaaaggaaataataacttatcttcataagttatcattagttgacagaaaaagctttcctccagctgcacaagaagaatgggatgcaaaatacttgcagcttctttattcactgtgtgcagattcaaccaagtatccgttgtcttttcggcaagaatttttccataagattgagagacagtatatgcttggacttagagctaaagatccagaaatgaggaagcgattcttcaagctttaccatgatacagtgggaaaaacattattttctagattgcaatttataatacagttacaggactgggaagctgtgagtgatgttttctggttgaagcaaggtcttgatctcgttttggcaatattagtagaaaatgaaccaattacacttgcagcaaattctgctcgagtaccaacgcttatgatagctgggcctgttccagatcgcatcaccatgccacagcaggttcctgatgctcaggaaagcatggatggtacaacactatcgtttgactctcttgctgcaaggcatgctcagttcttaaatgacgcgaacaagcttgtggtggcagatatcatggctccattgaaggaacttgcatttgctgatcccaatgttgcatatcatttgtgggtgcttgttttcccaattgtttgggtcaccttacataaagaggaacaagttgccctagctaagccaataatcgcgcttctatcgaaagattaccacaagaggcagcagggctgcagacctaacgttgctcaggcacttcttgagggtcttcatttgagccatccccaaccacgcatgcctagtgagcttatcaaatatattggaaaaacttgcaatgtgtggtatattgcaattgcattactcgagagtcatatagtgcatatgaatgaggccaagtgctccgagtcattggctgagttatacagacttcttaatgaagacgacatgaggtgtggattatggaagagaaaatcaatcactgcagaaacaagggctggtctttcacttgcccagcatggttactggcaacaagcacaaaatctattttaccaggctatgattaaagctactcagggaacatacaataataccgtcccaaaggctgaaatgtgcctttgggaggaacagtggttgtcctgtgcgtctcatttaggtcagtgggaagtcttagctgnn

SEQ ID NO: 33128 - DNA, 243 bp, Zea Mays
tccgcacaggcgcgcgtgaaccgggcggatgaaaacggccaccgacccacgcccggtattgaccgcgcccatgctcattccgcgcgaggagttggcagcagcggggcccacatgccagtggccggcgtggcacagcggaagggggaaaggaagttgggccggccagagaggtagttgggccgagaagcaaccaattcagcccatggcgcaggtatatcccttttcttttatttttattttttt

SEQ ID NO: 33129 - DNA, 371 bp, Zea Mays
gcgaaatctaaaatccccaaaaccctagctacccggcgtaactcccctttccctcgcctctctgcggcgctgcgcggcacctagcttcctatacgaagcaccggaggcggggtagactagcgggctggccatggcgtcaacggtgctggaggcgacgagggtggcccatgaggacttggagaggctggagcgcctcgcggcgcgcgagctgcaatgggagcccgataacccgcgcgaccgcttttttcagtcccaccgcgtccgccacatgctcgacctcgtcgtctccacctcctgcaagctctttcatatgttggtgcgcttataagtgaattgtagtgttggatattgtttatatttttcaacttctt

SEQ ID NO: 33130 - DNA, 1474 bp, Zea Mays
ttgggcccacctgtcatccacagcacggcccgccttcctaatctcgggacttgggtccgctatgcgaaccactgaaaagtccccacgaacttttactctagccctcccagggtctctcttcggcggcggcgatgtctctcgccccggacccggcggacggcggcgccggcaccggcaccggcgacgactggttcctcgactgcggcatcctcgacgacctcccggccgcggcctgcggggccttcccgtgggacgcgtccccgtcttcttccaaccccagcggctgtgtttatgacggtggaatggatggattgcgtgtgatggtgaccaatgatttgcgcaaacaactgagatggtctgctgtagcgtgaaccgttttatgccggcgactcaatggatggaggattgtgtcaccagtcctgacgttaagtatgcgttgcgagcaatgggatgtgctgctaggtcatggatgacatcgtaaagctggactgcagagccaaagatataagttcccatctgtcattgtggaagtgggcagctatgtgaataccaatgatgttttcaaggagcccaatgatgtcttcaaggagcctggcagcaataagcgtttgaggtcaggattcaatgatgtgcatgtgccaacatctaaagcttctagggaaaaaatgaggaggaacaagctgaatgacaggtttcttgaattggggtctacattagaaccagggaagccagtaaaagctgacaaagctgctatcctaagtgatgctactcgcatggttattcagcttcgttcagaagcacagcagctgaaggaaactaatggtagtcttgaagaaaagatcaaagaactcaaggccgagaaggatgaacttcgtgatgagaagcagaagctgaaattggagaaggagagtttagaacaccagatgaagctgatgacatcgactccaacctacatgcctcatccgaccctgatgccggcgcctttccctcaggcacccctagcgccgttccatgcccaggggcaagctgcagggcagaagctgatgatgccctttgtcagctatccggggtacccaatgtggcagttcatgccgccttcagaggtcgacacctcgaaggacagtgaagcgtgccctcctgttgcataatcgcttcgattggcggctggtcgtgctcacaccatgcgaattagtcgcaactgaagccccccctagctgtcgattcattgattggctataactgctgttgttatatttgtagttcgttggtgaccaagtaagctgctgatatctgtggcggggcgccctactatagaggctactgataccccttcaatggctgtacatttttttactgttattctttttgcggagaaaagaagaatgtttgttcttgttctccacagcaacaatgtcacataccctattattctatatatatgtcgtgtattttatatttaacaatgccgtgtctt

SEQ ID NO: 33131 - DNA, 741 bp, Zea Mays
cagcagcccagcccatttggcccatctcaaccgaaggaggcaaagacgcaacgcgaggtctcatgggcgaccgggccattcgtcgtctccgttgtctttgttgcagatcggtgctcctctcaccaccaggccgccacagctcgccggctttcccctccctgccatcgagcaccacctgacggatcagaagaagcaagctgctgcagatgttctttttcactattcacaatttgttatggtttgcattggtgaggatgttcgccctactgatctcaggttacatcttatgaaggaagtttcaggaatgtccacttctctgaaggagcctcaacaggctgctgcctcaccggcttccagtggggaaccgtcttcctctggaacgatgaaaggtgacaagaatgaaatctcctaagcttcataaattattatccaactcaggacttcttctgttccttacgcactgagaagattgtaatgttcagaacttcggatgatgaggcttacttgcaatataggaatgtaaatatgttaggaacattgttcatagctgtctgctgttctgctgctttagcttctttcgtgacagcctgcttcatgtatgaaactttgaatccatttttattcagggggcagtaacgtaaatgctgctgtatttttttttaaatggcaggtgaatattgtattctgaataagtcatgtttactagaatcgttgctgtggctttgattggatcggctagga

SEQ ID NO: 33132 - DNA, 935 bp, Zea Mays
ccttgctcgcccctgctcacgctcggaactcccatggctggcgcttggcctcagctcgccgcgctctgccgaggcccctgctcccacgcgtgtccccggctccctactcgcccggctcggattttgctcctgcgcaagtgaatcgcccggcccggcttggacaccatgtcaagtcccctgcgtggtgcccgggattttgtagcgcgtccctgtttgtcgtctgtccacgcgtcatgcgtggatcaacgaaacaaaaatctgcgtgtcgtcgagtccgtcattttcctcatctagtgcttgcgtggccttacccgaaccgcgctgccgttgacgcaacacagggttaattcgctgctctgttcaactcgtcgagtcctaggaatatgtgcgcacgtcttagttgccgccaaatatcttcgtgccccacacactcatctttgctagctgatcatgcatctcagttctttgttccgagtccgccagttgtcattgctcatccgcgtcatgacatcattcgtcgtggttcagctcgctagttcgtcgttgtttcgtcatctcgatgccaatccctacatgacatctccgaattatgatcgcgcggtcaaaagaatccccaagaaagatgtccaaagatttgatggtggtgtgcgtgaagttcgtgtggcccctacaaatcgctcgacaaattgtttgaatcggaaaatcattaccgatctcgcggattcgagtcagctgttggaagggtacgataattaatcgcgtgatgctgaagatgagccaagtcgaccccaagcgcgggctactccgcatggtgatgctgatggacaaatctgaagatggataaactgaacaagtatctgaacaaaagttgatcgtcaagtggtcgtcgtctaacaaacactaacgtagtgtttattccaggcaagccccggtgc

SEQ ID NO: 33133 - DNA, 1786 bp, Zea Mays
gtttacaccgagggttctctctttgtctgttcactgttctactgggacgaccccaaatccccaaatcgaaaggggccgtccggctcagggtttctcgacggctccttgccctctccgccatggacgcacagcgagccctccttgacgagctcatgggcacagctcgcaacctaacggaggaggagaagaaggggcacaaagagctgaagtgggacgatccggacgtgtgcggcccttacatggttcggttctgtcctcacgaccttttcgtcaacaccaagagcaatatcgggccgtgctcgaggatccacgatccgaagctcaaggaaagctttgagaagtctcctaggcacgatacttatatgcaaaggtttgaggcagagcttgcacaacaatgtgagaaattggtaatggacttagatagaaagataaggcgtggtcgagaaaggctggctcacgattctgctgtgccaatgccaatccctggaaaattagctgagctgctttcagtgcgaaaagaacaggtgaagaagctgctggagcaaattgaggagcttggtgaggctggtaaagtggatgaagctgaggcacttatgagaagggttgacattttaaacgctgagaagacagctttagctaacgaagcagacaacaaagtagctatgcttgagaagaagatggaactttgtgaaacatgtggatcattcttagttgctgatgatgctcttgagagaacgcagtcccatgtgactgggaaacaacacattggttatggcatggttagggatttcctggcagaatacaaggcagcaaaagagaagacaaaagaggaagagcggcttgcaagggagcagaaagcagaggagcatcggaaacagaggggaaaagagtatgatagtgggggcagggatagagataccagaagggagaggtctggggagcgtgactttgaccgtgatcgtcagtatgagcgaagcagaggaagagatagggtttatgattacagggacagaggatcagaacaccgaagcaatcgctacagaaatgggagggattctgaaagaggtggacacagatacaggagtggtggtatgacaaatgaccgagggagaatgaggagcagatcacgttctccaaccaggcatggctatggaagatctagaagtccagatcattagctgcctagctggacatttagatagttttattcacagttgggactcatgagctctgttggaaccctacagtctccctattttgcatggggaaaaattcccagtaaggccggtactggatttcatatatggatgatgatgtttacagcttatagcaggtaaaccttgaacatcgatgtttcatgttacacactttttatctcccttaataactctgctagaaaccttagttctgctgtttggcttagatttttacactactcaggccaggtatctttttctaccaaaacttatgtgcataattatgattaatgtggctttagtagttgatccatgaaaattgtcaatcatcaaccatttcttttcctggaaccgttgtagtgtacaagagatcaagctttggtttgtagacaatggtgccctggctagaaccgcgaggattgggcctatttcctgactgtctagttattgtctcagaagtctggtttagataaggttctgtttccgcggcaaactattagatacctttgcagttgcggagttctgtaattgatgtattatttatgcagatagtgtagtctaactatgcaaactaatatatgatctgtttc

SEQ ID NO: 33134 - DNA, 2586 bp, Zea Mays
gcgcgcgagattgaccaaaaattcacccatctgtagctgctccccgaaccccgacccacaccgctgccgacgtagtcgcacggccgctccccgacccacacctcacacaatgtgcgcccccccattgccgcctcccctctagatccttaatgcaccgctaggtcccgtccacagccgctcactgccgccacctctaacgcgcctaggaccatcgccacctccacatctagcttctggagtcgagatccatggtcgactccactggaggagcccggatctggcctaccgggcacggtctcgagctttaggcatctcagcaggcagcggtgtactccgtcatcgcccaatggagcagccgaccaagcaagaactctatccatgctcgtgccgaggcgctgtctctactctctactccatccgttctgttcccgcgcctgcgcgtcgtcctctacggatccgtccactgccgcgccagcacgatgtgaaccgagacacgcctccgcctatgcgtccaagacacgcctctgcatttgcgtccgtgcactggctacgcggcatcgattacggagtggaggcatgggattattatctgttgcatccaaatttttatacactttattatgttcagatttggagccttgactcctgaacctgaatatcatctacctgagacgaattttaaggttgggagattcctggaatttttcacgcgttatggtcggcaatatttgatttttattgatgaagataaggaagcacgcatatgtatttttatccagaaacgcactgcttattacttatattaagtacccacgcagcacagtgctgtactaataatattgcaagctttgtttgtgtcaaatcatgtatgggacttgcggcagggggaatttgtttttaagaagcgaaaatcattgtctcttgaagcttcagtcttctcatctcccaatctactgttactacttacaccttcatctaaacgcacttgttgtttctggaacgctaagaaattcatgtaacaaatcatgtggaagttgatagattagttagcttataataccaataacctagtagtgcattggtgcagatactagctatggcatatctgcaatgagaaaaaaaagttggttttttaacacacgtcaaaacgtgtcatttttctattaagaagagcacgtgaagtggttcattggggcctccaattagtaattaacaccaatatttgtctcatgctaaatactgaactaaatgttaattttatgtctttgcagtttttaactgggctcaaacatgcctagtttcccatttaacaactatgaactctagggttaaatactacacaatactaggaaacatgtaattgtattggaatatatccaatttatacaggatgatttacaaaatgtaggctttatttacaacatgtaattgtatttgtgcaaatgattctctttccttgttatcgattttgagtgggcagtagtgacatcccaatctttaaacccaccacaattggtagatcatcctagcatgatagggcactaatccatgaacattcttctgtggttaaatttttggatggaacttttacattaatcaatttcagcatacattaaaatactgtgaacaaattaatagtgtttggaagacacgtacatgaggaccaatgggattattgacggatacttgtcttaggttttctagaaattggttagtaatgtaacttagtatttctagaaaacactaatatatatgttttggctatggtggtcattcaagaaaagtatagtgacaagcatatgttcctcctgctttacaaggatgtttgatgttagttcacttttgtcagaaagcacatccagctactatttttttcctcccattggatcagcatcttcagtctttttgtttaggcacattgtagtcttacaagcctccacactagagatacatgatagatactacacatatgtaatgaaccagattctacattactcttaacacaaattatattttgagcgtatgcatctgtatttctagaaaacattaatataactcaagacttctacaatactgttaactgcaatttatatcaatttgcaaaatgtggcaggaacatagtttgattgatattttgtttgattatggatagtctacctactcgcaattctctacatatgaggacttgaggatttagagcaagacctaaaggtgttctggacaaagaaagcttgtaccttaaaacaggaggatacaagaagctggagtggtagtctgaaagcttttgaactgcttgaagcattagtgtagctttggtgcttttgtgactgatcagctctggagcagctagagtgatgtagttgtgggcttttgaacaatagctagagtgatatgaaacattagtgatgtagttgtgggcttttgaactgcttcacgctggagtgatgttgttgtggtgcttttgtgactgatcatttctggagcttttgtgaatgatctagctagctaactgtaaatgatctagttgtgaatgatattataattgtgatacttttgtgatatataattgtggtgcttttgtgttta

SEQ ID NO: 33135 - DNA, 254 bp, Zea Mays
gtgaaatccactaagtagagattgttgtatctaaatcctttgaacaccattgattcatcatccatttttgatacaataacctctgttggagtgaataagcattgaagtccaagatcacagagttgacccactgataacaaattgaagctcaaaggtgcaaccaagagaacatttgaaattgataaatcattcgaaattgccaccttgccaagtccttgcactttcccttttgaattgtctccaaatgtgatttt

SEQ ID NO: 33136 - DNA, 1729 bp, Zea Mays
ttttcccttctcgaggacgaggacacacgcacacacggaagaagccactagctctccgcagtccgctctcgcctctcggccttctccttgtgccgccgaacaccctcacaagagtcggcctctcgatttctcagtccagcctcagcagtccccttccctccctccatcaggtgttgcctcccgcagatccaaatcggaattcggtccttcgtccccaaaccaccaatccgctatcaatcctcctctcgcgtgcttcttggataggttgcattctttgggtttgctcacagcgcacacaaagccattttactgctgggaatggtggctggcactattagcgtctccggctcttgagtgatctccaagggaagtgaagtgatgggggagtgcgaggacggcaaggagtacaggtgctgggaggagctgctgccggacgcgctgggcctcatcttccgcaacctgccgctgcaggaggtgctcaccgtcctgccgcgggtgtgcaagtcctgggggcgggtggtggccggcccctactgctggcaggagatcgacatcgaggagtggagccagcagcagggcaagccggagcagatcgcccgcatggtcgagctactcgtgggccgcagcgccggctcgtgccgccggatcagcgtctccggcctgccctgcgatccgcgcttctccttcatcggagacaacgcacgagctctccggaccttggagatccccaggagcgagatcagcgactccatggtggaatccgtggcgccgcggctgccgaacgtcactttcctcgacatcagcagctgcacgaagatgggggcccgcggcctggaggcgttcggcaagcactgcaagtccctggcggggctgcggcgggtgatgcacccgatcgacctggcggacagggcgtgccagcacgacgaggcgcacgccatcgcgtgcagcatgcccaggctgcggcacctggagatggggtacatgctggtggcgacggaggcggtggcggagatcctggggcggtgccgcgagctcaggttcctggacctgcgcggctgctgggcggtggacgacaagctcctgccgcgcgaccgccacccggggctgcgcgtcctgggaccccgcgtcgacgactgctacgagaacagctactgggaggagtgctccgacgactactcggacgactcctccatctactcgtgggagctcatggacgacgtcgacgacgactacgactacgccgccggcagcgacgacgacgacgacgaggccgtctgggacgacgacggccagggcctggagaacctggaggtcaggttctacggcggtggcttcggcgagaccttcgccggcttcgactggccgccgtcgccgtgacatgacacctgctgcctgcgcttgcgttgcttgcgtgggtgggtgagcctttgtgtgttgtccccaagctttggaagcttgctgtgctgctgtagtactgtgcctgcgacatcactcgatcttcctctacctcgcagatatgccatatgtgaagcgaactgctagtggtgcaatctaaaatgtagacgctggtgtttacatgaagcaatccccatcagcatgcaccggtgagattccaccggtgccaatccccatccatcctacctactactagtcatagagagcggggcagggtacccctgtctcctgatggcttctttaatgtcatgcgagcaaacatggcagtgcaagg

SEQ ID NO: 33137 - DNA, 2234 bp, Zea Mays
ttccatgcagcagtccccccttcgtgtcgcactcgcacagtcgcactccataaggcaaggaggaaaacagagagacgaccaccgctccgcgccggccggccattccatccggcaatggcctccgccgccggtgctgcgttcgccgccatcaccctcctcatcctcgtacccctcaccgccgcttcggactccgaccacaagtaccaagcagcggagcctgtgacgctctgggtgaacaaggttggtccgtacaacaatccgcaggagacatacaactactacagcctcccattttgccatgcgtcagaaaaccatgtgcataagtggggaggactcggcgaggtccttggtgggaatgagctcattgacagccagatcgacataaagtttggaaagaatgttgataaggccacaatttgttcgctagacctcgatcttgtcaaggctaagcaattgtcggatgcgattgagaactcatattggtttgaatttttcattggttttgttggagaggcagacagaaacaatgataacaaatatttcctattcacgcacaagaatattgtcatcagatacaatggcaatcagattatccatgttaatcttactcaagaaagcccaaagcttattgatgtgaataaggcattggatatgacatattctgtcaaatgggaaccaacaaacataacatttgctcaccgttttgatgtgtatctggactatcctttctttgaacaccagtgtcaatgatactgatgcggactctaagaaatgattatgcaaagtatgcccgtgatgatgatgatattgaaactctggaacgagatgtcaatgaagaatctggatggaagcttgtacatggtgatgttttccggcctccttgcaatctagttcttctttcagctcttgttggtattggtacacagttggcagcactgattctactagtgattttgttggcaatcattggaatgctgtacattgggcgaggagctattgtcacaacattcattgtttgctatgctcttacttcattcatctctggatatgtcagtggtgcattatactcacgtcatggaggaggagcagggaaaaactggatcaaggcaatggccatgacagcatcacttttcccatttatgtgctttggaattggcctggtgcttaacactattgctattttctatggatcgttagctgccataccatttggtacgatggtggttgttttcatcctgtgggccttcatctctttccctcttgcacttttgggaactgttgttggtagaaattggagtggtgctccaaacaatccctgtagggtgaagactattcctcgccctattcctgagaagaaatggtacctcacaccatctgtcattgcgcttatgggaggactgcttccttttggtagtatctttattgagatgtactttgtcttcacatcgttctggaactataaggtctactatgtttatgggttcatgttgctggtctttctgatactcatcattgtcaccatatgtgtaacaattgtcggtacatatttcttgctaaatgcggagaactaccactggcaatggacttcattcttctctgctgcttccactgcggtgtatgtttacctctactccatatattattaccacatgaagaccaagatgtctggattcttccagaccagcttctatttcggctacactctaatgttctgcctaggcttaggaacactatgcggtgccgtcgggtatcttggatcgacattgtttgtgaggaggatctacaggaacataaagtgtgactaagtgaagataatatcgccccattttgggtcagcgcagagaaaatgtatggcagagccttatttgattgagcgatcactgattctaaaaccaagaacgcaggtcattttgtgaaatatgatcgttgcttggcgccgagctgaaagccatgtttttctattcttgtcctcgtttctctctgatttcttctggacttggacaggcaacaaattttcatgttgaattagttatatatatagcggtggttgtagttgttgagtagttctgtagtatataccacaattgttatccttggccccaatgatacctcagattgatgggtataaactgtaacatttacattacctgatgtttgacgatgaacacagttccaaataatcatgttcggtactggaggatcgagatttttgagaggcaacatcaaagaaaaaa

SEQ ID NO: 33138 - DNA, 180 bp, Zea Mays
ttctgcaaatgtcaaatatcctagtacctatgcagtataagatagtggagatagcttgcgacattatctttccagaaggcaagtgccccctaacaggtatgctgctagttactaattatacaagcttatcctctatttaaccataagctggccatcaaacagtggaaacatgtgtcagca

SEQ ID NO: 33139 - DNA, 1934 bp, Zea Mays
cgccgcagtcctcgcatccgcgcccgcagccgagcagtcctgccgcgcccgcagtcccgcagcgtcgccgcgctcgcgcttccccgcgacagccgccatgcgccctatctccgccgtgcctacgcctcctcccccgcccgcccgagacccgccaagtttcccttccttacacggcgagatccaccatcggcgcccccttccctggcgagccacagccgtccacgttcctggccaccggcgacctcccttctctagcccttagcggcgagccaacacctcctccccatggctgccctccagaccccagtcccgtccgcgcatccgctccctcatcagcgacgcaccgattctccccgacgtcgcccatggcgtggacagcgacctccctcaccctgcactctggctacaaaaggaagaatctcttatcttccgggtcaccaaaacaaatgaagttagtggtatagaaaagttgcttagatctctggacttgaggagcaaaggaatcaactcgaggcagaactgaaaaagctactactacatcctgaatctgatgattcagctcaactttcctagattgagactgaaaagctgctagcccagttagttgagactgagatgaacagacgtttgaaggaggacacttacaaaggaaagaagtttaatgcattctgtcacttcttgggctaccaagctaggggagcactgcctgcaaagtttgattgcgattatgcctacgttttggggcatgtgtgctaccacatcatagctgccggattgaacggataacggatacatgactacagtgacaaatcttaagaatccagtgaacaagtggcgatgtggtgcgactcctatttcgtattactactttattcgcttgatgggacgcaaggcttcccatgtggcattggaatgtgctcttcaatcacatccaaacatggtcaaattttcaccattgatccaacctctgctacggcaatttccagcatcggcggtgtgctctttacaaagccttagagctgcctctcctgcaaagtctgaacttgcagagatagtcccacaagagaaatcaccaaaagattccattcaaccaatgtcaccgagtccaaggtattctacctcaagatgaagggcgactaccacagtcaggtgcatagaggaaggatgctgcggggagcaccatgaatccctacaaagctgctcgagtttcctctgactgttcaccattattggaagcaggtcaggcagagagccttggaaccgaactcttggagatggtgcctagcagggaagaggagattaagttgaaagaataaagggaggatgctttgtcgacttttgtagttaatgattatgtgagacttcagtttaagggctcaacttttactggttcttggaagtcatttagtagccctaagatttcatcagcattcttagtagtaattgctatagtatcaaatgggattgtggtatgagttgctcgagtactaagtactaacgttgttgtacattgtgaagctaagtgggtaatatcaaaagggattaagatttatgtgtggtgcttactgtatttgtttttattattttattgtgctttgtacatgtaccgtcattcttactctggtgttcttttaatgcaaagtttgacacaatatatttttatacgagagaccgaaggttacttagtattgttttctgtttcttttatcgtctttgcagatctatgtttggatgatgaaaacagtgctactcgatgtgaagtccaccaatactatagtttaaattaagtctaagatcggtgctttagagggaattggtaagagccagcaagcacttttttttgctggaattatggtagcagtcaggtttcagatttctatgagttcggtgaataaaatgagcttatgggtgttgtcaatcttttttaatttcct

SEQ ID NO: 33140 - DNA, 1261 bp, Zea Mays
tttttgccctcgcatcagcgttgcgtctccaatgaacgtgtgtgtcaccggggagaggcgagggcaggcggtggtggcgatgccgattgcgtccatcgacgtgcgcttggtggggattgcctcctccatttgcacaaactttcaaagcattttgacccaccttccttcaatcaagcgatcccttccctgccgatcacttcctggccagtaccatggcattgggtcgagctcagcttcctccatgccaacctacaacagcagcagcaggcgccgggtcttaagacctgaaaaggaggcggcgcggatctgcagtcagtagtatcttgtgcgacaccactgcttgtggccggcggggcaacgacaaacaccaagccgaagtggtccgctctcgaagaaagattgaagattatgcatcagcgacaagtaacgaccgcccggaaagagagccggaaaaaaggcaggaaatcgccaccgctcgcccctatttgagcagccgcttgttccttccgcgtcctcgctgctcctcaattcaattggctccgtgccgacctccaggttgagaaggaaagcatcgcgagttcgccatacggatgggttctaaagcgcctttctgtctcacgctcctcttgctgctcgccgcagcctgtggacctgctgcacatgccacaatgctggcatgcaacatcgaggttactttgtttgttggatgaattcagtacggtaagggcattctaactgaagatggcattggtctgcttggaggtacttccagtcattttgcaaactatgatccccccatatgacaatgtgaggacgaaccagaagggcgagttctgggtggcgatccactgtcggagaactctacgcgttgatcatcagggacagcccgatggccagatgcttcacatcatggaggacggcaagggagaggtggtgagagttatcatcgaagtggagggtccgtctgatgccattcatcgttgtctttgacctcgtgaaggcgtcttagccacttcaatttgattggaaatattgttgttttaagatacgggtccatggttaatgttgtacgcttctctgcttctctgagaagacctgtcattttaataatttggttctggagcaacctggagctgtatattgatctagcttcttttagtaacaaatgtaagttgctcacattttctttagatcgtctatagaactttgaacgaccagctcgtcccttctaatttttatttggccagcaaacaaagttttt

SEQ ID NO: 33141 - DNA, 2884 bp, Zea Mays
cgcacctcctgggggagtactggttaaacgggtccaaatctcggacccgcaaacggacctcacccacccgttcctccatctccgccccttgccggcgatggcaccggcgccggcagcggcctcggcggggcggaagtctcatgtcaccgttctcctcctctacgtagtgtgcggcttgatcctgctgcttctcctcgcctcctactcgccccgcctccagccccacgcccacggccgcagcctccaccgccgcctcaagctccacccaaagagctccttaccatccgacgcttcctccggtgggaacggggggcaacagaagacgcagcaccaaaaccaccatgcggcctccttcgacccgaccatcgccgagctggagcgtcggctggacgacaaggagtgggagcgcgagcactacagcctcctccacggcggcgagccggatgaccatatgaaggagtgggaggagttcctcaaggaggaggaggacttcatcaacgacgacgaccgattcaacatcgccgaccgtatccgcgcgctcttccccaagatcgacgtcgccccgcaggacggattcgtctccctcgacgagctcaccgcctggaacctccagcaggccagggctgaccagcaccaccgctccgccagggagatggagctctacaacaagaacggcgatgagatagtctcattcgaagccttcaatgctctgcgccaagaatcccatggagagggcaatatgcttgggttcgaatggtggaaggaggatcatttcaatgcgtcagatgcaaacgctgatggtttccttgataaaactgagttcaatgatttccttaatccaagtgattcggataatcccaaaatcatcaatttgctctgcaaacaagaaataaggcagagggataaagatggtgatggaaagttaaactttgaagaatactttactgggctacatgaccatatacatggttatgatgacgagaatgcagatatttcccaaattgggaacataacagttgcgaaggatcggtttttcaaacttgacaaagataatgatgggtttatttcggagcatgaactagagcctgttcttgataagctctatctttctgaacgctattattctagacagcaagccatccatgctatttcagagatcgctctcgatccatccgattcacaatctatggtcacaattttaaaacaagaagaggtatgttgaatctaatcttggccgtctatcgtggatcccatgtccaagataccttctaccctgcagtctcatcgacgacgactcatagcaccatggccccgcgacggcgggcattgccggtagggttatcctggctatccagtggccgttctttgtgctaacgaatgctacctaatgcggacaaactaatgaataataccaacgcaacgtaccagcgtttgaggtgatgatcgatttggtctatggcacggtggcactcttcaacattggcgagaaattcacagcgcgccggtcacccttcaagctcgaggacgctcagccagaccccaggaactatggagatcgccattgtctcctcccgaacaccatgttgtccacaacagcgtgattccctcacagcggctttctctctgtttttctcatggccatgatggatcacggcggacctctctcctctctgctcactaatggcgaaggctcgggaactcgggatgctatgggaggaggggagatacggccccaggttttatagccaggttacgtgagcctgacgaatctcgtaacagatttctgttacgcgacgcacgccatgcgacaggctggagctcggagatgtatccgcctagcgggggccaccggccagggactgaccccctaagcgccagcgtggttggtgggaatggcccgttgaccccgcagtcgacggtcgacacacttattcctgcgcggatgcgggcatgggccacgatttggtgatgggccggtgcagtagtgggttggcgtggtgagatgggccgcgaggtgggatttgggcccatcgcaggcagacaaagatcatgatgggaggctgactttggaagagatggttgagaacccctatgcattttatggcagtgtttatctcagcagcagcgacaacgacgacgaagactacttccacgacgaatttcgctgagaccaatattgttactatcctgacacacgcaaggaacacagctgacgagcatcaaggtgcgcacagaggttcggaacgtctagcatactatgtgtgatgcccgggctgggctgctgacagaatgggagagcttagagttacggccatggagtgaggaactagtttttagccgcttggttcttcaagttgtttgtgttaaatggaacgacgacagcatcctagtaccggccaggcccagcagtgatggatgttacgcggcaagttgagccacctttatctaggctgagctgcattggtctccatcctgatgttcctgcagcaggggaaatgtagttcaggagaacaatgagtggaggagcgtcatctctgtggcgagcggcttcagaaatctaacgggaacgtgttgtttggtgtccgaaatgtatgtgtgtgtgtgtatgctatgaattcaattatttctggcagaatgtcgcagtctagcgagctggcccatcccattgagaaacattccatcggctgcatgagtgcgccatggacgggagatggatgtgccgaattattggagggaaagggttcactttattcgtgcctagtcatcagtgtcatcagtacggaggttacagcgtatccacgtggtctgccacgtcatgtgaatcccagccgtggcgcaggtacattctcgctgggtcttgaactggtaataaaagatatttggc

SEQ ID NO: 33142 - DNA, 1903 bp, Zea Mays
agagaatcaaagttatatcaaacggtattttaacggtctcccctacctctctagacaaccgaaacagccctccctaccgaaacagcttctcatgttgtacatgccctaaaactgattgcacatcggtcgttgaataaaagggcaatcatctcagcgcagagctcgagcccgcagcctgccatcacctaccaaatccggcgggcgtccagcggatctccatctggtcggcgtggatcggatcttcggtggtgtttctcgtcttcacggcgattagtggcggcgagccgaccacgtccccgcagcagcagtcagcggcggcttgacgcggtcggacgggtacctctagttggcatcagcgagtgggcgcggggcgccgcaagtctcaccgtccgctggtgtagaggccccgagtctcggcgctatggagtgtaggccgcgtgtctccgcttagggagggccaggggtcaacaaagggacttgtcaagtgacaacatcgcggccttcgggtgttggaggtgtccggcctgttggtgccgtaccacaggattggttcattatttatcgctggccatctccttggcagccgcttccgctgtcgccagccatcaccaacctgcgcctcatagtggagcccaggaaaggcggtgggactgagcgagggaagaggagatgactagcttgtcgatcacggtgatgacgctgaacctgcatgaaggcgaacagccgagcgagagccccaacagctgggagaagcgccgggacatctgcgtcagcgtcatcaccagctactctcccaccatcctttgcacccagcaaggcttaagatggcaactggactacctacaacagtgcttgccgggttagacctatccagatctactcggaaccagccaagctaatggaagaacccatagaaaaaggataataaaatattatagagcgcgttatagtaggatgtgatgtccaaaccatggtttttgaggccctgtggtgaggcgcggcacccgaccctccctgacaatgcctaggtgtttatgttggatgcctaggcgacaccatactcacattttaggcgtcataaaggtgttatgtagactagagttttagatactagtgcagcacatatatgccttgtttgttctcaattcttgagcctaacacatactagtgcagctaagacagagtacacacactattccagctaagagcagagtacactcaccagtccgtgagcaaaggcagagcaaagagtacaaaagcggcaggtggttgggagatttgggagaccagagcagatgaggtggcaggcagctaggagattcaggagaccagaacagatgaggtggcagagggctgggggatttgggggactagaacagaggaggtggtagggggcgtacacacttactaggcagacaagcagcaggtgtggaccggcgacggtgatggcgagagtctcgaagcgggcaggcaggtgtggtgcgacgggccgacgacctcgggcatttaggctggtgagcagcaggttgtgacagcgacccagaggagcagcttggcagagatttagggtgtgtctggttcgacgtacaagaatggatggaaggggacaaccacattttctatagtgtttggatgagagtcacacgggggcgaggtgaacaccggagcaatttttgatggcgtcgtgatcccaaaaaatcgagaggacggtgtcacctccgcctcatcctactttgacctcaaaccaaacacatccttagagccgcaatcgctgctcagagctcctggtccacccgctgccttcacctttctccgtgaagttgcgcgcacctgcactagatgtctccgaccggtctttttcctgcttgaatagcatatatgtggcaatgctcacacttttctg

SEQ ID NO: 33143 - DNA, 1400 bp, Zea Mays
cgccgttttccccatctcgcgcagcgctactgccggctgtcccgagtcccgaccaccgtcctccgctcccggacgtgaatccttcctcctaccgcgatggagaccttcccgtcggtgaagaacatcctcctactggactccgaggggaagcgcgtcgccgtgaagtactacagcgatggctggcctactctctccgcgaagctggccttcgagaagtcggtcttcgccaaaacccagaaagcgaatgctggaacggatgagattgtaatgtttgatggtcaaattgtggtatacaagttcatccaagacctgcacttttttgttactggaggagaagaggagaatgagcttattttagcatcagttcttcagggattctctgatgctgtcgaacgacttctcaagaacatggttgacaaaaggacagcactcgagaatttggacctgatcctattgtgtcttgatgaaattgttgatggagggtaaagccttttcttactacgtacatgatattaagggcttcttttcttgttctctttattgtgtacatttattatcctttgatctgaaatcacctgactcatctgggccatggcaatagagctctattagggcctctatttgtaatggttgtattcaccggattcaaaggtttagtctggtgttctgcttctgtacctcaagcccaagcatgcctaaccttttaatggggttacacaatttgatgtgtgaaacaatggcttagtttgctaaagacatcagcaaaataaacagcccattcctttttttttgaaatggaacaaaactgattatccacatgaagaattgtatctatttgattttgagtttgagatcttgaacgactgcaggtaccacaactatgcactcgcctcaatgtgtctttgataacccattgatgtctaaactctgaaatgtggaagtgataggatcaagcatagagatgaatagaatcgcacattgtaagcagcatgtaattgtttggtgcattaaacataattttctgaatgattacacaggattgtacttgaaacagaaggaagagagatagctgaaaaggtgtctggtcacggatcggagggtgcttcatcggctgagcagactttagtcaatgccctaacgcaagcaagagagcatctggcgaagtctcttctcatgtgatgttgtgctttatattttgggggtgacgacggagtatctattattgtgtctggatgacactattctttttgttagcaacggagaaagaaaaatgtctgaagcatttgaatgtgtagagtggcacattgcttccaaaattctcatggtcatctataagccttcaaagttctgtagcatgattgttcttatattgactggttcagttatttgtcaaaaacaaa

SEQ ID NO: 33144 - DNA, 3057 bp, Zea Mays
gtgaatgagctttgtaggagggggaatgagaaagacacgtgatagccgggaatggaaatgtgaatgagctttgcagggagggggaatgagaaagacatttgatagtcgggaatggaaatgtgaatgagctttgcagggagggggaatgagaaagacagacaactgagtctaccccttaccgtcttaataggtagtacagattatttttgataatatagagtgtcatgaaaatcaactagtttctataaattagagtcgcatatttctattcaacttttttttaccacaatcgggtgaggggcgtccattgcgagttgcgactgcgtcgccgattcccctgccggcatgtccagtccgcgccctcccctcggccggatcctccgcctcgccgtcgccgtcgcggcctgcgcctgctttcctagccccgtctccggcatccggaagggcattgactttattcaaccaattgtgtgcagaagcactgttcaggggcggcatctgatctctgatgataatggttatgtatgttctgcactttcaatcaatccatggtctcactgctgcccaacaacaggggaccgcttttcctgccagggctgcgaacttgatttacagtgctgcaattcatatgaatattgtgtttcttgctgtttgaatccttctaagatcaagaaagaagacgtgctgaagctgaaggtagctaagccagttactgctggaacatacacaaatgttttcgatttctgcatgggacgatgccgccatagctctgcaagtgtggttcatgaaaatgcctatgccagtgatttccatcactgtttttcagtgcaacaaaattcatcaggatcaactgagtctagttctgtatcaaagttgttgggcattaacgttgtagtaggaagttaggcccagggaatcttgcagcttggtgtgcaaagtaagaggacagtcctgtgttccaagcaggctctctgtgttgaacaaatgtgagattttgcagaaatatatgagatgcaagagtggctgctttcccagccttggaccagatcaacctgctgaagttgttgacgaagctccaaccagcttgaatccaggagcatgcttatacatgcagatggatgagcggctcacatgtgatggttcgcaccatcatacccggcggctctgtccatgcgcctgagaaggggaaatgaatgtgacactcataagacagcagagggcttgctcactcgacaggaaacaagtggaggcgataagctgataaccgatggttctccatcacacccccatgacgaacaacctctccacgcaccggttgcgggtttcctcaacaagaacgccctactctcctcctgtttctgggaaggattatggatgcaaaatgaaatggagtgcctgcaaagatctgctccggttcttgagaagcgtcgtggatgcagaaggagatgcaatacctttcaaatccttgcatggtatctggtaggattttgcatgctgaatgaaaatgcacgcaggcgattccacgagcctttcatgcatgttttgagacacctgaaccaattatatatattcgtaatatattgcacaagcttccatgcatgttttaagacaaaagtaacccaaacagaactacggatacatgatcttttaaatcaattacaccatgccagcatctctgcaccacaaactcccatgcccctttttttttggtttccttcgccagcctgaatcaaaaagaataatcaggcttgaaatctctcatggacctgggtctctccctccctttgttatcatctttggtgtttgcactctcttctgcagcagcagctccgtctccctggtcctcctcctggaaggccgggtgggtgaggatgttcgccaggagctgcgtgcccctgagggcgttggtgagcggcaggtgtccctcgggcgtgtcgtccgtcaactcccacaagaactcgtcggggaaggccctgtagttgtactgctccacctccgtgtccagcttcctcatccagccgacccggatgaagaagcgggtgaagtcgcgccgcgacttctcccagagccgccgctgcacgctgtacccgaacctgccgccgctgtgctccttccagagcccgtcgatggcggcgaggtcctcggccgggatgaactggacctcggagaagaagacgtaccctcggcgcctcgcgggctcgccggcgaggtcgatgatcagcgcccgcgtggtctcgtccgcctgccggtagtcgcccgcggcgagctggcggcggaggaggtcgagagaggggccttcttcttcttcttcgtcccctgccgctggtgcagatgccggggcaactggagtcggagctgacgaattggtggctgaggctgctgtcaccgagggggaggttttggtgtagagcctgaaggaaatgctgccgctggtgttggtggagagcttgtgcacggcggacgcggagccgtcacggctgccgccggcgccggcgaaagaatggtcgtgcgggagaaggaaggattgcagagaagcgtttgccatgggtggcaggaggacgcagctgagctgagagcctgagactgagaatggaggggagggagacgatgataaaggagcgagtggatggggtttagtgctgcgagagctgagctgggtggtggtcgtcgtgtggtgtggagaattgaggccgtcgtgttgcctttgtgtgtgtgtgtgttcttgtgacagtccacctttgtgggtgtcgtgtgccaagtcctggcctcgatggctgtgggagattttgggcggtggttttttagggggcccattctgggcgagaatacgaaggtggggctgtgattggtgggttctgggtgagatgaggatactggctatggcaaacaatccaaacaccaacggagatagggtctgtttcgtttagcttcttttcttgacgatttctgaaaatctgaccgttagaaaaaacctgagtatcataaggattatgtgcaaggtaagataaagtgatttatagggtttaggatctaaaaagtgatgtgttttccctatca

SEQ ID NO: 33145 - DNA, 1774 bp, Zea Mays
ctcgacgcttgtcgcgaaacagaaaacaggcaaaccacacacccaggacggtggacggacacccgcgccgccgccgccatggccgacgccgccgcagcagcagcacggcgcctccgcgccttcaagcggtggatgcgcgcgcacggcgtcgtctgcagcgacgcgctcagcctcgacgtctccgatcccctcggcgtccacgtgcgcgcggccacgccgctacgcgacggagaccttgtcgccaccatcccgcgcggagcgtgcctcaccccgcgcaccaccggtgccgcggcagccatcgaggcagccgagctcggcggatgcctcgcgctcacggtcgccgtcatgtacgagcgcgcacaaggcgccgactcgccgtgggacgcctacctccaactgcttcccgactgcgagtccgtgccgctcgtgtggcccgctggcgaggcagagtgcctactcgccggcactgagctagacaagacagattgtgaagcaagacaaggaattcctttgtgaggattggaaagaatgcatcgagcccctcatgttatctggagagctggatgttgacccagatgattttagcttggagaaatatttatctgcaaaaactcttgtttcttcaaggtccttccagatagatagctatcatggatctggaatggttccattggctgacctatgcctcagactcagatggtgaagaagaagaagatgatcgaagtgatgcttctgctgatgacaaaccgactacaaaaaatcccacaagtagtcctccaggttcgagagctaacgacgaagatttggaaataatcattgttagagatgtcaatgaaggggaggaggtgtataatacatatggaacgatggggaatgctgctttgcttcacagatatggtttcacagaacttgacaatcaatacgacattgtcaacattgatttagcattggttactaagtggtgcacatccatattctccggtcgacatacaagagcaagggtatcactatggcgtaatctgggttattctgggtgcactagccaagataccgagtactttgagattgcatatgatggagagccccagcttgaactctcaatcctcctttacatcatcaacatgaaacctgatgtttatgacaagctgatctgcgtggcccatggtttcgttagtgacgaagagcatgagactatctgtaacgtgttcaagtttgtcaaagcaacaagctccaaccaaaattctgaagtcaatggcctcgagaaactgcctgatgtgaagaagttattgcatagtgagagcgtttgttcggcgcttctatcactcgctgacatgagggaaagcctctatggttcgaacactttggaagatgacgaggaagagcttcacgcatgctgcgttgtcaacgaaaggaagctctaccattctctggttttgcgggtgagtgagagaaggatacttcgtagattgagggagtttgcctctagtgggtcaaagggccggaagaggaagcacccctagtgtttaagcaatattctgcgggtcaggcttggtattcctgaacaccatgctcaataaaggtatggtgacgttctgcaattctgctgctcttgtaatggaatactaacatttttaggaacaataactacatacaggcatgctttgttttctttaagtagattagatacttgagatttacgacgtgggggacattatgtgttggtttgcgtggtaacaaacatttggacaagaaaaatccacaagaggttctctct

SEQ ID NO: 33146 - DNA, 937 bp, Zea Mays
cactctcaaacaaacttccttttattttctgtcaaataaaaacaaagcttatataattcaggcacaccaacccgactccgtttgacgcggctccgatggtcacaaccggcgccctcgtcgccggcgccgcagtcaacacctgagacctcgtcctgcctgcctgggaggtgagatggtatattctagcatggagagcatgatgaacccgcctccggtgaacaccgatgctctacatggtatccaagatgggtatagtcttgcaatttcagattaccttggtgctgatatgtcatgctaccaatcaatacaagcagaacttcaagatgggatggacctaaacggttcagagggcattactgtgatggatgatccaatatacagttctcttagtgacataggttttatggaggtttgggaccagcaacctcaagactatgaaaagttcttctgaggcaccaactcgtgttgctgaaactgttctggagttcgactgataaataccagttatacttgcataggcagaaataaagcagtagatcgtgcctaacaaatagaatcccgtgtactcgtgcgacagcagcacctcatgcacttgtatgttccaggccatacatatgtgttcagacatatgtattcagactccctgccttgcccgacagtggtgtaaaaagtagtcgtatagctgtcatgtaattcaagggaattgacctaagcacgatagagcattcatccgaaacaattcttcatttgtaataaacagctctatattccaaattaaaagtgtttatttaaaaaaaaatgaaaacgcggcacgaccgaggaggtgtgggcgagcagccggctgaggagacgcaggcacgagcgtgacctagaaacgtggccacaaagagaggcgccggaggagaaaatggtaggaagacgcgtacaggaacgaaga

SEQ ID NO: 33147 - DNA, 724 bp, Zea Mays
cctgactgctttcatcctgatcaccacttgttgcagttgagaaaaggacagaatctcggtaacatttgttaacaaggatggctcagaaaagacaatacgtgttccagttggaatgtccatgttagaagctgctcatgaaaatgacatagagcttgaaggagcatgtgagggttcacttgcgtgttctacttgtcatgtaatagtaatggatgtaaactactataacaaattagaagatccagcagatgaagaaaatgatatgcttgaccttgcatttgggctcacagagacatctcgcctcggctgccaagtgatcgcgaagcctgaactcgatggtattcggctggcattacctgtagccacaagaaacttcgcggtagatggctatgtaccgaaaccacactgaagacagttatgtacaccacactgaagacagttatgtacaccacactgaggcagtcatcttggggggcacggattcgtacaagtcaattttgtagtttataacctgtataacctaactacacctttgctacttgtagtcggggtagcttaggactaccttgttgagggagggttcgttcattgatgaacccctccattactcccagataacagtgcttccttcatctgggcgaataaacatctttcgttttgtgcgagagtatgtagtgtactcagaaatatttgcattgtagtgctcccaatatttgatcttttgcta

SEQ ID NO: 33148 - DNA, 2764 bp, Zea Mays
cttcccctgaccgccgccgtcaccgccgagcacacctctagtcagcttccactggagcacgccaccccgaattttctcccggagtcgttgccctcctctcctacccccgtacactaaagctggttcgcagatccatccggacttgatcggttccttcttttatttcttgcccatagagcccaaacattattggatggactctgtcacttgctgcgacggcggcaaggaattggaataggacgaggtggggatcacgggctgcgacggcggcaagaaattggaaaaggacggcgtggggatcagggtattcgtcttgggaaaggggatggggggtctctgctcgaaggtctcagctgtagacaagtcaccgagcgacaccgcgcttggccggaaccaggtcgccgatcatgagccaggggcgtcgttggagttggagaagccaccggtgtcccgagagtcagctgcgccggcaaagcggctggacgagcagctgcagtctttctcgttccttgagagcgtcgtccctggggttgcttttcatgccggggctaacacgggcggcgaagcggggtccaggacctcgccgcagctgaccaggtcgctgtcccagagggctggtgtgggcaaggcaaaagccggcgctgccaaggtttcagaagtgagctcaattttaggtagagctagcactgctgggcttgaaaaggcagtggaggttctagatacacttggcagtagcatgacaagtttaaattccagcagtggttttgtgtcaagttctgcagcaaagggaaacaaaatatccatgctggcttttgaggtggcaaatactatagttaaaggctctaatctgatgcgttctctatcggaacctagcataaagcatctgaaggaggtggtgcttcattcagaaggtgttgaaaaccttatatccaaagattttgatgaactgctcaagatggcatctgctgacaaaagggaagagttagaagtattcacaagagaggttgttcgctttggaaaccgttgcaaggatcctcaatggcataacttggaccgctactttgaaaaactggcatctgaacgaaccccacaaagttatctgaaagaaaaggcagaatcagtgatgcagaaactggtcacctgcgttcaaaatacagttgaattatatcatgaattgcatgctttggatagatttgagcatgattgtcgtcttaaacagaaagaacaggatggcttgagttcaagaggagacaacctggatatactgaagcaggaattgaaggtccagagtaagcatgttaagagtctgaaaaagaaatcactttggtccaagaatttggaagaggtgatggtaaagcttgtagatattgtccacttcttatatttggagatatataatgccttcggtcgtcctgtgaagagccacaagaacctgccaaacaccataatagattgggaccagcaggccttgcattgcattatgctaatatcatcaatcagattgacaatcttgtttctcgatcatgtgcaatgcctccaaatgcaagggatacattatatcatagcttaccacctaccatcaaatctgctttccgttctaagctacaatcttttgaagtcaaggaagagcttacagcttctaggatcaaagcagaaatggaaaagactttgcgttggcttgtcccttttgctagtaacacaaatagggcacaccatggcttcggttgggttggagagtgggcaaatacaggatctgaattaaactgcaagatatcagggcagatggacatgtcccgaatggagaccttgtatcatgctgacaaggagaagaccgaagcacttatcctggagctagtcgtgtggcttcatcatcttatcagcaaatcaggaaacgccagtggaggtgtaaggtctcccatcaaatctccagtcagctcaccaacacaaaagggtgctgcaatcacactgttgtcgggcaaaacaaacaatttgccaccgattctcacccaagaggaccaggatatgctaaggggtgttaagtacaggaaatttgttccaggaataagcaaaagccaagagtttgacacaaagtcaagtcacagcaaacatagtaggttgagcaagagcaacagccactctccggccagtggcagcagaaaagacttgctcccagttaggaggtcttccatgcttccagttattgacttcgagattgacaggaccaaggctttggatctaattgacaggcttgacaacctaaaagtacaatgagcatgaagcttattgtggtcatccgcagttcttgaaaccccagccgcgatataaacagttatcgtgtatcagcagcaagaccgcccgttaggctctgcggttacaagataacaaacagtatgataagttggtgtctcagatcctgtaccgaatagaataggaaaaaatgttgtaaaaattacctgtcgtttctacctgtacaagaaatggaaagtgcagtttttaagaaaaaaaggagggtgaaagggatctaggtgttctatgttttcatggccattagactggaatggtgtgtatgaaccatagtactcccgtcccaaaatattagtcgttttagctcttgatttttatatatctatattcaaatggatgatgaatctagataaatatataaaacaaatacattgattattgtatgaatcaactaaaaagataaataaattttattttgagatgaagggagtatctttttttgcagaaaaaaataaaagca

SEQ ID NO: 33149 - DNA, 1663 bp, Zea Mays
cttccttggacccggctggtctccctccggatctgccatcggcaaggtgggccttgaatccctaaatctgggaatttgtccaaaattaagtattctgtgcattgaggccccaaatatgtctataatggagctgaagggttgtggtgtgctttccgaggcttccatcaattgccctcgcttgacatctttagatgcctctttctgcaggcagcttgtggatgattcactgacttgtatgaccggggcatgtcctctgattgaacatcttatcctgtcatcatgcctatccattggcatcgatggattgtcttcattgcattgccttcataagttgaccttgcttgacctgtcttatacatttttgatcaacttgaagcctatttttgacagttgtccacagtgaaggtgttaaaactttcagcttgcaagtacctcagtgactcatcattggatgccctttacagagagggtgctcttccattgcttgttgagctagatctgtcctactcacccatcgaacagaatgcaatagaaggtcttcttgcttgttgtagtaatttggttaatgtgaacttcaacggatgtacaaattttcaagaattggtgtgcgaatctggggatagcggttctgtggatatgccagttgactcttgtccacctagttcaccaatcaagaatgaagagatcagtgagcaacctggccgtctgcttgaagttctcaattgtactgggtgccctaatattaagaaagttgttattcctttgatagcaaacttttcacatttgtccaaaattaatcttaatctttcaaccaacttgaaggaagtggatttgacatgctccaatcttttaacgttaaacttgagcaattgtagctcactggaggtgctgaagcttgattgcccaagattgaccaacctccaacttttggcatgcaccatgttgcaagaggaggaattagaatctgcaatatccctttgttgtgcgttggaggtccttaatgtgcattcttgtccaaagatcaatgctctggattttggccgactccgtttggtttatcccagtctgaagcgcatccagagcagcctcatttcataatgcggaggctactaccatattaaggagtgcaattcatgcaataagcctctgttcaggtttgatgaaagaagcaagtcgggaaaagctctccttgatgctctttgtacatattacccaagcattgccggtatattgcaagccaggggcaacgtggtcctatttatccagtccattcatggttctgtaataagtactttttttttgcaaatttgttttgttgccggagatagcaaaatatctgttcatgtctgtttgtctttgttccttggagtgtaccaatggagctatcagatgtatatgctggtttatatgcatcaataatcttgttttgatctaggatcttggaatcgctttgctaatgcgatctggggtgtagttttgtacaactttaattgttcgcagattttagcgagtgttatgaagcttaactgatctggggtgtagttttgtacgactatgtttaatttttcgcagattttagcgcagtgttatgaagcttaaccaaggctatgcaaggcagatgatgcacgcacaatcttagctagagttctgagttgtttcaccg

SEQ ID NO: 33150 - DNA, 1758 bp, Zea Mays
cacgggatcgcgtctgccggccaaccactgcgggccgcagagcatggccgggcgcgaccgccgcggggccttcctggcctcgtcgtcgtcgtcggggtcagggtcggggaggcgggcgccggagcacgagtggtggccgcgcagcccagcgtggtcgcgcccgctgtccgacagcggcggagcccgcggacgcaagagcggctcctccacgtcctcctcctccttcaggtccctgttccgctccatcggagtgtggttcagctcgctctctaccgcgtcgccgtcgcccgcgtcctcgtccatgaagcagaagagcagggacgccggggccaagaagccgcctttgccggggtacgccgggacgaagacgtccgcgcgcgggctgtacagcggcggcggcggcggcaggcagcaccggccttcgttccagaactccgtcttctccattgaggagatccttagcgccaccaacaacttctcgccggcgctcaagatcgggcagggtggcttcggcgcggtctacaagggcgtcctccccgatggcaccgtcgtcgccgtcaagcgagccaagctgcggatgcagaaccctcacgtggacgtggagttccggagcgaaatcaagatcatggcgcgcatcgagcaccagagccttgttcgcttctacggctacatggagtgcggcgaggagcgcatcgtcgtcgtcgagtacgtccctaacggcaccctccgggagcacctcgacaggtgcaacgggcggttcctggacttcggcacgcggctcgacatcgccatcgacgtcgcgcacgccgtcacgtacctgcacatgtactccgaccaccccatcatccaccgcgacatcaagtcctccaacatcctcctcaccgactcgatgcgggccaaggtggccgacttcggcttcgcgcgcctcggcgccggcctgggcgccggcggggaggccacgcacgtcaccacccaggtgaagggcacggcggggtacctggacccggagtacctcaagacgtgccagctcacggaccgcagcgacgtctactcctttggcgtgctcctcgtggagctcgcctcggcgcgccgcccaatcgagaccaagcgcgagatgaaggagcgcctcaccgcgcgctgggccatgggcaggttcatcggtggcgcctcggccgacgtgctggacccgcacctcgcccgcacgcccgccgccgaccgcgcgctggaggcggtgctggagctcgcgttccggtgcatgggacccgtcaggcaggacaggcccgccatgagcgactgctgcagggcgctctgggccatcaggaagacgtaccgggacatgctcgccgccgatgccacgccgcagttctccgatcggcgggccaccaccagcagcagcagcgccgacagcagcggcgacctctggaggatctgatcgttccaaggtcatgaatcctgctagctaagctgctagctgattttgtttgactgaaacacttaagtttgctgtaaatatatatacactgtaatttatttttttggccacattttacattttttggttattatatgtccatctgatgctaaacgttggattccatatgattgctgctgctgttagtagtcttgtttagaaaagtttttttggattctgttttagctagcagctcggtcatccaatacacccatctgaaagggtccaccttcaccaatgtgttctagtttttcttgtaggattctattatatctttgtgattagtc

SEQ ID NO: 33151 - DNA, 268 bp, Zea Mays
ctctggaaacgtctgcttccaggtcaatgctactataaaggaactaggcaatcaaaatgttgacatttcaacatcaaccgcagggtcacaccagtcttcgcttatgttctcacaaggtgcaagcagcaacatggaagacactcctcacaagacagacaccttgtcttcacctctgacacctttgacgcctcagggtagcgtcgccactacaaagtatttggaaaccgttgacgctggagacactgggtgtgtgactactcagtcctca

SEQ ID NO: 33152 - DNA, 2988 bp, Zea Mays
cggactaaaccctaccgcccttcgtctctggtccatgatggggccctcgaccatggcggcgcgggcagcgggctgctgctcctcggcggcgctcgccttcttccgtctccaccccctccgatgcgccgtccgcccggccgccgctctcgttggagggtgctcctctggcctccgcggcggctgccggagccgcctggcgcatagcatcgtggacttggttatggaggagctccgctcccgccggcgcgtccgggtctcggcgaagataggattgcagggcacgaaggaattgcctgacaataagatagtcaagagaacattacagaaaggattgctgcttgaatttcagaaagatcctgagagatctttgcttgctgtagttgaaaggcctgatggaaagaaaaactggatggtgactgatcagaatggtgtcatgtcttcgataaagccccagcaggttacatatgttgtacctggtatcatgaattttgactattcaaaaatagacgaatttcttgagaaaacgcaaaatcttttggacccaactattttagaatgtgcttggatggagctgtctgagaaggataaatcaataacagttgaggaatttgcagagatagtgtatggtaccaaggagtctttggaaagctactgtgcacatctcttgttgtcaagggatgtagtgtattttgtcaaggtagagagcagagattattccatgtaccaacctcgttcacctgctcaggtagaggaactcctacgacggaagcttgctaaagaggccgctgataaggaactggaagaatttgtccatttactcaagtctgccaaagcattgcctatggagtccaagcctcctaaagcgtcatggttggtggaagaaaaagtcaggcaaaaaatcgagtctcttcaagcatatgcagttgatgcatgtgatgatgaacaaagaagactagcaggaaatattctcaaagctatgggattcacgaggacatcatcagctgctctaaagcttcttataaatgttggatacttccctgtgcatgtcaatctcgaccttttcaggtacgatgtccgtataaggtacacagatgaagttttgtcagctgcagaggagcttctggtggacagccctgacacagacatgcatatcaggaaggatctttcaactttgaaagtgtacgccattgatgtagatgaggctgatgaacttgatgacgcattgagcgcaaccaggcttcctgatggtagaataaaggtctggatacatgttgctgacccaacatgcttggtcaaacctcatagcatcattgataggtcatttctgctcttctgttctttactttctatcactgcacttggtatttgttacaaaaccgtgtctcttgttggcagggaggcaatgcacagaggaacatcaatctttctaccaaccactacttttccgatgttcccagagaggcttgccatgaattctatgagcttgcagcaggtattgcagaatatactttagaaaattcagtcatcaaacctacttatatgttgacatatgagagtgcaactgaattgctttacatgaacctggaagaagaggaagaactaaggattcttcaagaagctgctaggattcgtgaacagtggcgtcgtagccagggttcaatagacactgcgatgatagagccacgtataaaggtgtcaaatcctgatgatcctgaaccaaatatcaatctatatgttgaagatcaagccaatccagcaatgcagcttgtatctgaaatgatgatactttgcggtgaggcagtggctgctttcggttttgacaacaacctccctttgccatatagaggtcacccccagtccaacacagcagtgtcagtgttctctcatctacctgaggggcctgcaaggagctttgccaatatcagcgtgctccgtgctgcagaaatggattttcaaaaacctgtaccacatggtgtacttggtattcctggttacgtgcagttcacctctcctatccgaagatatgttgacctgctagctcattatcaggttaaagcttttcttagaggtgactctccaccatattcagctggcgatctagaaggaatgacatttattgcgagcatgcatgttaaagtagctaggaggcttcatagcaatagcttacggtactggctgttggaatacttgaggcgacaaccaaaggggagaaagtacagagcactgattctgaagtttgtcaaggatcgtatgggagctctgcttttggtggaggttgggatgcaagttacaacgacaatttcacgtgggaaagtgggagatcaagtcagtgttactgtggaaacagctcatccacgtgatgatatattatcagtcagagaggttgtagaggacaccaaggattctgagtaaatgcatgtgacgatagcttatcagacaaagaggttatagaggacaccgaggattctgagtaaatgcttgcaaagctcactcgcactttgcagtcttgtgttcctctgccgtttactgctgttcatttttgtggcagtgatataggcgatttattaccttggaaaatatctgctgattcttcaagttagcgacttgcgtagcatggctacaatacaaatggtaaaaggactagggtattggtcttggtgccaaagctcattccaattcgaggacgaaatgatgaaatcataggtggttttcattggtatacagaatacagtccgacagttcgtttcttccgaggtaggttctctttgtgccgaacaaggttccaagtgctgataactgggaattttgtatagctgaacacgcatgcaacatttttgtacctgaatttggtacctctgacgttgtcggcacattctgctatatttgaacactgaggtggatgatcgatgtacagaataataataattccaatatcatttccttatatgccctcaattatttaattgtaatatactccttcggttcttt

SEQ ID NO: 33153 - DNA, 2707 bp, Zea Mays
cacacaccttgaaaattttaatcaaagctagtatttatggttcctgggcataattatataggatctgaacacttactccttgggctacttcgtgagggtgaaggtgttgctgctcgtgtgcttgaaagccttggtgctgatccaaacaacatccgtacccaggtcataagaatggttggggaaagcacagaagctgttggggctggagttggtggaggaagcagtggccagaagatgcccacacttgaagaatacggtactaatttgacgaaattagcggaagagggcaaattggacccagttgttggtagacaggatcagattgagcgcgttacccagattttaggcaggaggacaaagaacaacccctgcttaattggagagcctggtgttggaaagactgctattgctgaggggcttgctcaacgtatttccaatggtgatgttcccgaaacaattgaaggaaagaaggttattactcttgacatgggcctccttgttgctggaaccaaataccgtggagagtttgaagagagattaaagaaacttatggaggaaattaagcaaaatgaagatattattctctttattgatgaagtgcacacactgattggagcaggtgcagcagaaggtgcgattgatgctgctaatattttgaagccagctcttgcaagaggtgaactgcagtgcattggtgccacaacactggatgagtataggaagcatatagagaaagatcctgccttggaaagaaggtttcaaccagttaaggttcctgagcctactgttgatgaaacaatacagatcttaagagggctccgtgagagatatgaactccatcacaaactgcgatacacagatgatgctttaattgctgctgcacagctgtcttatcagtatatcagtgatcgtttcctgcctgacaaggccattgacttgattgatgaagctggatcccgtgttaggctgaggcatgcccagctccctgatgaagccaaagagctggacaaagagctgcgacagataaccaagcagaaaaacgaggctgtacgcggccaggattttgagaaggctggtgaattaagggaccgagaaatggaactgaaggctcaaattacggccattattgacaagagcaaggaaatgattaaagcagagactgaatctggtgatgtcggtcctcttgttactgaggcagatattcaacatattgtctcctcttggactggaattcctgtggagaaagtgtcgtctgatgagtctgaccgtctcctaaagatggaagagacactgcatacacgtatcattggccaggacgaggctgtcaaagctattagccgtgctatccgccgtgctcgtgttggcctgaagaatccaaataggccaattgccagcttcatattctctggaccaactggagttggcaaatcagagctagcaaaggctctggcagcctactactttggctcagaggaggctatgattaggcttgacatgagtgagttcatggagagacatactgtctccaagcttattggatcacctccaggttatgttgggtacactgagggaggccaactaactgaagcagtccgtcgccgcccatacacagttgttctctttgatgagattgagaaggcacatcctgatgttttcaacatgatgcttcagatattagaagatgggcgattaactgatagcaaggggcgcacagttgacttcaaaaacacactattgatcatgacatctaatgtgggaagcagtgtcattgagaaaggaggccgcaagatcgggtttgaccttgactatgatgagaaagacaccagctataacaggatcaagagcctggtgaccgaggagttgaagcagtatttccggccagagttcttgaacagattggatgagatgattgtattccggcagctgactaaattggaggtgaaggagattgctgacattatgctgaaagaagtgtttgacaggctgaaggccaaggagattaatctccaggtcacggagaagttccgagatagagttgttgacgaaggttataacccgagctatggtgccagacctttgcggcgtgctatcatgaggcttctggaggatagtctggcagagaagatgctggctggtgaggtgaaagaaggtgactctgccatcgttgatgtggattcagatggcaaggtgatagtcctgaatggtggtagcggtgttgctgagccactggaacctgctctcagtacctaaccgaggtcaaaatcatcattggtccgaaatatggccttctttacaagtcagctgggtttctcgtgatggtaaaaactagactgacattacttggccgcccattagttgctttatctttcgtttattttcttttttgttggaagtgaggcagtagggttgctatggaaatgaatagatggagaagcatttagcagacatataatatatgctagacttttgagttgccttgttttgggaagaaacttggaattttcagtttgatgcacttgtattattattaggccttggtagcaacaagatacggatgtcgtctctacgtttgctgttgtacttcagtgtaacttgcctcccgaatgtatgagtattatttatcaagtcccaaataacagtgacggattgctacattctgttttttttgtttgtggatctgaaaattggaattcttagcttatctcca

SEQ ID NO: 33154 - DNA, 1815 bp, Zea Mays
ctcgtcactcggtcttttgtccatcaatccctctctttcccatcgccagatcacctggccggccttctcctgcaatggatgctaccatggcgttcacctccggaagccctacccccacgcgcttctactcttcagctttgctatcgttgcgcacccccaagagcctctctgtctacggcccatggcgatggcgtgggcgtgggcgccccctcctcgcgctccggcatcggtcccaggcccaggccgccgcagcggcggccggggcggccgaagcctcccaccacgatgttgtagttgtgggcgctggaatcgtagggcttgccatcgcgcgccacctcctcctccacacttcgctctccgttgccatcgccgacgctgccgtcccctgctctggtgccacaggcgcagggcagggatacatatggatgtcgcaccggacgccggggactgacacgtgggagctggcgctgcggagtaagcaactttgggaggagctggcgaccgaggttgacggccagggaggcggcggagcacgggagaaattggggtggatgaggacaggaagcttgctagttgggagaagttcggaagagctgggcacattggacgaaaggaccaaggctctgtctcaggcaggcatacatgcggaattcttgtcagcatcttcattacatgcattagaaccggcactcagtgtagggaaagatggcggtgctatgttcttgccgcaagactgtcagattgatgcattccaggctgtctctttgattgagaagaccaataactcgtattcctcagaaggaaggtatagggagttctataatgatcctgccatgtcattaataagatcggacgttactggaaaagttgaagctgtccaaacttccagaaacatattgtatggcagaaaagcttttgtaattgcttctggtgcctggactcgatccttattgcatagtttcgtagaaccagctttgacgttggatattcctgtcaagccacgaaagggtcatcttcttgtgttggagaaattcgacaaggttaagttaaatcatgccctaatggaggttggatatgttgaccatcagattacaaagtcaaatagcacacacatagcttcagaatctagtgaagatgagcttggtgctttatcagtatcaatgactgcaaccttagatacaaagggaaatttagttctaggaagcagccgggagttcaaaggtttttcgagggaggttgatagatccgttgttcagtgtatatgggaacgtgcaggagagttttttcctgcaatgaagaatgtttcttttgatattgatcagaatactcaaatcagaatagggcatcgtccatacatgcctgatggaaagccagttattgactttattcctaatctctcaaatattttgattgcaactggacacgaaggaagtggacttactttggcactaggcactgctgaaatggtcactgatatgattcttgggaatcctggaaaagtgagctactcacctttttccatcaaacgcagattttcagtttttgactgaggctgctgaaattctctgttgagtaacgtctagaggcgttcctccagtccgatccacttttcatcatcaattcaaactctgggtaactgatgcgaccatcctgttcaatatatttataaaatgtcaggtatgctaaataagaatgtgttgtgcaatccaggacaatgaataaaaacgtagatggaaccctccaaccagtcttttagatttatactgaccctcgccatagtttgttatcttttattttgtcaaaaactagtttgta

SEQ ID NO: 33155 - DNA, 891 bp, Zea Mays
catggctccggccagcaaagagccggattcttcctatcccctaccaaaccccaccaccacgagcggctgccgcgcgggagaccaggacgcatggtgactgcctcctccttcactgccatcttcttcagaagtgccttcgtcgcctgcttcgcggagccaaagtgcagatccagctgcaaaggaaggcaccattaacgccaccacctgtggctgcaacagccacaactgctgctggtggagggacactagccacaataacgtgcatcgccagagaggaaggggttgccacgctctagaagggcatcatccttggcccccactgtcagttcctctatgatggcctccacatcggcctgtatgatcctgtgaaggctttcttcgtcagaggtgctgttgtgggtgatgtcagtttactaagcaagattcttgctgcgcttgccacaggtgtgatagctattgttgtggcaaatccaactgatctcgttaatgttaggttgcaagttgatggaaaggctaacactgtcaagaggagttattctagagcccttaatgtatatgctataataatcagacatgttactttaaccatcatgggcaaatattttgccagtgatgacatgtgtttagaggatgggatccttgcaattgtcaaacaagatgagagaccccttgaattgcttgctaaagcatatgctatcaactcttttgacatagatcctcagaacccctctgatgttgttttcacgttagaatgggaatcagtcggtgtcctaccttgtggcgagaagaaagataatttttactaccgagggacttcagaattttaggctcattcatacattcactacaatgccttcgaactcatgaacatttatctctggctctattgtg

SEQ ID NO: 33156 - DNA, 1310 bp, Zea Mays
cctgaatcctcattatctaaggttcttataaatgtttggagggcttgatggcttcatgggctatgattatcatcctttgcatattcacatcggaatgtttttgggaggaacaagaaattaaatctctctttggaaagggggcaaatcgattcaatatttagattgaactttactgacccttggattgatggagacaacaagagaacctctagaactgttatggttcagaactctaggactcctggaacacttgttcatggtggtgatcatcctgaccatgcgcctataacaattggacgtgttattgctggcttagaatatagtcgaccattcagacccaagtggagtgggacacttggcttaatttttcagcatgctggtgctcgtgatgataaagggaatccggtcatcagggatttctataacagccaattgactgccagtggacatgattatgatgatacactgttagctaagtttgaaagtatctacacagattctggagaccatagctctacaatgtttgttttcaacattgagcaaggtctccctgttctcccggagtggctaagcttcaaccgactgacagcacgcttgaggcagggctatgaaattggtcctgctaggcttcttctaagtgcctctggaggtcacatggagggaaattttccacctcatgaagcatttgcaattggtgggacaaatagtgtaagaggatatgaagaaggtgctgttggctctgggcgttcttatgctgtaggtagtggtgaagtgtcatgccgcatgtttgggccactggaaggcgtggtctttggagactatggtagtgatcttggttctggtcctaaagttcctggtgacccagccggagctcgtggaaagccagggagtggctttggctatggtgttggcgtccgcgtggactcccctctgggacctctacggcttgagtacgcctttaatgataggcaagcaagcagatttcactttggtgttggctacagaaattaacatgtatattggtcacattctgattcaatcttgttcttctgagcattttgggctggtagaaactagtgccatgccttccattttttggcgatatcaaagcaagttttgtccagatcagatttcattttttttgtaacatatagttcctttacttctgttgagtgttcttcatctagagaaattaaatggacccttactggtaggttttacctatctgaagcaatgttttcaggtcgggcgaccaactggtcgttccagaggaccgaccaggcgcctaatcacgattagggcgacgatta

SEQ ID NO: 33157 - DNA, 418 bp, Zea Mays
caacacaagttcaaattgagaatgtcgagttaggggcttattttatatagttttatggcaacatatttgggcatataaataaagcaaaacaagatgtatttgagtaacaaataaaacataacagttttagctcttagaaaatttacctctgaaaaactccttcaatatatggcattttcttgccagaatagacctaacaattttgggtttcttatcgaaaaaccatgcgtagcaaacgagcaatgacatctcgcctgtaattcttcctctctaagagataaagaaacaagtccctctagtcacggtcactgagcaaatggaccaatgagacagtggcaccagaaatatagagcgactacaagtgaagtattacacatgctaagcaatgaacgaggcggaactcggaaaacatgggcac

SEQ ID NO: 33158 - DNA, 4662 bp, Zea Mays
gattctacggcaagcttatcgtagcgcgaatataaatccagatcccatctgggttaaaggcctaaaaatcgcgtcctcgaaaacctctagtctagttccgaaagcgcgcacacaacgactacaggagaagacacgcgcgacggccacggccaggtagagacagatccatctctcacctcgccccaccgccctcgccgatcggggtccgccgacccccagatcgcttcttcgcttcggtaggtggccgagtgtacgcgtacgaggagcctcccggatcccgcctcgccgtcgtctgatcggggcgcgatccgcggggaaacagcaatgacggcggaggggacggcgtgcaacggcgccggcgaggcgccgaaggcggaattcgtgcccgagaaggtggtcaccgcgtcgctggaggagaaggcggccggggagcgcgagggcgaggacgtcggcgggccttttgtggtcgtgaacggcggcgattctgacgggcactccgaccgtggctcagatctgggcaaggcgtccggcgaggagtcgtcgtccgaggaggaggacgtgcccggctccaatgtagctccggacttggccgtgggcggagatcacgggtccgcccgaggggaagtgagtgctcagggtgcggcactcggtgcttcgtcggcggacggcagtggtcgtgcttccgacggcgctgagggtggcgcggatgagggcaaaggcgaaccaagttccgattttgatgctgaagcggcgccgcaggaggacgttggtgaagaggacggtggggcagctgctctggcgtccagcgggtgcgaacctgccatcaccggtgctgattctgaggcggcaccagctgtggatgatgaggttgaaggcaaggagggcacggtggatggaagtgctgttgctgatgtcgctgaagcggtggtgcatcaggaagttagcacagagcatgatgatgccctaacgcttcccaagtcttctgcttccatggagtccgaggttattagagaggataacaaagaacagagcaccgctgatattgtggggccacatgagcagggtacatgtggggcaagtgctttggtggagaatgagcatctttgtgctgacatgagggctgattcatttgtagctgttactgagcctgacagtcaagaggattatgctgtggagtcctgcatgcgcgatgatgtcctaatttgtaccgagtctggttctgccgacatcgagtctgaggttaatggaaaggatagcaaacaagaacagagcaatgctgatgtcgtggaggtcatagggcagggtgtagttagggcagatgcgctgatggcaaatgggcatctttgtgccgacatccaagcagattcttctgaagctgctactaagcctgataacattgctaatgagagcaaactgactgaagttgcagaatcaggagaggatgctgctgccagtggagaactggatgccatcgatgcatcatcacaaaccaatgggcatatttatgttgcctcgggtgctgattcttttataattgcttctgagtccaagtctcattcctttgagacggatggacaagaaactgatcagcaagaagaggaagttccacaaactgaagctgaactattggatggagtgctaaaaccaactgaaaggaactgtgcacgcagtgttgaggaactcataggagaggaagttgacacagatgggcatcccagtgtagacggtacagctgatgcttctggggagcaagaagccaagcccatgcaggtagaaggtgaggccacatgtggtattctcgaatttgaagaagtggataaggatggtgaggatagtttgtgtaatgactgcatggttggtgttgtttcctctaatgaggaaacagagcttcctatgaaggaaagaacagatgaagctgtccccagtgttaatgttggcgagtcagagcaagtaactgaggatacaagccaagatatcatgcagggtggattggccaggggagtttttataggcacaatttttgttaagccagtatcagatcctcatgttgaatcaagcctcgtacataaagtcaaggcagaagttcatttagttgatgaaatcacagcagcagatttgaaagctgaaaatatggtcgaagtgaaaagaacagatcgtgaagttgacgaaatagaggtaaaagcgccaggtactcacgaaattgggaattcttcagaagtagaaccgaaggaagagtttgagatggaggttgatgatgctgtttcattgcatgaagctgcagcttctgcatcagaaaatggttctgaagaaaaatctagcaacattgctgttgatcaagttgaacctgtcaacctgaatgtagatgaactcgcggtagatgatgatcaacccagttttaatccaggttatggatctgctaaatcttctgatgtggccgaaacaaaaaatgtggaagcacaagtgacagaacagaagggcaatgcacaccatgcttcaggtgagtggcatggagatcatacgcaagtcattggaccacagaggatctacataattaaagttccaaaatttgccggtgatgatctctgggataagatccaggctgcacaggctcacttagaccaactgacccaggaaagagacgcaattaaccgccgtaggcaaaaacaaaaggctatatgtgatgaatacagggagaagtttgaggcagcacgtcaagaagagcgggaagcaagggctgcccatggagataagaagaatgatttaaacagtgtgcgctcagtattagagaaattgcaccaagcaaattcagttgaagaacttgatgagcttattgcaaagaaagagaggattatgcaacatgagaccatttctttgaaagaagaaaagcttttaattaaagagattaatgaattaaaatcccaacggaagcagctgtccgccaccatgggctcaaaggctgaaatcaatgaggcatttgaccaaaaagatcacattcatgagcggcataagcaacctgaaagtcctagaggagaacacaagaaagattcaaaaatcttttgctgatgaaagaacagctctcagaaaattaacagaggaacaccgagcagctaatgaaatacgtcaaaaggcctacagcgattggactgagcttagatcagagcccagcaagaagaatgaatactttttcaagtacagggacgcccgaaatgcagcagaaaatttcagagccaatggagatataaatggacttatatcacactgtaatagtcagattgagagagttatggaaatatggaacaaaaacgaggacttccgcaagcagtatgttgaatcgaacaaggttagcacactaaagagattagggacccatgacggacgaaaacttggccctggtgaggatcctccggtcattccaagccgaagaccaagcaacatttgtccattgtctgcctcaagcccggaaatgatcaccttagcttcaacaccagcacctgtattggctgctgcagctgcagtcccttccaaagagaactcctttcctgctttggcagcccctcagaccagtaagcgcgccaaatcaaaagcatctggtagctctgcccagattaagaacaaatctgttatagtatcagaggaagaagatttggaacagactttaaaggagaaggctcatcaattggagttagctaggaaggcagaggagttagataggaaggcagaggagttggcgcggaaggaggaggaactaagaaaagagagggatgcagctgaaaaggagcggcttaggatggagcagaaggctaaggctaaggaggctgaggagaggaagaggcggaaagcagagaaggacaaggaaagagccgagttcaaagcacgcaaggaagctgaggagagagagaagaagaaagcaaagagagacaaaaagaaaggcgcagcaccagcagattcgagcgccattggtgacagccatgctgctgcttcggctacagcagatactgacagtaatgcatcagacaacccaagggaagctgacgtttctcaaccagcggtggctcccaggaggccggctagaccagcggcggcaatcaagcaactgaacaggttgcagcccatgccagcgcccctgcgtaacaggggcaggaggaaactgcggcagtacatcctgatcgcagcggcggtgctaacggtgctggcgctgttcgtggcaggcaactacattcccaggctgaggtcgcactcctaattttatcgttaggaaaggagtgccagttctgtcgcggtgaacctggtggtggttctacctagaggattcttcttttttcgactgttcgggttggtttgtatttagcttcccttattataggtttgtgataaaagttattaccggatggtggtgaaatattcgttagaacatgataataatgactatagattcttttttgtacataggtctctggtgctaaccttagcgtatatgatatttaatcatattctatggcgttggctgtctccggtgtgaacgatgtcgttcactatgttcggcagagacgagttgaatgtatcttctgcgcgctgcgtacaacccagaagagacgagagagagtatgtttaggatttagagtatgttagttgttaggtttagggtttagagttagggtttag

SEQ ID NO: 33159 - DNA, 1642 bp, Zea Mays
ccttgatgcttggtggcctcgaacaaagtacaggtccatttctagcctatcgagctcctcaggtagtaaaaccctacctacacctcgtgccgcctccgtcgccggctcgcctccccatcgacgcgcaggcagccctgcgtttgctccccgtcggtcgggaaaggggcgcgccggcgctgcctccagcaatcaactcgccgcatccaatcacggcgcctccctcctcgattggctcctcggtggttggttgttataggcaggcgggaaggatgttctcgctgagccagatcgagcacgacctcccgatgccgccgcacctgctgagccgcccccttcccgacgccatcaaggccgagctcgagaggctcttcttggacaaggtaatcacaaaacttgggctgtgcgtgtctgtctatgatatccgatccattgaaggcggttccatccatccaggggagggctgctcgacttataaagtttcatttcgtttgctgatgttcaagccttttaatggggagattcttgttgggaggattactggatatgacgataagggattgcaggtttcacttgaattcttcagtgacatttgcatacctggacacttgatgcagtttggcacagtaagtgtacagtgcagtgtttcaaaggcatccaggtgaacctagcttgccttgggaaacagtggcgccatgtcgcctaggcgctgcctaggtgtccaggcatacccagcactggtacagtgtactctatttgactataattgtcatgtgactgtaataacataacatagtccatgagaaattaacatgaaatttatcttgggaaaaaatgcggaaaaagatggttctctgcagcaagtaggtagcacttttgaagcacttaaaagaaccttagtttaacctattgcattgatgaaacactgatcttttcctcttttctgaagaaagtatttcctgtatagagttcagtgtatattttctttagttctcatctttgttcattgtccattgagtttccaggggaccagatggtaggtggatgctgaagactgaattaggcgatgagctttatctagatctagatgacgagataaggttcttggtttctagcacaaaatacccgcctataccaattgatcaaaatgaggatgacccaccatttgctccaatgcagattgttggaagtattaaaggggatggccttggtcttcttgtttggtgggcagctgatgaagaggagggggaggaggcggcagaggaagagcaatagcatcgtgttgcttgagggctcacttcgtgtaatttacagaatcagcctggtagcatgtgtagtgtaggggtcaggttcctaggagaattatgtatgtatgcaatcccctgaaattttctaaatatctgtgagctatatataattttatagcgcagagatctctccctgtaagagcatctccaaaagctccccagaagtctcctctaaatctattttttggggaaaaacacaaaaacatgtctccaacagttcccctaaagcgccccaactttttcatagcccttaaaactccctcgtttgtagctacaaatgaggggtttttttgggctccccagaaacaaactgctgctttaagggatctgttggagaa

SEQ ID NO: 33160 - DNA, 1227 bp, Zea Mays
caccaagacacagatcatcaatcaagtgtcgagattacggtagggtagccactacaatgactatggaccataccaccgactatcaaaacaagaagtgtgaatctccacgcaacactttatccgaattcggagcagcagccgccgcggatgccgttaaaccctaactcccaacctcttctttgtcacactatttctagggttttacatgcaccaacaggagccccttccgtcacttcgcctccaacaacagcagcgccgccgccgccgccgccgccacttaatcgccgggatcgtcgccggaggaaagcgccatggatcggtaccagcgggtggagaagccgccgcccgagcccgccgccatcggcgagaatgaggtccgcatcaccactcagggcctcgtccgcaactacgtcacctacgccacctccctcgtccaggaaaaacaggtgaaggaaattgtgttgaaggctatgggacaggctataagcaaggcagtggctattgctgagatcataaagaagaggattcctggtttgcatcaagatacaataatcagttctgtcagtattactgatgtatgggagcccattgaggaaggacttgtaccattggagatgactcgtcatgtttcaatgatatcgatttccttgtcacctaaggagcataacaagaattcacctgggtatcaagctcctctacattcggatcttaagccacaaagatatcagcaacctcagcaatatcaacagtaccagccaagacaacatcaagttcaaacggattcatatggacgcggccgaggcagaagcaggggccgaggaaggggctggggtactaggggtgggtacggcggaggctatggtggatatgaatatgataacaaccaagtaggttatggtgggtatgaacaccacggtggatatggacatcaaggtggatatggaaaccagggaggatatggccacaaccaaggtggctatggccacgaccaaggtggctatggcggttatggttacaaccaaggtggatatggaggatatgaaaatggaggctggaactacaaccggaacagaggcggtggcggccgaggacgaggcaattggggctatggtgattgttgtaagattcgaaaacctctcgttgccaaacggggtctaaaagaagtttgtgaggttgttcttgttgtgaggtgaactccttaaaaagcaagttgtggcactactatac

SEQ ID NO: 33161 - DNA, 3301 bp, Zea Mays
cacaggaccttgttctgcctccccgcgcatcggctgctgccgcgcacaaatccgccgcgccctcggtcccgcaaatccgccgtgccagctccgcccgctcgattcccctcctagcgcccgcattccccgccgccgtcctcgcggccgcagcgcccctggaccccacgccagcaacgcccgcagtccccgccgtggatctcgcccgaaggcgccgccatggacgccctagatctaccacctcctcctctccccatcactgcgccgcctgcccccgccgcacacctacagcgcgccccttcccccaccgtggatctcgcccatacgccagcggatctcgcactccttccttcgacggcgcggtggcgaggaggtcagcgacggcggcgtcgagtcgaggtcgggcacgaaggcgcggaggccgtgggagcggtcgtggcctacgcacgcacgacgccgctcccccagttcaaaccgaggtcagcgacgacgcacgcacgcaccaccccttcccccttcgtcttccattcccagctggaggtgcacgctgccgggcagagcgtcttgctggaggtgcgatagccatgtctggacctccgtcgccgccatagaagtgccttgtcattgatgaagccgatcgcatacttgagcaaaactttgaggcagactgttcttttttctgctacacagactctagatgttgaaaaaattgctaaactgtcatttgagaaaaatgaagtaaaaaaagcctgattatgttggagttgatgatgataagtcaaaggctactgttgaaggcctgcagcagggttattgtgtcatttctagcgataaaaggttcttggttctgtatgctttcctaagaaagagaagataatggtgttcttctcatcatgtaattcagtaaagttccacgttgaacttctgaatttctttaggatagagtgttttgatatccatggaaaacagaagcaactgaagcgaactactacattctttagcttttgcaaggcaggaaagggcatcttattgtgtactaatgtggctgcccgtggacttgatactcctgacgtgaaggaaggcagtgttcatgtctcatccagttcaaatgaagtgacaggaaccattccagagacgaatggaggcgatcatcatatacctggaagctcttttcatgtttagtgaaggtctatgacatgtctgatagtcaaatgaagctaaatgattttatttcaagccttgttcttgagaggatggtcaagattaatttgagtagggtgacttcataatggacgacgaggaagaagtggaaggagaggaagaggaacaaaagagtgatgaccagaagcgaagaaacaaaactaaaaagaaaaggaagagtgctatagaggagcaacggtaccaggacgcgtcaaggttgacaaagctatctgggaccacttttgtaattgccaactcttcactgattattttcctatatgttgctccagaataaatggatcatagtgcggtggtcatgggattgggatctgctccgtatttgcagggtgaagccttcgtgtctcctcgagggaaagtcactgacctttcttgggacgtggaccactgacggcccccgtcatcccccatgacggtgatcctagggtgaagccttcgtgtttcctcgagggaaatctaccagtgcgggattgatttagtcagcaccattggacacagggtttagttccattgcctggacccatcaatgaatcatggtgccaaggtcttgatggttcgacttcaaggtactgatattctccaggactattgttagcatcccttgtggtccatctgcattagcagtgaagaaagtcgcatggggacttgcttgatatgttgttattgctcagacatggctgagaaggaggaaacaaagggccgctgccctgcctgccacacacgttatgacaaggatatgatcgtcaagatggccgccacttgtgacagtggcagataaaaatgcggagaagaagcaaaaggcccaaagggttaagccaaaggcagcaccaacagcaacaacaacatcaaccgtagaatctaagaagcatcttgctactatcagggttatccagagaaatctggtgtacataattgggctacctgcgcatttatgcaatgagagcgtacttgagcgtagggagtactttggtcattatgggaaagttttgaaggttttagtttcccgtccgactgggcctccctctcagcaggcatcagcaaacagcagtattagtgtgtatgtctctctgaattatacggtgtacatgcatgatctgttcatacttcatatgaatttagatttatactttcagtactggtcaattagcctgatggaatatcaaataactatctactgattctatgcaattgcatgtttcaagtttctaatgctgccttgtaatactggaacattggtattataagaaagtaaattcaaacttcaatattgttatgtggttttctattgaacctggtgaaaatgtgataattatgtccatatccttgcaagcagttcagtcatttaagtttaatctaggctacttagcagtgtgattttcctgtagcctcttgatttgcatagccgcacagcccgtgcttgaaagtaacatttttatcctcattgctgacattaggatatgtattgtattattggtgtgaaattcaaagaatcagatagatgcaagatatctgtttgtgggataggatcagaacccaatcctgtgtgtgcagatatagataaaaatcatcttttaatgaaatgtctatttttttctcggtttgagtactttatattgttctcctgggatgtgttttttttctttatgggtgatttctcttggaaatcctaggatagtgtttcgatgtattctgaaactttgttgtgccagaaacatgcattgttttatcattaaccagaattgagttagggattatcattaaggcattaaccaaaatggagttaggatgtctttttttgtagtgtagaaaacgttgtgtatactgaaatgtgcatgcttgcaacatgtctaatatagattatatttgagtggtatctttgttgaagaacatgtgaaattagagttctggtggtcttctagaacacacactgctcctcatctttactttctctacataattcttcaatatgttggtatgttcccgtgactccttggtttagctatccttatacatgcatgttgttacataaatcaattagtttttccctgaaggacaggcctggtgcagtggtgagaggcctttccac

SEQ ID NO: 33162 - DNA, 1006 bp, Zea Mays
acgactgacagtgaaaaaataggaaatgactcgtcaacgcaactaccccaagtcgccgctgagccactctctccgtccgcgaatccgtaaatggaaggggacgaaatgctcagggtgaagctcggcaggcagggccttgaggtgtccaagcttggcttcgggtgcatgggcctcactggagtgtacaacgcccctgttcctgaccaagctgggatcgacataatcaagcacgcgtttgaggccggcatcaccttcttcgacaccgctgatgcctatgggccacacaccaacgaggtcctgctcggaaaggcattgaaacattttcctcgtgagaaggtgcaaattgccaccaaatgtggcattgcaggatttgatgcaagtggcatgcgtgtgaagggcactccagattatgttcgagcttgttgtgaagcaagccttcagcgccttgctactgactacattgatatatactaccaacatcgcattgatcagtcagtgcctatagaggaaactatgggagagctcaagaagttggttgaagaagggaaagtgaggtatgttggcttatcagaggctagtgccgataccattcgacgggcacatgctgtccatccaattactgcggtgcagttggagtggtcactatggaccagagatatagaggaagatataattccagtctgcagggagcttggtattggaatagttccatatagcccacttggccgtggcttctttgctggcagggcagctgtagaacgtgttccatcagaaagtctattgtctaaacatccaagatattctggggaaaacttggagaagaataaagttctgtatacacgacttgaaatgttgtccaagaagtatgggtgcacacctgctcaactcgctctctcctgggttcttcatcaaggagaagatgtggtccccatccctggaacaacaaaagccaagaaccttgacgaaaatatcggtgctgtaaaggcaataatctcctctagctaca

SEQ ID NO: 33163 - DNA, 2708 bp, Zea Mays
gcattgaacattagttgcactcaaatcaggctcctttcttggcctagtttagggtaggctgagtgtctctttaaggagaagccctcctagaccatgtgttgaccagcctcagggaacaccagaaaatggatacatgtggaacagggttagccctcaattaagttcccctaatcagccctattcattgagagaagcacttgctcaagcacaatcttcaagaatcgggtcaaccgccagggcattgagagagtctctacatccagtgctgagacaaaaaatggaactttgggaagaaaatctcagtactgccgtgagcctcgaagtgttgggaataactgagaagttttcagttgctgcaggcgctcgaagcatcactactgattacgcgaagctagattgtgtaacatcaatcttaatgggtcttttatctaggaaccaatccttggctttttggaaggctttccttcctgtggtctacaatatatttaatgttcatggtgcaacactaatggcaagggagaatgaccgcttcttgaagcaaattgcttttcatcttttgcggcttgctgttttccgaaacgattcgattagaaaaagagctgttgttgggctgcagattcttgttaggaactcattcaactatttcaaaaacactacaaggttaagggtcatgttgacaattactttgtccgagttgatgtccgacgtgcaagtaactcaaatgaaattcgatggttctcttgaagaaagtggtgaagctcggcgccttaggaaatcactggaggaaatggctgatgtgagaagcaaggatctgttaaaagattgtggcctccctgttactgcattggaggcggcccctgaaggctcctctgataataggtggtcttgggtagaggtgaaacatttgtctaaatgtctagtccaggcccttgatgctggtctggaacacgccctcctgggttctgtagtgactgtagacaggtatgcagctgccgagggtttctataaactagctatggcctatgcacccgttccagatcttcacattatgtggttgcttcatctgtgtgatgcacaccaggagatgcaatcatgggctgaagcagcacaatgtgcagttgctgtagctggcgtgatcatgcaggcacttgttggaaggaatgatgctgtgtggagcaaggagcatgttgcttcgctgcgcaagatttgccctattgtcaacactgatgtgagtgcagaagcatctgcagctgaagtcgagggatatggtgcatccaaattaacagtggactcagcggtcaaatatcttcaactagccaataaacttttcacacaagctgaactctaccatttttgtgcaagcattcaggaactcataattcctgtgtataaaagcagaagggcttatggacagctggccaaatgccacacatcgctcacaaacatctatgagtcaattcttgaacaggaggctagccctataccattcattgatgccacatactaccgagttggtttctatggtgagcgttttggcaagctcaataaaaaggagtatgtatttagagaaccacgggatgtacgtcttggtgatattatggagaagcttagtcatatatatgaggctaaaatagatggaagtcacactttacacataattccagactctagacaagtcaacgctgatgagttgcagcctggcttctgctatttacagatcactgctgttgatcctgtgatggaggatgaggacttgggtagcaggagggaaagaatattttctttatctactggtactgttcgtgcacgtgtttttgaccgttttcttttcgatacaccattcacaaaaaatggaaaaacacaaggtggtctagaagaccagtggaagaggcgcacagtgctccaaacagagggttcctttcccgctttggtgaaccgtctgccagttatcaaatctgaatctctggagttctctcctgtcgagaatgcgattggaatgatcgaaacaaggacagctgcattgagaaatgagctagaagaaccacggagttctgaaggtgatcaactcccaaggcttcagagcttgcaaaggatactccaaggaagtgtggctgtgcaggtcaacagtggggtattaagtgtgtgcactgcattcttatctggtgagccagcgactaggctcagatcccaagaactgcagcagctcatcgctgcattgcttgaattcatggctgtctgcaagcgtgcaatccgtgtgcatttcagattgataggggaagaagaccaggaattccacacccaacttgtcaatgggttccagtcactcaccgctgagctatctcactatatccctgctatactctccgagctatgatagaactgtagcaagccagaaattaggtagcatgtgaatggttgttcattcattcagttgcaggttcccaccaaatgtccatatttccattagctttggttgtatagttctaggaaccggaaattaactagtcttcgaagttctgtaccgtattgcagaaccgattcctgattttggagtgtaaagtctgtataatacctagtgttatctgttatgcaccagttatatgctgagttccttcttttttgcagtttgctactatgtcacaactagcggacattttgcacttgtattgtgatacatagtgcatatatatatatatatatatatatat

SEQ ID NO: 33164 - DNA, 7271 bp, Zea Mays
atgtggaacggcgtgccgcctccgcctccgcctccgttgcagatggcggcggcccctcctccccctggcacgacggtgcccggggcaggccagcccccgcccccgcccccgccgcctgccggggcgtcgcagggcggcaagccgctgacaccgatggagctggaggcgcagctggtggagaaggcccgcaaatggcaccagctcaactccaagcgctacggcgacaaacgcaagttcgggttcgtcgaggcacagaaggaggacatgccccctgagcacgtccgcaaaatcaccagagaccatggagacatgacttccaagaagtacagacatgataagcgtgtttatcttggagcactcaaatttgtgccccacgctgtgtacaaactgctggagaacatgccgatgccttgggagcagtggggtacaatgtggattatgatgcgacgagagaagagggataggcgtcattttaaacgaatgcggtttcctccatttgatgatgaggaacccccactggactatgctgataatttgttggatgttgaaccacttgaagctatacagttggagttggatgaggaggaagatgcagctgtctatgaatggttctatgatcacaaacctctgatgaagacgaagctcataaatggccctagttacaggaaatggcatctatctcttcccataatggcaacactatatcgccttgctggccagctgttgtcagatctgatcgataggaattatttctacctatttgatatggagtctttctttactgccaaggcccttaatatgtgcattccagggggtccgaagtttgagccattataccgtgatatggagaagggtgatgaggactggaatgagttcaatgatataaataagctcatcatacgtcagccacttcgaactgagtacaggattgctttccctcacctgtacaacaacaggccaaggaaagtgaaacttggtatatatcatacccccatgataatgtatatcaagactgaagatccagacctgccagcgttctactatgatcctctgataaaccctatcacttcaaccaacaaggttgatcgtagggagaggaaagcagctgaagaggaagatgatgaagatttttgtctcccagaagatgtagagcctctcttgaaacagactgaactctacactgatacaacagctgctggtatatcgttactttttgctccaaagccttttaacatgagatctggtcggacacgtcgtgcagaggatattcctcttgtatctgagtggtacaaggaacattgccctccagcttatcctgtgaaagttcgggtgagctatcagaagctattgaagtgttatgtgctcaatgagctacatcataggcctcccaaggctcagaaaaagaagcatctgttccgttcactccaagcaactaagtttttccaaactactgagcttgactgggcagaagcaggcttgcaagtttgcaagcaggggtacaacatgttaaacttgttgattcacaggaagaatcttaattatctccatttagattacaatttcaatttgaagcctgtgaagactcttacaacaaaggaaaggaagaaatctcgttttggaaatgcatttcatctgtgtcgtgagattttacgacttacgaagttggttgttgatgctaacatccagttccgtctgggaaatgtggatgccttccagttggctgatggtctgcaatatatattttctcatgttggacagttaactggtatgtataggtacaagtaccgattgatgaggcagattaggatgtgcaaagatctgaagcacttgatatattaccgtttcaacactggtcctgttggcaaaggacctggttgtgggttttgggctccaatgtggagagtgtggctctttttccttcgaggtattgtcccactattggagcgttggttgggtaatcttttggcacggcagtttgagggtcgtcattccaagggtgtggccaaaactgtaacaaagcaacgtgttgagtctcacttcgatttagaacttcgcgctgcagttatgcacgatgttttagatgctatgccagaaggcatcaagcaaaataaggctcgaactatattacagcatcttagtgaggcatggcgttgctggaaggcaaatatcccatggaaagtccctggtctacctgtgcctattgagaacatgattcttcgttatgtgaagtcgaaggcagactggtggactaatgtcgctcattacaatcgtgagcgtatcaggcgtggtgctacagttgacaaaactgtttgtcggaaaaatctaggaaggttaactcgtctgtggcttaaggcagagcaagagaggcaacacaattacttgaaagatgggccatatgtaactcctgaagaggctgttgctatctatacaacaactgttcattggctggaatcaagaaagttctcgccaattccttttccgccgttgtcatacaagcatgacactaaacttcttatacttgcactggaaagactgaaggagtcctacagtgtagcagttagattgaaccaattgcaacgggaggagcttgggttgatcgaacaagcgtatgataatccacatgaagcactgtcaaggataaaaaggcacctccttactcagcgagctttcaaagaagttggtatagaattcatggacttgtacagctacttgattccagtatatgaaattgaacctcttgaaaagatcactgatgcataccttgaccagtacctgtggtacgagggggacaaacgacacctctttccaaattgggttaagcctgctgattcagaaccaccacctcttcttgtttataaatggtgccagggcataaataatttactggatatatgggacacaagtgatgggcagtgtgttgtgatgctccagacaaaatttgagaagttctttgaaaaaattgatctgactctgttgaacaggcttctgcggttggtcttggatcataacatagctgactatgtcactgcaaagaacaatgtagtgctgtcttacaaggacatgagtcacacaaattcttatggtctcattcgagggcttcaatttgcatcttttgttgttcagtactatggccttgtgctggatctcctgattcttggccttactcgtgcaagtgagattgctgggccacctcaaatgccaaatgaatttcttacatatgctgacacaaaagttgagacaaggcatcccatcagattgtattctcgatatattgacaaggtgcatatattgttccggttcacccatgaggaagcacgggatctcattcagcgttacttgacagaacatcctgatcctaacaatgagaacatggttggttacaataacaagaaatgttggcccagagatgcaagaatgaggcttatgaaacatgatgtgaatcttggaagaagtgtgttctgggatatgaagaaccgccttccgaggagcattacaactttagaatgggagaataactttgtctctgtttacagcaaggacaatccaaacctgctttttagcatgtgtggctttgaagtccggatactgccaaagatacggatgactcaggaggcgttcagcaacacaaaggatggggtatggaatttgcagaatgaacagacaaaagaaaggacagcaattgccttcctgagggttgatgatgaacatatgaaagtgttcgagaaccgtgtcaggcagattctaatgtcatctgggtcaacaacgttcacgaagatagtcaataagtggaatacggctcttattggccttatgacatattttcgtgaagcaactgtccatacccaggagcttttggatttactagtcaaatgtgaaaacaagatccagacccgtataaagattggcctgaattcaaagatgcctagcaggtttcctccagttatcttctatactcccaaggagattggaggtcttggaatgttatcaatgggccatattcttataccacagagcgatcttaggtatagcaagcagacagatgttggtgtaacacattttagaagtggcatgagccatgaagaggaccagctcattccaaacttgtatcgttacattcagccatgggagagtgagtttattgattcacagcgtgtttgggctgagtatgctttgaagaggcaggaagcacaatcacagaacagacgattaactcttgaggatctcgaagattcatgggatagaggtatacctcgtatcaacactcttttccaaaaagaccgccatacactagcctatgacaaaggatggagagtgagaacggattttaagcaatatcaagtgctgaaacagaacccattctggtggacacatcagcggcatgatgggaagctttggaatctaaataactacagaactgatgtcattcaagcacttggtggtgtagaaggcatcctggagcatacattatttaaagggacttacttccctacttgggagggtctgttttgggagaaggcatcaggtttcgaagagtcaatgaaatacaagaagctgacaaatgcacaacgttctggtctcaatcaaatccccaatcgaagatttaccctgtggtggtcaccaaccatcaatcgtgcaaacgtgtatgttggtttccaggtccagctagatcttacggggatattcatgcatgggaaaatcccgacgttgaagatttctctgatccagatcttccgtgcacatctgtggcaaaagatccatgaaagtgttgttatggatctttgccaagttttggaccaggagttggatgcacttgagattgagactgtgcagaaggagacaatacatcccaggaagagttacaagatgaacagctcctgtgcagatatccttctctttgctgcacacagatggacgatgtccaaaccaagcttagtttctgagtccaaggatgtctttgatcagaaagcaagtaacaagtattggattgatgtgcaactgcgttggggagactatgattcacatgacgtagaacgatatacaagagccaagttcatggattacacaacagacaatatgtccatatacccatcgccaactggtgtgatgattggaatcgatctagcatataatttgcactctgctttcggtaactggtttcctggatcaaagccactacttcagcaggcaatgaacaagatcatgaagtcaaatcctgccctgtatgtcctgagggagagaataaggaagggtctgcagttgtactcttctgaacccacagaaccgtacctgtcttcacaaaactatggagagatattcagcaatcaaatcatatggtttgtggatgatacaaatgtgtatcgagtcactattcacaaaacatttgagggtaacttgaccaccaaaccaatcaatggtgctattttcattttcaatccaagaacgggtcaactttttcttaaggttatccacacaagtgtatgggcagggcaaaaacgtcttgggcagctggccaagtggaaaacagctgaggaggttgctgcattagttcgatctcttcctgtagaagagcagccaaagcaaattattgtgacaaggaagggcatgttagatcccttggaggtccatctacttgacttccctaacattgttatcaaaggcagcgagctgcagcttcctttccaggcttgcttgaagattgagaagtttggtgatctgatactgaaggcaactgaaccacaaatggttctttataatatatatgatgattggttgaaaagtatctcatcatacacagcattctctcgcattgtgcttatcctacgtgcacttcatgtgaataatgagaaggcaaagatgttgctcaaacctgacaaaacaattgttactgaaccacatcatatatggccaactctgaatgatgaacagtggttgaaggttgaatgtgcactaagggacctcattctttccgattatgcaaagaaaaacaatgttaatacttctgcactcacacaatctgaaatgcgagatatcatccttggtgctgaaattgctccaccatcacagcagaggcaacagattgctgaaattgagaaacagtcaagagagacgactcagttaactgctgtaaccacaaggacaacaaatgtgcatggagatgaactcattatcacaaccacaagtccatacgagcaacaagcattcgcatccaagactgattggcgtgtcagagccatctctgccacaaacttgtatcttcgtgtaaatcacatttatgtcaattctgatgatataaaggagactggctacacttacattatgccaaagaacatattgaagaaattcatatgcatagcagatctgcggacacaaattgctggatttttgtatgggctgagtccacaggacaatcctcaagtcaaagagattaggtgtatagccatgcctccacagcatggaacacaccagatggtgactcttccagcaaatcttcctgagcacgagttccttaatgatctagaacccttgggatggatgcatacacagccaaatgaagctccacagctatcgccacaggacctgacatcacatgccaagattctggagaacaacaaacaatgggatggtgagaagtgcatcattctgacatgcagcttcaccccaggatcttgctcgttgactgcatacaagctgacaccaagcggttacgagtggggacgcagcaacaaggacaacggaagcaatccacatggataccttccaactcactacgagaaggtccagatgcttctgagcgaccgcttccttggattctacatggttccggataacgctccttggaacttcaacttcatgggagtgaagcacgacccacagatgaagtacaacatgaagctgggcatgccccgggacttctatcacgaggaccacaggccaacacacttcctcgagttcagcaacatcgaggagggtgaggccgctgaaggcgatagggaggacacattcacgtaggcgcctgttagaaactgctctgttttaacggcagtgtgtgtagctgtaacctgacttgacgggtgtcatctgttcgcctgttgcttaagcctgtattatactacctctttgttgtaagaagccctggtgagggattaaaattgtacaagtgcgcgccatggtaacagtaaaggttttgcttcctcccaagcttccaccttcaatccttccaggcttcataaatttaaattaaaaaaggtcttttaatagattcctttctttat

SEQ ID NO: 33165 - DNA, 3723 bp, Zea Mays
taggttatccatttatttgtgccccacagcaggtgggcgttggtttcctggtggggggtggggtggggtggggaggaaactgagtttgtgcgagttgtattatgtgcgtattgtatgtatatcttcttaatactagcaacaaagaaaatggtgtctggttatcagtcagtggagaataagttcggtgaatggtgaacccattgtatatatagcgctatgttgctcaacagagcacaccacaccacaccagagttacatcattagttccagtcctgcttcacacctggccctgttttgcttgaccttttagctgtgatcaacctatatggtcagctaaagaaaatgctttacttgtccatggaacttaccagattaccagtagtttacacttcacccatgagattttttttttgcttctgttaataccctcattaaaatcagaagtgcataaaaaaacttgacctaagggataagacagcccctgggtattaaaaagaccttctcatgcatgttgagaaaactccggaaccctaccccacctatacacagcggcaccgtaacacacatgaaaacgaccgtgactaggagtcctctgctttgtcatgggatagaagaggagatttttttaacccagcctgaaatttgtttccatggggagttagactcaggacataaaagtaagagacttagagtaggtaaggtggaaagcaaattagcagtaggttaaggtagtaagatagtgaggaaagttcccttgagtttgaaactttattgaaatattcaaccgcccatcattgcattatattcttttaattatgggcaatttttggttcgtttgagtagattatgggattttggctgagctcaacagcaattctggtcattcttgtttgtttggagttgacgtttagaattgttaggccctaccatggagagatgttgggaacaccactattttgtagggatcttctgaatgcaaaaaaatgaaattaggtacagcacttggccagtcagtttgtagggggttatttgtcgggtgcaatgccacgatagtgtgttataacatagattgctgacgtctgacaacataggtctaataattccttgatgctgtgttggaaacaagatgatccatgaacaacccattgaaaaagttcaagaacgctgaaatttccaatttacctgggcccagccgtttaatgtcccaatccaaggaatcgtcataaaaattgtttttggctagtgattttcatggtaccagacactgatgtagctacaattgtgccagatgctgatcagtgcttattgttcgtgcatgcttctaggatattgtttcaggagaattgtttgtggatgcttctagaatattgtttcaggcgaacaattctgtggatacttctaggttagcttcaggaattgaacacacatttggtaacatagtagcttacataactctttgagaatcattcatatttaactgcacgagatcattggtggagaattagatatggcagaataaatcatggcacacaaggtctttggttgcagtacgttgcttttgctaatatattaacttctatccattttacgcatctttgctatagcaggcctagcttttacagtttaagcatttactatgtacttcaatcttgccatgaaaataaaaagtatattctcatccttgttgagggctattacacctcatgtacagttctgtgattaaactatatcactagggtctcatgtcctatgcatgttctcttttgtgagaccttgccacatgtctgcctgagtcacttagtgatcctccatgactcacctttctatattattttgggatgggcgtacttgatctgaatcaaaatgagactcttagagtatataggggcatagagcacacaactagcttagctaggccatgccttcaaaaactgtgcatgaaactctagaagacagacatcttcaaaacttcctcctctctactcgtatttccctactgtcttctaactcgtcaaacaacaaagagtcacaccagattgcccaggcaccgacctcttgaaaagaaccagggttcttataaatcattcgcatcagtcctcacagtgtcttctggagatgcacacaacatatctcccccatccttctctctcacccatgccttcataaacagcaaagttggctagctggttatttgtatcaagatgaagtttgaagccaacacatccatttctcgctagtaagatcaagaaaaatccattgaagcctacttcctacctaaatcttcatggatccttggagtgaaagtgagggcaagagagcccatgatcctatcttcaaatgtttcagccaaaaccaaggtcaccatcacttcatggaaaggagcacagatgctgctgttgctctctctgagagatgtagatgcatctgggtttcaggtccaattatcgtgggtgcaggaccatcagggctcgctgctgctgcatgtctcaaggagaagggaatcagtagccttattcttgagcgctccagatgcctagcttccctctggcagctcaagacatatgatcgtctcagccttcatcttcctcggcaattctacttctgacacaacgggagaggaggtggagtatgtatcccggtggcttattgtggcaactggtgagaatgctgaggccgtgcagccggatatcggtggtctacaagagttcccgggaacaatcatgcacaccagtgcatataaaagtggcagtgcattcactgggaagcgtgttctcgttgtcgggtgtggaaactccgggatggaggtgtgcctagacctctgcaaccacagtgccgagccccatattgttgtaagagatgctgtacacatcttgcccagggagatgcttggccactccacctttggtctgtcaatgtggctcctcaagtggctcccggtccacgttgtggaccgtgttcttctgtgcatagcgcgggccatgctcggggatactgctcggcttgggctaaagcggccggcctctggtcctcttcagctcaagtcactgtctggaaagaccccagttcttgacgtcggcacatttgcaaagatcaagtctggagatatcaaggtacgacctgccgtaagacaggtatcaggaagagcggtagaatttgcggacggtgagttggaggagttcgacgccattgtgcttgcgactggctacaagagcaatgtccccttctggttgaaggaccgagtgttattttctgaaaaagatggattgccaagaaaagcatttccgaacgggtggaagggtgagaagggcctgtactcggttgggttcacccggcgtggactgatgggcacctcggtcgatgccaggagggttgcccacgacgtcgagcagcaatggcggaaggccaaagggacgcatcgggacggcgttcctctacctctggtcgctgttgtttaccatggtgatgggttgtgattgtgagttgccaaagggtgtatgtacgtacgcatgcattctgctgcttgcttgtgtagtgctttgtatagggtattgtactgtcaatttctttttctttttttcttttggcgtgcgttcgttttgatgactaaccatcctacgtactataggggagggggtgaatactgaggtggccgtgttcttccaaagtcggggctcagttgacttggcctctagctactgataatgaaagaagcttgcctggttt

SEQ ID NO: 33166 - DNA, 2420 bp, Zea Mays
gttttaaggcattctaaacttagctctggacctcagttttcaaaactgcggtattataaactacggtattgtcataactaaagtatagtatagtatttcaaaaactgtggttttcaaaaactttgttcccaaacagggcctaagtgtgcaagtgcaagtgcaaccgcgagcgcgaccttttcccgtgggcgcctaggaaaaacagccgtttcctgcgcccgtccctcaccttcacgtcggcgaccgaccggcagaccgacaaactcgaggcaggccccaatggcgttggctcgcctccgcctcctcgaccgctacggtctcctgtcgccggcgctctctgcgacggcgctgcggtccttgggagacctgcgcgcgctctgcacgctctccaccacgctgcggtccggcgccggcgaggacgagatcgagcgcatccgccgcgagttcgatgacgccaagcgcaactacctcagcattcccgccgccatcaaggacatgcccaagatgaatccgcaaggcatttacgtcaacaagaacgtcaagctggacgacctccaggtctacggcttcgactacgactacacgctgtcgcactactccgagcacctgcaatgccttatctacgatcttgccaaaaggcacttggtcaatgagttgaagtatccggagagttgcttgcagtacgagtatgaccgcaccttccccatcaggggtttgtactatgacagacttaaagggtgcctactcaagcttgatttcttcggctctattgaaccagatggttgcttctttgggcggcaaaggctgagtttgagtgagataaaagagctctatggcacacggcatattggcagagatcaagctcgtcatcttgttgggctgatggatgtcttctgttttagtgagagccaggtgttccgtttcttgaagatgctgaaagagaaagggaaaaagctatttcttcttactaattcgcctttctactttgtagatggagggatgcgttatttgctagaggaccaacattttgatggaaattcctggagggaactgtttgatgttgtgattgcgcaggcaaataaaccaactttctataactcagatcacccattcagggtgtatgacactcaaaaggacaccttaacttttactgcagttgacaagtttctgccagatcaagtatactatcatggctgtttgaaatcatttctacagatcacaaaatggaaaggctcagaggtgatatattttggtgaccatcttttgagtgacttgagaggaccttcaaaagctggttggcgaacagctgctgtaattcgagaacttgaggatgaaatagaaatccaaaacggtgacagctaccgattccaacaggcaaaattgagtataatacatgatctacttgggaaagtccatgcagctgttgttagcaccgagaaaggccaagtctataaagcattgctcaatgagttgaatgcagaaagacgtcaatgccgatctgggatgcgagatttgttcaatacctcttttggtgcaacatttcttacagacacgggaagggaatcatcattttcctatcacattcatcaatatgccgatatttacacgagcaagcttgagaacttcttatcatatgcccctgaatcttggcttcatccacctcatgacataaagatcatgccacacaatgcgaaggtcccagcgagccttttcagtacctcctagttcatcctttctctatttcggtggagaaccaagccgtagtacccccacctatggtttctgtgcgtgaccacgtgacaggattgtggactgctgctgcattcgcttgcgttatactataactgaagcaccatatgatgcatcaatccagcagaccagcaagttagcattctctagaattgccatggaattatcagtcatgtgagtagttaaccgactcatttgcctgtatgacgaagcctctgttttccgtttaaaataaaaaaaggaagcatctgagaggccgcatacttgtgttcccatgaaaccctaccaacctgtaatggccgccaataaaacagtcacacgcaacccatctcgtttccccattttattcgcattctgctacactctttgctgcactcatgttacactgaactcgcctggtggcatctgacaagttttttgggatgagcagaagataatttgggttcgggcaacggataaattataaaatgcttatttgtccttgtctggaacaggaaggctatcttcaattctattgtttatggtcctagagactggatggagttccagttcttgctttgcatgaatgtggagatctggaatgtcaagaataatggcaattagtgcactcatatgaacacagaaaacataatattctgattcttcactgacgaagattttgttaaaaacta

SEQ ID NO: 33167 - DNA, 3732 bp, Zea Mays
cggtaaataaaaagagatgggatttgagggccccaaaacttccctccccaaatcccccaaaccccatcaccattgtcaccattgctcgccgaaccctagagagggcgcgggggcggataccttagctagccatggtcatcgccgttgagggcaacggcttcgtccacgacgacgaggaggacgacggagaccgccccatccgctaccttcccctcggccatatctactcctcttccacccccgcccccgcaccgcgcccgccggcccagaagaagccccgcttcgacgacggcagaccccccatgaaagtatattaccgccgccgtcgcaagaagctgcgggtcgatgaatcgctgtcgccgccctcgccaacgacggccccactcgcgccgcccgagagggacgagaaggctgggccctcgcgccggaaagactccctcaagcacgagctgctcagcctgggccccgcctcacctgcattggatggggaggagccggaacggcgtctaggacgaacgaggcgctgcggaggggctgaaaagacggtttgcttctcagaacctgagaggcggcggcagccggccaggcccaaggggtcggtcgggaggagatgggtcgagttggatattcagactgcggatcctaatgcctttgtcggattggtgtgcaaggttttctggccgctggatgatgattggtacaagggctccatcgcatggtacaatgaggcaaccaagaagcattcagtaaagtatgatgatggtgaagcagaggaccttagccttgcagatgaaaggataaagtttttcatctcctctgaagagatgaagtctttgaatctgaaacttggaatttccaatcaggataagaaggggcatgatgagttgcttgcacttgctgttagctttcatgactatcagggtctcgacccaggtgaccttgtgtgggcaaaaattacaggtcatgcaatgtggccggcggttgtggtggatgagtcaaatgtacctgcaactcgagctttgaagtcaattcggttggaccaatcaatattggtccaattctttggcactcacgattttgcaaggattaaattgaagcaagctgtgccgtttctgaatggtcttgtttcttctttgcatctcaaatgcaagcaagcaagtttcagtcggagcttagaagaagcaaaagaatttctccacacacagcagcttcctgaaattatgttgcagcttcggaaatctgttcaacatgatgtctctgatgttaattcctatgagggcaaggtagactcttgcagtaatttatcagaagctctagcattgcaaaatggagaggatgctgagatgactcaaatagaactagggaaccttcgtgtgagcaatttaggtaggatagtatctgactctgaccatttccataacaaaaaggatatatggcctgaaggatatactgctttcagaaagtacatgtcaatagaagacccacatgcagtaacattgtacaaaatggaagtacttaggaactctgatacaaaagcacgcccgttgtttagggtgatctcagaagacggggtgcagattgatggatctaccccaaatgcgtgctggaaagagatataccgcagaataaaggaaaaacagtgcactgaattggaaagaaacgtatgccaaagttctggttcctacatgtttggcttttcaaatccgcagataagacaacttattcaggaactgcccaatgcaaggtcatgtttgaaatattttgagaatggtggggacactatcctgggttatagagcggttcaggttaattggaaagatctggactattgcaatgtttgtgatatggatgaggagtatgaagacaacttattcttgcaatgtgacaagtgtcgtatgatggttcatgctagatgttatggtgaacttaaacaattggatggaggactttggctttgcaacttgtgtcgaccaggtgcacctcgtgtgtctccaaaatgctgtctatgtccagtcacaggtggtgcaatgaaacctacaacagatggccgttgggctcatctcgcatgtgctatatggatccctgaaacatgcttaaaggatgtaaagagaatggaacctattgatggactgagcagaatcaacaaggaccgttggaaacttgtatgcagcatttgcggagtttcatatggagtttgtatacagtgttctcatcctacctgtcgtgttgcgtatcaccctctttgtgcacgtgctgctgacctttgcattgagcttgaaaatgatgacaaaatccatcacatgtatcttgatgaagacgaggatccttgtattcgtttactctcgtactgcaaaaagcatagacagccttctgctgctgaacgtccatctttagaaagtgatcctcctgaacccattcaggtagttcagacagatatggcttcatcatctggttgtgcaaggaccgaaccctataatttacacaggagaaggggccaaaagcagccacaagttgtcgctactgcttctctgaaacgtttatatgtggagaatagacctcatattgtcagtggctactgccaaaacagagtaggcaatacatgcggagaatcaattcaaccgtttggtttgtcagatgctgtgcagcaagaagctattggcaatgtgtcttctatggttgaaaaatatacaatcgtgaaggctacatttaggaagagactaacttttggaaaatcaaaaattcatggatatggtgtctttgccaaggttgcacacaaggccggagatatgatggttgaatacataggggagattgttagaccaccgatatcagacactagagagcggcgaatttacaactcactagtgggtgctgggacatatatgttcaggatagatgatgaacgtgttatagatgccactcgggttggaagtatagcccgtctgatcaatcactcatgcgagcctaattgctattcacgtgccataactattcttggagatgaacacatcatcatttttgcgaaacgggacatagatccatgggaagagctgacatatgattataggtttttttcaagtgatcaacgacttccatgtttttgtggattccccaaatgccgtggagtagttaatgatgttgaggcagaggaacagtcggctaaaatcagagttaagagaagtgaattatttgaaaaaagtgaaaagtaaagggtatacgtatgaatcgggatgtgggctctaaagaaatgaacacgatgataaatacaaacttagcgtttgaccatggcaattggtgaaaaaagagtggtacatcatattggttgggatatgacatgcttgtgtgatatgcttgccagtgcctaaaggcaaattctaaaaaatggatcggcaatccaatttggggacataagttgaatcaattgtcgtgtaccattgaaatgttagttgttacacatatttcggccatttgagatggcctgccatgtgtaatgtaatcgaagtacatggttgcacttttcggtgttgcccatatattatccataacaatatgtagtttcagctgttctgcatttacgaaaatgcattggaagagaaacgtccacttcaactgaatgtattctacgaaatctttatttatgggtatccgtctgttgtgcattctaacctttgtgaatatagagcgtgtatcttatactccttaagtttcaatttacaatttgtttgacttgac

SEQ ID NO: 33168 - DNA, 541 bp, Zea Mays
ctgcggacctaacgcgcgagcacgaagccctagtttgcgccgccgccgccgatacatccggcctctcctcgcccgccggccgcgatgtacaacggcatcgggctgcagaccgcgcgggggtcgggcaccaacgggtacgcgcagagcaacaagttcctcgtcaagccccgctccacatccggctggggtccgggcggacgccacaggccgctgcccctcgaagccgccggcgcggatggcggcgggatgcgcaagcccaacaaggagatcctcgagcacgaccgcaagcggcaagtcgaggtcaagctgctcgtgctcagggacgcgctcgaggagcacggctacaccgaagacgagatcgaggagcgcgtcgcggaggcgcgcaaggccgcggaggcagaggcggccgtggccgcggaggaggcagggagcggtcgtggcgccgggcgaccgcctctgcccggcagggagcggtcgtggcgccggtcgaccgcctctgcccgggagaggacctagatatagtcgattatctatccatgcc

SEQ ID NO: 33169 - DNA, 456 bp, Zea Mays
tcctcaggttgttacgaggctacgtgcagatctcgcccttcaccccttgtcggatttcgccccatctggagatctccctgggaataaaacctgatgcatcatctcctcccgtctccctccatccatatggctcaagcacgagcgccacaccatcatagactgccacgcaaaccgagagggcagagtctgttgccatggccacatgaacaaagagagagagagaaaggaacatagagagagcagagagtacatcagggcatggagaacatgtatacggtgtcgagggtgccagggtcgaccgggacgccagtgaattcctcgtcggatttcaacagtcgtcaccaagccgcctcgcacgtggtcacgagtcttcgtgtagtaatctccggtaagaatactcctagttaatctttgacgccatcctcgttgtgtagaaccctctcggtgggtggtcgg

SEQ ID NO: 33170 - DNA, 1533 bp, Zea Mays
gcttttctctctctctctctctctctctctctctctctgcgccaacaaattctccagccttacagtagattttggtggccatttggtacaggcgtcggactcccaggaggatgaccggtggcaagaggttcggcggcgggcgggtgccgacggggaccccgtccctcgcgtggtcgtccgtcgtcatcgtcgcctccctcctcgttggcgcctccatcgtccacaacatctacaagcctgacatgaccattccacctgtggagggtgccgccggcggcggcggccaagaaagctgagctacgaatggctggacactgcatgcaagagaggaggctgggcatgggagtagtgagggaccggccatcagcacctttttttttttgttctagaacaaaaacgatattatgttgttcttttctgttttgctaccaaaagatgtgaggctgcatagtatttgcttcgttaggcgctactggtcacgcgtaaccatggtatatgtacgttgattttgttttttctaatgcctaataatcactacactcaaaatgtacgggcttgtggtggcactgcggcgggaggtggttggttggttccacttccatccaggctgctccgtggatgcgacggtgattcacgagcggatacgcaagtgtagctgtggcctgcacttggggccggattgtgacccattatcaggcttaggcctgcgtgcggggtcgtttgccgttgtgtacacatggaagaacggggcaccaagtcttgcttccattgccgccgccccttccgtgcacgcgcgcacggcgcacctatacatatgcaccgccccatgccccgcacgccctccctctcccagcgacaccagagagccgaatttacttcgttctcagcctccgttgcccctcgcgcgcgttacgctgtaccaccaggctcgatcggtcgatcctttgctgggcgtcagagaagcatggcagcagctggcaagtcgtcggccatggaggaggtggtggcggcggcggattgactggcaggccgttgacaggggcatcgcctacctgctcatggtggccacgtacgcgcttcactagagccgtcttggcttcggtctgctccggccggcggcagagatcacgggaaggaaggctttgtgagctctgcttcccggcctcagcgtgagagttcccccgcgccaaacttcattcgtttctcttccactcttcctcttgtatggagatggagatggagatatgcctgtgtctttaccactagaaaaaaatgttgttttttctattgtctttctgtgattattctgtgcaaaatggtcaattgttgccaaaacgatcaatgttaccatggtttcggcttgcgtctatcttctgttgtgattgggttcgacattcagagtttgcacaaggccatacatagcatacatatatggcagagtttgcagcgtgaggaaaactgtcatcgccgtgtattttagcattatacataacataccccatccgttcattccaataggcatataagctacca

SEQ ID NO: 33171 - DNA, 2228 bp, Zea Mays
gtcccgtactcgtccaaattctcctcgtctcgtctcccatgtgacccatccaaccgccctctcctctcttcctcttcctcgcaccacctccaccaccaccctcctctcttctcgcctccaccaccaaaaggggtgagaggcacggggaccgcccgcctcgctcgctggcctgcacactggattcggcgccgcggcggtagttgcagcggcggcctggcagggagatgtcttcacgctcggggtctacgagcggcgggagcaccggtggcggcagcagcgcagggggaggcgccgcggtgccgctggccttgctgctgaggcgggaggtggccagcgagcgcaccgcatcggagcgaccggagctgcactcgggcctcttcagccaggccaagaaaggcgaggacttcacattcctcaagctcgaatgcgagcgcgtccccggcgtcccgtcctcctccttctccgccttcggcctgtttgatgggcacaatgggaacggggccgcaatttacaccaaagagaatctcttgaacaacatcttgaacgcggtccctgctgatctcaacagggaagactggcttgctgcactcccaagagcgctggttgctgcattcgttaaaacggataaagatttccagactaaagcacgttcttcagggacaaccgtgacatttgtcataatagatggattgttcatcactgttgcatcagttggcgattcccgttgtgtactacaagctgaaggttcaatttaccatttatcctctgatcatcgatttgatgcaagtaaagaggaggttgatcgtgtaacaaaatgtggaggtgatgttggaaggctaaatgttgttggtggcgctgagattggtcctcttaggtgttggcctggaggtttgtgcctatctaggtcaataggagatcaagatgttggtgaatttattgttccagttcctcttgtgaagcaagtaaagctgtctactgcgggaggccgacttattattgcaagtgatggtgtttgggatgcattatctccagaagtagcttttaactgttcacgtgaacttcctccagtgcctgcagctgagcaaatcgttaaaactgctgtgcaatcaaaaggactgagggatgataccacctgtattgttgttgatataatagcagagaaaaccaacccttccatgccacttcctagaaggcaaccgggaattggtgtcttcaaaaatatgtttggcaagaaaaaatcatcggattcatcatcacattcccatgcagatagagaatatatggatccagatatcttggaggaaatatttgaggatgggtgtgcgcttctttctagacggctggattctgaataccctgttcgaaatatgttcaaactcttcatatgtgccgtttgtcaaatagagttaaagccaaaccaagggatatctgtacatgaagattcatcagaacctgggagcttgcgtcgctgggatggtccattcctttgccagagctgtcaggaaaagaaagaagcaatggagggaaagcgtcgttcacgaggttcatcaagaaacagtgggtcaagtgaatagctgccgtgtgtagagtgatcagaggtggctgctgcttatagctctcatcccaagcgaggagcatgtcttgtcctcagcaaggttcttgctgaggaatgtaggcagctctgctcagcccttgaccttgatggcacatacaggtttaaagattaacatgccaaaatgatatggcttgtctattctaaggtcaactgttgcaacacaaattactcttggtatagacttctgacaaatagcttggcactgtttctgaattaggcctaggtgcttacatcaattttctcttgttgaatccggctttaattcatgactagagactttagagtattatcagtccttgttgaggttcagcctttgctgacaccaatgtaattaacatctaaaaatattctttgaatcagcttgtgattcatcagcaagacgttagttgtcatgtacaatgtacaaaatcttgctaacaggacaggtgtactgatcctttttgtatatcttattttattttttcttagtaatgtatagtagtcctgagtatgaaatttgtttctgcatgggagattccccagccaaaagtatgctgtaatatgttgtccgtagttcagtcgaaaaaatactccatatgcagaatgatgccaagatgtctgttccttgcgtttg

SEQ ID NO: 33172 - DNA, 1627 bp, Zea Mays
tataaattcatacatttctacggtttttatttatatttaaacataaaatataaatcataaaaacatacgcattatgttgactagatggtagatgtatgtttgaagccgataactatagtttaaatttctatttgtaataacttttagtttttttaccgtttaagcgacgacatgcgttcagaaagccatcgtccttacagacgagacacgagaggcaggagccagcgaccggcaacagttttctcggaaggcagcctcttcctcgtcgccgccgacgtcacccgccgcggctgtcggggatgccggtcagggtggtcgataccgccacgccttcctcgcagccctccccagggcaagaagcaaatactggacacccatctcctcctagatgttcactcttaagtgctggaagatcttttgctggaactcagaatgtttcaagtctgcagaaggatgaagcatggaaagtgaatgtccgcatccatggttgcgatcttgaacagggttatctatgtggaacgatggaagcgcttaatgttccattagcagatacacctgtagtgacattctgggagggggagatagtggatgctaaaaattacacctttttcactggcaagtgggaggcatcaccagaggatgatataagacattggtccaagttcccatcatttatgcctcttctgagtcagattgagacagacggtggcaagtctctggactttagcaactatccttacatatttatgtattttgtcaatgttggagttgactgtgggttaaccatcgctggtttctactacgtctgcttttcttgtagcgatggctccatcagtggattttattatgatccaaatagcagtccatttcagaagctcgaattgaagtgtaccaacgagaaaagttctggattcaccttttcatcctatgagctgcagtgacagggccagatgcatatagtgtgtactgaactcatactcgcctaatgctgctgtattgaaagaaacgagtggtggtttatgcaacacttcgttttctcgcaagagcaagaccaagcaaactgtcactttgtaatctgcagaagcatcttatcttttctaaaatgtacctttcgtattatggttgtgttcatggtatggtgcgtccaaattcagttggatagggaatgtgagggctagatgttgatccagagaaatgctatataccttttccacaattgttctctgccattggggatttctatttcaacatgtctatgatatacacattgaacgggtctgacgtagtggtgagagccgcctctccatatttacgggagaaaatgcttttgcctcggtttatccaccccacagccttcagcactaggtctattcttttacgatatacacattgtgtttggctcctagttacatgcatcgtgaatacatggtctttactgaagagaaacttcatcaagattgcctattgctttctctcactcaaatctcaggtacaaagccgtggagacctttgccttcagcttcctgacatcgttaggtaaatgaactctaccgacgtagtttcataatgtctcgatctcttgcttcaagctgctctgtcaattctctaaggaataaaacacatctgc

SEQ ID NO: 33173 - DNA, 1842 bp, Zea Mays
cacctcgagcacccgcacttcgtcgaggtgccgctggcctcgccggaggggctctatctcagagtcgatggtttcaggagctacaagaacgggttcgtgtggcacgacctttcggaggacgacctcgtcctcccggcaaccgacggcgagtacgtgctcaagggctccgagctcgtggaccaatccccttcgggtccattttaccctgtcactgtcagcaacggcaaccagaagcaacagagcaggccgaaagagggcgcgcggcagccactgccaagagaccaatccgacccatcctccccgcctagcgtgacagtcagagaagccaaggcccggcggtcaccgtccgtgccttcgcaagacgaggaggatgacaccccgtctccgtgcagggatcgctccatgtcacagccacaggagctggagccccagcggaacgagaggaggacgcaaccgccagcgagcgggtctgcgagcccagtggagctcagagctcacaggcccaccaccggctgcacggacgccgcaacccagaccgacgatctcggcagaaggccggcgggccgcagggcgctcgagctgccgcgcaagaagagtctgagcacggaccacgacgccgtcgtccgtgagatcgcagagtaccggcagagccaccctcgccggtcggcagacctccacgggatctcccgggagctcctgcgccagtgcatcactactccgctgaccgtaccctcgacctgcgccaagtccgagagcctagagtcgctgatacgcgcggacaacgtgatgacggacagcttcaggatcctcgaagaggaggacgtcgtcgcgcgcacctgccccaagctgaggccggcgagcgtgctgatgcagctcgtcacctgtggctcgctctcggtgaagggtcacggggacgctggggtcgttcggacgtgcaagccgaggttccccaacctcaggttcctcccctcgccgctgatctcgcgcaccatgatgatgggcgagctcgactacctgtcggaaaaccccaggttgatggggatgaagctggaggagaaggagtacttcagcgggagccttgttgagaccaagaagacgcaaagagatggtccggctgagaggtattcggcgcttaaacggtcttcttcctacaatgcagaaagggccggcgaggctctggactgcacaagacgcgaagaggataaagccgacgacgtgtcgtcgcgcacgaggtgcctcccgcggacgccgatcctgtcatccttcctgcacccgaagggcgactcgctcaggtctcccgtctcggactgccggcggagctcctcggcccggcgggactacgacgcggcctccggggacgggagcaggaggttcgccgacgcctccgtcgcgtccgcgaccacaggggccgagtcgttcaggaaggaggagaaactcgtcaagatcgaggaaagttaagtgccgcccgtggcctttctttacctgaacctactgtgaactctttgtcagtgctcggctgtcgtccggagcccgtgtcgtgatccactacaccgtcccttgcaacgacagcgacgaaggctctgaacgctcggaggagtgacactgctgttcagctagacgacccattttttcttcccgttttttttttcactttctcccttagaaacattaggcccccttatcattgtataagtgcctgttataatgtatcattcatgtgtttcacttaaaaagatgtctcatgagactgcatggtagagtgtgtaaaatagaggacaagaaacggtttgtagaaacaagtttgaaatatgggatgaaatagaagatctggccatatgtgca

SEQ ID NO: 33174 - DNA, 2577 bp, Zea Mays
ccaccacgggcacgtggcgcagcagagctcgaccgctataagggctcctcgtcagcctcagctcgtccatcctccaccagcaggcaccaggcagctgtcggccccggggccgccttcgttttctggtctcctctccaccaacacggcgcgcgcggagctcccatgacgacgacgagcacccacctggatctcgaggctgcgcggcgcggaggcggcggcggcggtggcggtggcagcagcagcccgcccggatacgagcaggcggaggctggcaacgaccttcgcaaagatctagcccttgcttacaagaccctcggcgttgtgtttggtggcctcgtcacgtctcccctctacgtttatccgtcaatgaacttgtcatctcccacgaaagatgactacatggggttatacagcataatgttttggactcttactttgattggtgtggtcaagtatgtaggcatagcactcaacgccgacgatcatggtgaagggggtacatttgccatgtactctttgctgtgtaggcatgctgatataggcatacttccttccaaaaaggtttatttggaagaggagccactgcttcgaaatcagtctgcagcagctagaaggcctagctggctggggaaattctttgagcgaagcataacagccagaagagcgctgctgttcatgtcaatactgggaatgtgcatgctcattggggatggcatactcactcctgccatttcagttttatcagcgatccaagggttgagagggccatttccatccgtcaggaattctgtagtggaagctctgtctgccgtgatccttatcggcttgttcttgctgcaaaagtatgggacctcgaaagtgagcttcctgttctcaccgatcatggcggcgtggaccttcaccactccaatcatcggcctgtacagcatcgttcattactaccccggcatcttcaaagccatctcaccgcactatatcgtccgtttcttcctgagaaacaaaaaggaagggtggcgcatgctcggtggaactgttctatgcatcacgggcgctgaagccatgtttgcagaccttggccacttcagtaagaagggtattcagatagcatttctgtctagcatatacccttctctggtgctcacatacgctgggcaaacagcgtacctcatcaacaacgtcaacgacttcagtgacggattctacaagtttgttcctcgccctgtttactggcccatgttcatcatcgcgacgctggcggcgatcgtcgcaagccaatccttgatatccgcgacgttctcagtcatcaagcaatccgttgtcctggactacttcccgcgcgttaaggtggtgcacacgtcgcagcacaaggaaggggaggtttactccccagaaaccaattacatcctcatggtgctttgcgttagcgtcgtactaggcttcggagctgggaatgcgatcgggaacgcattcggtgttgtggtcatcatggtcatgctcataaccacagtcatgctcaccctggtgatgatcattatatggagaacgccgcctgttcttgtggcgctctacttcgtgcctttcgtcgtcatggaagggtcttatgtcagtgcagtcttcaccaagatccccgaaggcggctggctcccctttgcggtgtccatcatcctggcgatggtcatgttcggctggtactacggcaggcagcggaagacggagtacgagatagcgaacaaggtgaccgtggagcgcctcggcgagctcctggcgaagccggaggtccagagggtccccgggctgtgcttcttctacagcaacatccaggacgggctcacgcccatcgtcggccactacatcaagaacatgagctcgctgcacgcggtcacggtcttcgtcaccctccggtacctgctggtggccaaggtggacgagcgggagagggtcctcgtcgcgaggctgggaccggacggggtgtacggctgcactgtccagtacgggtacgcggacagcctcagcggcggcgacctcaccgcgcaggtcacgggctccctgcgccggcactttgggacggcggaggccggggcggaagaggccgcgcgcctggaggcggcgaggacgaacggcgtcgtgcacgttcggggtaagatgaggttctacgtgggcgaggacgccgggtggttcgacaaggtcatgctcgggttctacgagttcctgcacggcatctgtcgctccgcgctgccggcgctggggacgccgctgcaacagcgagtcgagatcggcatgctgtacaaggtttgatcgatcaaggttatcaaatgcgcacataaccaatatacgcaacatcaaaataagtcaatgagtatacccgtggcgtgtcatagtgtgattgtgttcaagaaattcacatgcatgaacagaacctagtaaaaagctgcgaatgaagctgcacaaattttgttttgccggtttgtatggcatgacatggttactggcaaggacctttgtttcactttttcagttctgcagcagtgcttttcggttgccttattcaaaatagaacagttcgcatgcaaaaaggtg

SEQ ID NO: 33175 - DNA, 2830 bp, Zea Mays
acgaggagggagcccttgaaggcaaaccaatgcgcaccgccgcttattcattaaccaaagacttgcatccaaccaatcccaccacttgtgtctacctcttcgagtcaggctgatgggaggtgcctgtcagcaactctccgtggacggagatgcgaggacgcctgcgaatgaccgcgatccggccggcctgctccagcatgatgatacggaaaaccagcagcagcagcaggcctgctgggagcgcttcctcctcaaggagactctcaacgtcttgcttgtggagagtgatgattcaaccaggcaggtcgtcagtgccctgcttcgttgctgcatgtaccaagttatctctgccgaaaatggccagcaagcatgggcttatcttgaagataagagaaacaacatagatcttgttttgactgaggtttttatgcccggtgtatctggtatttctctgctgagtagaatcatgagccacaatatttgcaagaacattccagtgattatgatgtcttcgagtgatgctatgagtacagtctttaaatgtttgtcaaaaggtgctgttgactttttagtcaagcctatacgtaagaatgaacttaagaacctttggcagcatgtgtggagacaacggtgtcacagtaactcatggactaagcttgctgtggagatcgacagtccacaagctatgtctctggaccagttagccgatccagccaatagcacctgtgcacaagtaatccactcaaagtcagagatatgtagccacagatggctaccaggtagcagcaacagaaactgcaagaagcaaaaatacactaatgatgactttaagggaaaagacttggagatagatggtcctggaaatctatatatggatcaccaatcttccccaaatgagagacccatcaaagcagcagatcatgaaaacaattccaaggagtcaatgatgggaaatttaggggatgcaactgttcgagctgctgacctaattggttcaatggccaaaaacatggatgcccaacaggcagcaagagctgcagatacccctaatttctcttctgaagtgccagaagggaaaggtaagaatgatgactttaagggaaaggacttggagataggtggccctagaaatttatatatggatcaccaatcttccccaaatgagagacccatcaaagcagcagatcatgaaaacaactccaaggagtcaatgatagaaaatttagaggagccaactgttcgagctgctgacctaattggttcaatggccaaaaacatggatacccaacaggcagcaagagctgcagaagatacccctaatttctcttccaaagtgccagaagggaaaggtaagaatgaccagcatgataattatgttttgccatcacttgagctgagtttgaagaggtcgagatcatgtggagatggtgccaacgatacagtcaatgacgatgaacagcggaatagtgcattaaggcgatcgaatctctcggcttttacaaggtaccatacatctgcggcttccaatcaaggtgggacaggattggtaggtagctgttcgccgcatgataacagctcggaggctgtgaaaacggattctacttacaacatgaagtcaaattcagatgctgccgcaataaaacaaggctccaacggcagtagcaataacaatgacatgggttccactacaaaggatgttgtgacaaaacccagcacaaataacgagagggtgatgttgccctctgctattaaggctaatggatacacgtcaacattccatcctgtgcagcagtggatggttccagataatgcgacagcagggaaagcgaaggctgatgaagtggccaacaatgcaggcagaaatagtcatcctggtgacgtgcagagcaacctgacgcaacaacatcgtccaacccttcattacgtccattttgagaatagtggatcaggtgccctgcaatgtggttcctccaatgtatttgatcccccacttgaaggccaggctaccaataactatggtgtgaaagccgggagcaactcaggcagcaacaaggggcagaataatgggagtacagctggtgcgagcacggctgctgcaaatgctggacggacagatacagagatacgggctatcgataaaagtggacctggaggtggcagtgggagtggcaatgacacatatgtcagacggcttgctgcgagcatgacaccacgacaagaacagctaaagaaatatagagagaaaaagaaagatcggaactttgggaaaaaggtgcggtaccagagcagaaagaggctagccgaccagcggccaagggttcgtggacagttcgtgaagcaagctgtgcaaaatcaagagggagatggagagagatgacccccccccccctctggcttcagctcatggttgttagacgtggcggttgatgattcttccttctctggtgtgatctgatatgatcgacaacacaccatccttccttttcttcattggtttcttcacatctagaatttactgcctgaccgggaaaaaataagctaggaacttctatacatgtgtatgcatttctaatcatgtagaagaataagtgtgtcttgactctagataattttaggtagagtcatgctcgctctcctacattatgtgatgtaactgaagtgttgttgtgttgtcatgtatggtcttggatcactttctgtcaatatattactagcccacaactactattaatttgatgagatgtatataattaaaaatattgtaatagtccttcctttggtaggtagacaacaaacaatcttgaattcagtgcatacataaatcactgta

SEQ ID NO: 33176 - DNA, 840 bp, Zea Mays
tacttagtggataatactatatacaatggtgaaggaattagttcgggaatataccaaggaaataaaatggcgtgatgaggattatgtccccaaaacattgaaagaacacctaaaagtttcactcataagcattggaggtacactggtgctgtgttccgcgtttgttggaatgggtgatgtagtaacaaagaagatcatggaatgggttatgagtgatgctgaacttgttaagtcttttggtatatttgtacggctctccaatgatattgtatcaaccaagcgtgaacaaagagagaagcattgtgtctccactgttcagtgttacatgaagcagcatgaactaacaatggatgaagcatgtgagcagataaaagaacttacagaagattcatggaagttcatgattgaacaaggccttgcactaaaagaatacccgataattgtgccacgaaccgtactagagtttgcacgaactgtagactacatgtacaaggaagctgataagtacactgtctcccatacaatcaaagacatgttaacatcgctttatgtgaagccggtactcatgtgaaggttctttattgttatcttggatcaagagaatatcaacatgaagcactacttcaaggaggccaaaataactacatgagctatatatattgtacaccttaagtaatatcaagggatatggtgatatatatgtattactcaaagaaaaatgtcaacaaccatcctatagttgttgttctcgggcattgtagtaaaatacatatcttgccatatgttgcattgtgctatgtttccttcagctaaaataaagaaaattttctctttaataga

SEQ ID NO: 33177 - DNA, 1452 bp, Zea Mays
cgacggacgagatttaccaacagccaaccagggaagatgtttatgccacgtcatgtcgcgccaaagcttgtcaaatacagcggtcccacatcagtacgtcaccaatcgaactgaatggaccagtcgacgtcatcgcctccctcgcctatccgctcggccgttggcgctcaccaaaaccacccagaagcctccgcttgaccgcttcactcgctttccgcccgccgcgccatgagcgccgccgcctgcctgttcgctgccgccgtctccctatcattcccgtcgacctccgcaccctcttccgcaagacgccgccgcctccggagccccaccaccctcctccgctgctccccgactcgccgccgtgggccggtccggcggacactcgacgagcggctgctcgaggccgcgccggcggagaccgaagacgtccaaaccgctgttgatgtagaggatggaggagggatcgctgagggcgatgaagtgggaacagaggagatggaggagctggagcagcgaccgccgacgagggctttcgtgaagagcaggcggcagcggcaggaagaggaggaagccgcggcggggcaagaccggttcaagctcatcaatggcaaagagatatttcaagagaaggcttatctggttggtgttgagtgcaaacggacaggagggaacctgttcggcatagaggagtcccttaaggagctggagcagttggctgatacggcgggccttctggtagtcggctcaacctatcagaagtaagcttctgtttgacgggaacatctcgactgagcctgcactgtgctctactagcaatcgtggttacacgttctcaccatagataagatgggacaccacggaaaaactgagatgcctggtcaatctaattcgtggtccacagaaacttcacgggcaacttggatagatgaaatgatactgttagttcagattttcaaaatgtactctgcagctgttagggcctaagaaggcccacggaggactgcagcagcagcaacgatgggccctcgaaggggattagataaggatagttagaaataagattagaagtttggttgagattatttagaagattagttgagattatctaggaaggtttcttggatagatgaaatgctactgttagttcagtttttcaaaatgtactctgcagctgttagggcctaaggaggcccacggaggggctgcggcagcagcaaccatgggccctccaaggggattagataaagatagttagagataagattagaagtttggttaagattatttaggagattagttgagattatctaggaagtttatcagttagtagtttgttgagagtttttagaagagttttaaggagatagaatctctagctagataggggcggctagccggcctatttatgtaatcaatgaatgagaaataaaacagacaagaattagaagggag

SEQ ID NO: 33178 - DNA, 781 bp, Zea Mays
gcaacgcaacgccgtggtccaactataaaacccgcggcgtcatccatccccattgcagcttcagagttcctgactcctcgttcgttctgcgtttcgcgactgagatagccaaccctgcgactgcgtgcgtgcgggcgagcgagcaggcagaatggagcgccacgcccagaagcaggcgccgctagtcctcgcgctgtcctgcctcctcccctggggggccagcagcagcacccgccggctctgaagctcacttcttctcaggaggcggcgatcgcggcggcgatgaacatgggcaggccgacggcgagggtggccgtggaggtgaacgactaccaaccgtccggccccaacaaccgccacgacccacccaagggcccctgaagagcttgttgaacggcgctcggctggacgtggacgacccaataatgcttctccttcgttgttgtcatctttaccagcagtatatatagagtgctttgctagtgctcttgtattctaccccaccagtagagattaaggatttaaggtagacacaaagttacctagttatatttgtacactggccgataggaacttggaagcacatcggtagtttgtgttgttcttaggttgccgttcgtcagaactgcatgcagatcgatttcatctcctgctgcagctgcaggtgtcgatacagcacctgcagcagatcgagattgttcagcttaattattctgttcctccgatcttgtcactgatgacacatatatcatgtccatgggcaaaggcactatagctcgag

SEQ ID NO: 33179 - DNA, 4398 bp, Zea Mays
accacggcatccaccattccagctccaggccaggagaaaacgttccgggactgggactgcgttcaccttgctttttcttcccacgctcaccccgcaccgcgtgccctctctggctctctccctctcgtggggacgactgggcgaccgccgccgccgccgccttacgccaggtgcccaggtcttagtcggccccttcgccggcgacgaggacctaccagctgtgaataaggttgtctggaacggccgtgggctctgcggatggcaggttctgtggtaacggatgattcagctgctagcacaactggaatgagggatgatgaaaacagtctctctggcgagtccttctctgagtggaggtcctgtgatagggcagacagcgataccccttcaacatccccacccttctgggatagcgatggtgatgatgatgatcctggcagagtgtggcatctgccagctggtgtgaaggaggatgagaaggtgcaggtggagacgtggaagaagggggatggtggtgatggcccaaagccttcagaattgtttggacatcacacttggaggattgaaaacttctcaaaggagaagaaaagagaaatgaaaagtgagccatttgaagctggtggttacaaatggtatattcttgtataccctcaaggatgtgatgtctctaatcatctttcattattcctttgcgttgctaatcatgacaaacttctcccaggatggagtcattttgcacagttcactatagctgtagccaatatagatcctaaaaagatgaagtactcaggtgagctgaacttggtttgttttcttcttggaaggttttggaagaaggaacatgattggggatggaaaaagtttatggagctgtcaaagattcaggatggttttcttgttgacgatgttcttgaaatcatagctcaagttcaggtcatcagggagaaagtggatagaccttttcgttgccttgatcgtccttatcggagagaattaatccgcatctatatgacaaatgtggaacaaatctaccgacgtttcgttgaggagcgaagaagtaaattaagcaagctcattgaggacaaaatgaaatggtccagtttccgtgctttctggtcagcaattgacccaaacaccaggcatcacatgtccagggaaaagactgagactatattgaaaattttagtgaagcaattctttgtagagaaagaagttacttccacattagtgatggactctttgtatacaagtctgaaggcacttgaataccggatgaagagcaagaaatgcaaaacaaaattagcagatttggaagaactacctgcgcctatggtccatgttgacatggacatgtttgttttggctgatgatgttatagctttgcttgagagggcagccttagaacccttgccttgtcaacctgtagcccccaaggatgacaaaacttcccaaagccgcatgaaggatggaagttctggcgaggtttacaaagtttctatggagcgtgaggaaagacgcctaactgagcttgctcagaagatactagagacatttgtgctatctcatatatttagcggaattgaagttgcataccaagaagctgttgctttgaaaaggcaagaagagcttattcgtgaagaggaggaggaggctggacttcttgaacatcagatgaaggggaagcgtggtggtggtgcaaatgaaaaggacaagcgtgccaagaaaaagcagaccaagcaaaagaagaacaaccgtaaggctaaagacaaggaaagagatgtgaaatgtgaggttaaaattctggaaaggcttcatgatgaaactgttattgataacagtgatggcttaccagctaaggtggaagtgatagccaaggttgatgccttggaagaaggttcttcagatgggtcagacatgccaaatagaggaaaaaatcagtgtaacaagggcttaagcattagtcttgccaaagaaggtgatggtcttccctccacctctagtgttacaggtggttcaggccgcaatagttctggctgctgcacagctccaaaactggatcaggatactgttctgcttaccttgagagataaacttcgtaagctagggcagcgtctgcaagagaaaaacattgaggggcagaaacttctcaaagctcattttgaagctagggacacaaaagtgaaggtagaagaatcttctgactcatctaattctttggataggccacctgatgttccagagagctcgatgcattcttcagaagatacagttgatcttaaagttaatggaacaccaaataaggatgcctctgtggtcaaccctgtcctggaggaatctgtttcaggcataccagtcactgcaaagaatgaatccttgccttctgccagaacaaaagaaggcccagtttcaaacaaagataacgcatcaagtttgaaaatgaaaaccatggcatcttgcttgaaattgcatccagctgatgtggataaagatgccccttttccttctaaatcaccacgaatcaatagggctgctccagttccctcgaagttaccttcggctgataaagctactccagttcttccaaaatcatctctgtcagtaaacaaagcagctctggtccgtcccaaatctccagcagttgacaaagcaactccagtttgtcctgaatctccagcagttgacaaagtaactccagttcgtcccagatctccagcagttgacaaagcaactccagttcgttctcaatctccagcagttgacaaagctactcatgtttgccctcaatctccatcagttgacaaggcaactccatccattgacaaagcaactccagttcgcccaaaatctccagccatagataaagtaactccaattcctcccaaatctccaccagttgacaaagcctctccagcaccaccaaaatcactatcaggtgctaaagatgtgcctgttccttcaaggtcgctgcaaattgataggttcattccagcccccccaagattatcgcaagttgataaagctgctctgccttcttcagaacagccacatatatctccagctactaattctgaagcccaaggggcaactacttctaggaaggtcacagccagctcagttttggaggttgctgcagcatcgaggccttcaagtgctcctgtgttacccacaccaagatcaactgcaccagttgcttcacatattcaaacttccacgttgctttcccgctcgatgagtgaggcagctgggagaaggtcagtaaatgatccttccttttctgccccatcttatactccccagacctaccgaaatgcaataattggtaagactggtctggctactacctctgcaaaccttgcatatcagtcctattctctgggtcaagatactgctccttcacagcctctatcagcatatgcatcaagcacagcagtcatgatgcctcctgctggaagatctgatcaatcatcagctaggcatggattcaagtctgggtctggtaagctagaagcacatgacagctggcagcagtggaaaggtgataataatgttgatatgcatctctggagggatcacactacctatcaacaaatgaccaggggtcaagcgtatgaccaatctcggagggacgatacttatcagcaaacatgcagcagaggaacagaaaagttcagcaggcacgcaggactgcaagctaggcagttccaaaccgagacacccgccagccatgtctggcaccaacaacaggggcaagtggcagaagagtttccacaccttgacatcataaacgatttgcttgaggaggaccagatcaacggcagtataccagagtcatttcatcaagattacaatgtgtttggcctgccattttcaccaagaggaaacgtgtcagatatgggaatggcttctgttagaagtcctgctcggttcaattcaaccaagtatgagtatgacggtggattctcgggggcttatgacataaatgcggtcaatgggttgagggaacggcagtttccctcgttggatagttactctaatggcctgtctgacgtgagtgcatcaaagccttggctgaatggctctcccagtccatcggtgatgagccttggggttaacacaaatggataccacccccaggttgcggactaccccagtctgggaaatggggtgaacggagtctccttgtggcgccgccatgctaacgggcgctggtaatgcgaggtgcctgtatacaatcatacagatggaataatgtttgttgtaacaaatggtttcgggcctgagctgatgtgccatgtaattaaaagttttaagttttaaaagggaaagaaagcgatacatgctgcaaaatctgccccgtgatttggttaatttgattgcttttctggttaaactctgttc

SEQ ID NO: 33180 - DNA, 1154 bp, Zea Mays
ctgcaaaagtatctaagttgattcttgctaaagccttttccttgattcctatttaaccagcaattcttgagagtcttttctttagtcgggtaagtcttgctgagtacttgcgtacttagggttttacccattgttgctgcaggtgatgagaacataacccgcacagatatgaccatgttaatgcctcctgctacaaagacattgaggaacaaagaagttgattggggaccaagtaatgatatttccaacatttccatcaaagcaagcacatcatcaaatttaaagatatacttgggtcaggagcacacactagagtcgaggacgactctattacaagaagtggaggatggtgaggacatcactgccatcaatacaccacacagtgacccccttcaccattaaaaaatggactagtgaaccgagtgtttgggaggtgaaccatctagaatttgagaaggcaacaaggcaataaaagctgctccacttgaggggatttcgaaactacaacaagtgcaagtttaagagggcatatctttcatcttccaaggttgtttaatgcaaataagcacttgttggaaaggtctctttgtctactttatagtagatcaagagtcaaggagagaacgcatccaaggcgtccgggaatggccgagacaacttcatgactccaccagcccgagtgatttcgtaactgcaagcactaaattaaatggagcatatctttcaactcccaaggttgtttaaagcaaataagcacttgttggaaaggtctcttagtctactttctagtggatgaagaatcaacgagagattagacactaagcgtccagaaagtgccgagtgaactcctgctctaccctagtcaatttcgtaactgcagcatgcaccaaattaaatgcagcataactttccactcccaaggttgtttagtacaaataactacttgttggaaagctctcttcgtctactttcaggtgcatcaagaatcaatgacagaaaccaaacgaggcgtccagaaactgccgagagagtttcattctccattagaactcctttctattcctctatttaagcaactagcaaccaccaaagaacttgggtttttgtttgatgtaagtttagcctttgctacttccttgtaaacgcgtgtgtcg

SEQ ID NO: 33181 - DNA, 1570 bp, Zea Mays
cgcgattccccaccccgcgcccgcagcccccccccccgtcctcccggccgcagccgagcacagccgccgcgcccacaaatcacgcgactcccgcttccatgtcctcgcgtcctccattgcagccgcatacatagcgtcgccccttccatcgatggcagccagccgcgcccgcaaatcacgcgactcccccttccatggcgtcgcccccttccatccatggcaggtccgcgcccctacgccccaaatcacgcggatggaaggggtcgcgagggagtctctctctggacgcgcccgtcgccgcctccaagctcaggagggagcggcgcccggcccccgcgagcgtgaacccggggccacaatgcttgaggcggaggaggggcctggcggttcgctgccagacggggtccaccgcagcgcccttcctcaggacggaggagccccccgcggctgcggcgggggcaaggaatgcccaggcggggttcaccttcgtcatgaagttcggcggctcgtcgctcgcgtcagccgagcggatgcgggaggtggccggcctcatccttagcttcctcgacgagatgcctgtcgccgtcctctccgccatggggaagaccaccaataacctcctcctaggaccttccatttctagctctcagcgcctgagtcagggccgaagagaaggcggtgagctgcggcggaggaggggcatctgaaatccctgagctcgctgtcatcagggagctacatcttaggacaattgatgagctcggtttagataagtcgattgtttcaggtacccaatcaaccagtcagtcaggcagagtggcaaaagctggggagcgatgcaggcgtcagagcagcaacaacggaggactctgccagtgtagatgagaaggaaacacgcaaagagcatcaaaagcaagttcaacgatcttatgtcaacccatccacctctgaatgaggcatattcagatgtgtgtgtattcagtttacagagctcaatatgttacatcgaccttcccaacccgccggcagagcttaagaagctcaagcacaagaagtgcctcgtccagtccccccaactccttcatggatgtcaagtgccaacgatgcttcagcatgtccaattcgcttgtggcataggaatctcatcctagattcaatagaggggctgcaatgccggcatcgccatagctggaaatcgagcactgacggacaccgggcgccgagatgggccgtcttgtccaccgccgcaagaaccgcatgcgttggagccatccttacacctgctcctacttccgcgccagcaacccaacacgccgacgacacgagctcctccttataaaagtgacatctttattgtatagataacgaatggttatagttatttattcttgtgtccaagtggtattggatttttttagcttggggttaaagaaaagacagtcatgtactttgcatcttttttgtatttatgttttatgctaaattgtggaataacactatattagttgttagcaaagaatttctgagatattaaggttgatgataatatatgttgttatttcatttaatc

SEQ ID NO: 33182 - DNA, 985 bp, Zea Mays
cccacgactcctctccccttctcctcaccatcttctagcaagacagttgtgctaaatgaaaaaacccctataccccgccagccgccatcccctccgaccaaaccctagccggccatggcgtggcgtggccccgcctcccgggccgtccttgccgccgtccgccgcccagccgcagcgcccgcggccgcacgcctccacgccccgcgacctttcgcggccccgcgccgccgcgtcccgtccgccttcgccacctcctcgctcccgtccgcgcggcctctggcggcgatgatggggtccccggtgacggtggccgcggtgatggcgcgtctcacggcgcaccccggtgccagcgcgcgggcgtgctgcgagctctcccaggggagtgggaaagatggttgatgctggaggctgcacaacttgatggggaccttccgtcctagcataatgtacttgaagctgctgtgtagatcccatccttttcgaaaggataaaaggtgtctttttttttgggggggggggggggggaaatgctattgtggcacttcttccactgcaaagttggaagaatttacccacccagcgatagccagttccctcgttaggatgttagaatatactggaataattttaatgttattcatggcacggtttgagcacatggatttaccttctcttccccttagagattcattgatgtcatgtttcagttggcatgagttaaatgattgtgttaccgtgctttgggcgttagcatagttttcattgtcgtttttgaaatcattggcgacgacacaaatatcccctaaatgacaggccacgtacatccatgtgggcaattttcaggcatgtaataataacagtactcaatctcaaggtcatttatttttttttataaaaaaacagcagaattctgtgtccctgcttcgccccttccctatcctcactctcccctacactctccacacaacatcatccatgacatgtt

SEQ ID NO: 33183 - DNA, 586 bp, Zea Mays
actcgtccacacgcgaaggcacccagcagcagccgctcccgaactgaggaaccctaccacgcgggcgacggcggtgcgcgaccggtgacgggacagcggcagcgccccctcctccatctgctggtcccaccgcctcctgacgttatccgatactgccaatccccctcttcgccgttgacggagcttaccgaggaaagaagggcagggccatggcgggagccttcgctttccgcctcgtgcctcgcctcgccgcagagccggcggcgagggggaagggtggcggaggaggagccaaccgcgacgccggcagcagggcgctggtgtcaaagaaaccaaacaagcagcagcatttgtggatcaggaaggagacagctgggtcagggaagaaggctctccgtcttattgatgctgtaaccaagtggttgatgagcaaaggacaggtgctgacatggacaacatatgatacacttctgctcgcacttcttatggataaacgggtagacgaagctgagtcagtttggaacactgtaatacagactcatacccgctcagtgcccaagaggattaagcgacgttaaccctgcct

SEQ ID NO: 33184 - DNA, 1250 bp, Zea Mays
atatcggtcagtttgccatcagaacaaggagaaaaaaaggttccggtcttcatcccttccatttccaaaggacgacgctctcaccattcacgaacggcgactgcggatcgatcgtgcgtcgtctcctgcgccggcctctcttcaagtcaggttacacacaagcttcaaattatcgcaaaattcctcttacatatctacatctcataccggaccaggtctcataccggaccagaaaaatggaatacactttattacctgatttagcaccgcataagatacatgcaaagattcaagtacatgtatctagaaagtggcttttccgaggtgctactgatagtggaccactacaacatgttgatatggttttgtctgatcgagagggtaatgctatttatgctgaaatccctggaaatttagctgaacaaaaagcaacaaatattgaagaaggaggagtttatgatatcaacagattcagagtgtgcgcagcaaaaactgttttcaaaatagtggatggggacaaaatgatccaattcacatttcataccatagtaaaatgtgccacaagccctccaacaacatttccattatatgtttatcggctaacatcatttgatctaattgagcctcatgttcaaactacaaataactttgttggtgtctacctaagtggtggtcctgcctgtagatggtacttcaatccaacaattccagaggcagaaccttatcttaccagccagtctacaaaaagaattgtgttacagcttccccaaaatttacaacatcctccagcgatggaaacgaagccaattgtcgaacataaatccctctatgaacttcttacagttaacccatatgatttcccggaaacaggatttgaatgtactatcacaatagcagaaataccagctgaacacaaatggtggtttccatcttgcacaaaatgcaataaagcaacaatccctcacactacaggttatcactgtgaatcatgcaattgggatggatacaaatttaatgcaaacaagagtaatatcaatagcccagaaaaagatgatggcgataaggaaaccgcacagaacttcgatatatgcagcttgatacaatacccactaacaaaggaaaaggaccagcagatacaattgaatcgccacctaaaaggttcaaacaagggacgatacgcatcggaaaagaaatggacatcaaatcctccgagaactaaagtttcactcagatcttcgtcgaccttttga

SEQ ID NO: 33185 - DNA, 2188 bp, Zea Mays
gttttggttagctagaatcagggctagtcatatgattaccttccccatgtaatctggccagaataggtagggtataagagttgattaggcaaggatcaaattgggtgtttctataaaccttgtgatccgtgcctatatatgtgtaacccctatcttgttacaatcaaatctgttctagcctacgtttccacagttactcgcccgggcaaggcgaccaggacgccttacagggggatgttggttgtggaaagaccattgttgctttcctggcatgtatggaggttgttaattcaggatttcaggctgctttcatggttccaacagaggtgcttgctgtccagcattatgaacacctaacttcattgctagagaagtttgatggagatgagaaaccaaatattgccttgctaactggttcaacgtccacaagggagtcaaggataattcgagatggtctgaaaactggagagataggcatggtcattggaacacactgcttaatagctgataaaactgaattttcagctttacgtatctctgttatagatgaacagcagcgctttggagttgtacagagaggcaggtttaacagtaagctatatacttcttcctcaaagttgagtggtgaaaatacaagttcagacgaggcttctgattctgaaacatttatggctccacacgttcttgcgatgtcagctacccctattccaagaacattggcacttgctttatatggtgatatgtctcttactcagatcacggacctgcctcctggaaggcaacctattaaaacccttgctcttgaaggaaatgatgtagggtttgaagctgtcttccagatgatgagggatgaactgatagacgggggcaaggtctaccttgtgtatcctatcatagatgagtctgagcacttgccacaactccgtgctgcaacagctggatttgattccataaagcaaaaattcgaaggctatccctgtgggctattacacggccgcatgaggagcgatgagaaggaagaaactctcaacagttttagaagcggagaaacacgcattctcctgtcgacacaggtgatcgagatcggggtcgatgttcctgatgcttccatgatggttgtcatgaacgctgagcgatttggaatctctcagctgcatcagctgcgagggagagtaggtcgcggtgagaggaaatccagatgcatattcctggcttcaacttcgagcacgctgccaaggctgaaggtgctcgagaagtcctccgatgggttttacctggctaatgcagacctgctgctccgtggccctggcaatctactaggtaaaaagcaatctggtcatcttccagaatttccaatagctagattggaggtcgatggtggtattttacaagaggcccatcttgccgctctgaaagtgctggtcgcaagcaacgacctagcgttgtatccacggctgaaggtggagctcagcatgaggcagccattgtgcattcttggagattgacatgtcaacagtactgctcgtaggctcgtagcattgggcgacgcgtgtactgtggataactattggtcgtaggctcgtagcgtcggcaaagttgacatgccgtctggtgagcgaggcgtgtaccatgaataactgttagactgattgtgtgagtgtgtgtgggctggtaccattgttaggctgccggttcattagggttagagttgagtctatatattgtaaccccttctctatgcaatacaatgatccacttcactattctacatgttattagactaggttagggttttctgaaacccacagtagccaccggtcgcctcccaccccacagcagccgccaccacctgagccgtcgtcgccctccaggaggctcctccctctcggggcggcacttgcccctggcgcggctgtgcatgggcgcggcccctcgtagctcggcgcgggagtggcagcccctggcctcgacggcgcgaggcgcgaccccctggcagtgtggacgcgacggtccgtccatggcggcgcggccacgccggccccggcgcgggaaacggctcggcggcgcacgacacggagcctcatcacgaggcaatggtggccacggcgccgccctggcggctggctcctccggcgaggtacagcctcggcgcgacctaggcgcgagcgtaggctcgtgggcctcctct

SEQ ID NO: 33186 - DNA, 3463 bp, Zea Mays
gccgaggctgcgagggagaacccagcagctcccattaatggactgcgcaacagcttaaactccgccgcccatttcaaacagaaccgaaccggccgcagcatcgcagcgcagcggtacgcgcctcggaggtggagggaatgtcggaggcggtggcgatcctctcgctctccgcgtccgccgtggtagaagacgtgctgcggcagcacgggtgccgcctcagcgaccgcgacctcgcgtcccgcagggccgaggaagctgcggggaggaggaacgaggcggcgggatggctgcgccgcacggtgggggccgttgccgcgcgcgatcttccggaggagccgtcggaggaggagtttcgcctcggcctccgcaacggccagatcctctgcggcgcgcttaatcgtgtccacccgggcgccgtcccgaaggcaagcgctccttgtgccgacggcgcggcgctgtcggcgtttcagtacttcgagaacgtgcgcaacttcctggtggcggcgcaggagatcggcctgccgtgctttgaggcctccgatttggagcagggagggaagagcgccagggtggtgaactgcgtcctcgcactgaagtcgtacggtgactggaagcaatgcggtggcaccgggccgtggaagtacggcgggaatcttaagccatcggtatccggcaagtccggccacgggaggaagaactctgaaccgttccggaggagccaatcgatcaatgaaggtgaagtgccctatgaggaagctgggttcaacggcgacgctcattttgattccagtgacatgtcaacatcccgcccccttaaaatgttggtcagtgcagttttgtccgacaaaaggccagatgaagttccacagctcttggagtccatgctgagcaaacttgttgaagaatttgaaaatcgtctaaacagccaaaatgaattggtcaaagcggctctaaaaagtggtattgataacaccaaatcattttcaaaatcaaaggtcctggttgagacccctcctaatactagtgggagaaagatggatacaggagatatttactgtaaccacaaaaaaacaaaaaaagaagcatcaagagaagtggcactgaagcaacatttaattttacaacaacagtcaaagaatgttgaggaacttaagagtgatctgataactacaagggcgggtatggagtatatgcaaatgaagtactctgaggatctcaaccttcttggaaggcacctgtttagcttggctcatgctgcttctggttatcacaaagttcttgaagaaaatagaaaactatacaaccaggtgcaggatcttaaaggaagtatcagggtatattgtagggtgcgtccctttttgcctggacaagcaagtccgtccactgtgggttccatcgacgagggcaacataaccattgtcaccccttccaagtctggaaaggaaggccggaaaacttttagcttcaataaggtttttggcccatcagcaacacaagctgaggtgttcttggatactcaacccctcattcgctcggtccttgatggatacaatgtttgtatcttcgcatatggccaaaccggatcagggaagacatacacgatgagtgggcccaagaacatgactgagcaaacccaaggcgtcaactatcgggcacttggtgatctatttaagcttgctgaacaaaggaaaggaaccttcatttatgatattgctgtacaaatgattgagatttacaatgaacaagttagggatctccttgtcagtgatggtctcaacaaaaaattagagattcggaataattctcaaaatgggctaaatgttccggatgcaagccttgttcgtgtggcatcaacaatggatgtcatggaattgatgaatgttgggcaaaagaatcgtgctgttggcgcgactgcactaaatgacaggagtagtcgttcccacagggaagggatctgacatcagggacaatctttcgtggttgcatgcatctagttgatcttgctggaagtgaacgggttgataaatcagaggtcactggagaaaggttaaaagaagcacaacatataaacaaatcattgtcagccttaggggatgtaattgcttcgcttgcccaaaagaattcacatgtaccttacaggaatagtaaattaacacaacttctccaagattcacttggaggtcaggccaaaaccttgatgtttgttcatataagcccagaaagtgatgctgtaggagaaaccatcagcaccttgaagtttgctgagcgtgtgtcaactgttgaacttggtgctgctcgattaaataaagaatctggagaagttagagagcttaaagagcagattgctcgacttaaatcagcattagctgcgaaaaatttaggatcggagcaaatcatcagtcatgactctgaggcatttaatataaagatgccttcgcctggtttttcaaacacacgacagggtagctgtgatctactctctagccaaagtaacttcagacaaccaatggaggatgttggaaacatagaggctagagccaatcatacactgaggcaaaagaaaccaagctttgatctccaggatttattaacagcaagtgattctccttcatggccagatagcaatttgagggtaaattttcagatgggagatgaaagagaagcaattggtggggactggatagataaggttgtagtgaacaacaataattcagccagtgattgggagggtgacaacacagctttacctgactttttttaccagagatatcattcaggtatgagggagaagcagtaccagaggaacaacatgagacaaaaggatgaccacgagtatgaacagcaaaggcctcgattttactctacaaatactgatgattctgatgacattgacatagcaacaagtgattcctcagaatcagatgcattatggcagctcaatgtccaaagcatgaataactcaattagtgagagtggttcaaaggttaagaaaccacaaataaagcttagagatggttcagatgccaggacaccgattcattctcaaataccatcagggtcgagaaaagtcgcaaacggttcgagtagatctgttaggcagcctttaagcagaagcgacagcagaaggctttcatcaaatggaagacaaactggtgcaaagtagggacttacaatgatcgcgtgcagtttttgcctttttcttttctgtgtttgtcacgagagattgtgaggttgctctcgagtacagcaatgagtgacaataaacccaattgagtgtgtcagtgtggtgagttgtgatctcaacaactggtgtgtgaggccattaactttttttccttattggcttatcaggctacgttgagttcttgctaattctctgtatcttgtccataatataaatacataatgaaaagaaaggaaattgattgatcaaaagctggtgcctaataattttttatactcg

SEQ ID NO: 33187 - DNA, 1964 bp, Zea Mays
tcctcctccaaagaacagggtggacggacgaacgaaccaaatttgggcaagaaaggcccgggcgcgacgtccatggccgacgagggaagcgaggccgaggcgctcgagaaagacggcggcaaggcttcttcaccttcggggccaggttcttggtcaggcgttcctgccgctctccttcctcccgtgtcgtcagaggaagccgcgaacagcacgctggaatcaggtgtgaaagcaaccactcaacctccaactgccagctttactgccattagcggtcttgaggacgaggagctacaggtgcaggatgcagttgccagtggttccaagaggagcaaagactctgccgccgccgccgccgccacacgcagcgccaatgtcagctcaccctctgtggttcactctcaccatgccatcctccctgctcccgcgcagcggattccagaggttaagcaagcagactcggagacgacgccggcgcgggagcgggagtggaagccgctgtgcgacgtcacctcgaaccggcgcatcgactggtgcgagctggacggcgacgtccgcgtggtcggcgccaacgccagcgtgacgctggtggcgccgccgggcgcggacaaccggaccttccgcgcggagtcgtggcgcatcaagccgtacccgcgcaaggcggacccgaacgcgatgcgcttcgtgcgcgtgctgacggtgcggtcggtggcgtcgggctccggcgaggcggcgtgcacggacggcggcgacgacgacgtgccggcgctggtgttctcggaccgcgggtacacgggcaactacttccacgcgttcacggacgtgatcctgccgctgttcctgacggcgcggcggtacgcgggcgaggtgcggctgctggtggccgacctccagccgtggtgggtgggcaagttcctgcccgtgttcaggagcatctccaagtacgagctggtggacctggaccgcgacccgcgcgtgcgctgcttccgccacgtccaggtggggctcaccagccacgccgacttcagcatcgacccgcgccgcgcgcccaacggctactccatgctggacttcacccggttcatgcgcgccgcctacgggctcccgcgcggcgacgtcgtcgcggcggcgccggcgaggcggccgaggctgctggtggtggcgcgcgcgcggacgcggcggttcgtcaacacggaggagatcgtgcgcggcgccgaggccgtcgggttcgaggcggtggtgtcggaagggacgcacgaggtggcgcccttcgcggagctggccaacggctgcgacgccatcatgggcgtgcacggcgccgggctgaccaacatggtgttcctgcccacgggcggggtggtgatccaggtggtgccgctgggagggctggagttcgtggccggatacttccgaggcccgtccgtggacatggggctgcgctacctcgagtaccggatcgagccggaggagagcacgctggtggaccagtacccgcgcgaccaccccatcttcacggaccccaacgggatcaagagcaagggctgggagtccctcaaggacgcctacctcgacaagcaggacgtgaggctggacatggagaggttccggccgacgctccaggaggccatcgcgcacctcaggaaggccaaggccaaggccaatggcgacggaaacaactaggcatcgccgtgcgtatgtagcgtgttcattcgtcctcttattaatctactcttctttttcttctttccttttcgggttatgtcggtgtatgtagcgtgcagaaatcgagcaaatgtatgatatgtggcagggaaagaagctagagcgaataatatattctctctcttgtcatccagttttcgattgaatggcgtatgccaagtgatcaggtgaaggtcgacccggaaatttggttttgccacaataatgggaagattggcgaggccaaatatattagttttggg

SEQ ID NO: 33188 - DNA, 1876 bp, Zea Mays
ctccatggcccgacaccaatcctggtctcatcccttctggattgaaccctgctgtgatgcgagacagcgcaatgctggcggcgcgggaggcgaataagcggccgcgcgcagcgccgacgacgaccctccccattgccttctcactgatccctacaacaccaattatagttggggaaggtgaacctccctcttgggatccggtaccaactctaaaagttctacaatgagtatgtcattacgagatcatattagaaagaggagggaagaagaagatgatgacatgatgttgtttattttccctgccttatatctgatgggttcaactagaagtgggggacaaaagaagaaacgccatacatcagatgagacaactccgtatgtgtattgtcaagtattgggaagacaactccgtaggtaagctcacaactctgagggtaaaacagagttcaggaagctattgttctttttcgttggcatttcaaaatgatgatcaaaagtcagaaggcagcatggaattgctgaattcagtgaaagctatttcgatccatcctctttccaataacaagtttttggtactggattcatctggagtgttgcatgtcttcattttttcaacaacacaaatggtctcaagaggtgccatcaagcaatgttctgaaaatatccatacatatcgcttgcattatcccatgaaagtgcaattatctgctgtcttttcagttacctctataaagacacaatttttttgggtttcagatggtggacatactgtacatgttatgtccgcagttgagactgaatcccctaacggtgataatggagacgttactggagaaagagagttagcacctatcaagctttcagctattgaagcaatctttacaagcgaaagagttgaggacattgtatctatctccaaggattcagttcttatccttggtcaaggcaacatgtttctgtatggaacttcttgaatttggttctttatcatgcatggtaagtataatcaaatcaccgtttttgcgtgttactaacaacaattgcttcagcatacgcccttgagtttcatttgatatcaggtggatacctcactgttctttagggcatggttcaagactttgcagctttggatggtcttttggctaaagacaggatgagttttggtgattttgaagatgaacttatccaccagtccttgaagtcgtgagctttactatttattaatcacagtaagcagatgaaaaaagctcatgttttttcagaggacagcaagaatctgaaggtgacgccagattatggacggaccacgccgtaatgaccctattgctctgcatgcgtactttacatgcaaagactggcacaattcttgttgatatgacttggaaagagcaatgctgccaaatctattcccagtctcagttgtcgtggaaagtggatcaccatgagggccattcagctatggaataatacagctggtgctagactgctagtgtaattcagggactggacttgcggtgtggtggagtcgaggtttgggcatgttacttactgcatactacctctgttcttaaatatttgtcacccgctagtcatttttgaattaaacggtgacaaattaaaaagaacggagggagtatatcaaaaaaggaataatgtagtactcttgtaagagttaagatggaatgttgaaaggcgcgactttgagccattcttatcattggttttttattgctgtattttttttgtgacattccactattccggtatacccaaatcattcctggttggttgtgtaatcacgctttaggctgtcctcactggtaagtggtggaccccccattttagtgagtgctcacaacttgacatgtttattgga

SEQ ID NO: 33189 - DNA, 2029 bp, Zea Mays
cataaagggggtttcgttttcagaagtgtcgggaaacttctttccccactcctgtagcgccgccgccgcgtgcccgtgaacctcccgccttcgttctcccctcccgcttgccccggtagtgattttcttccttggttcacggcggatcccatgccgatcgacgggatggtgtccgtggtcgcgaccgtgagtgggtaccacggcgacgagcggcacaggctcgtgaacctcatcgcggagaccggcgccagctacgtaggatccatgagccggtccatcacccacctggtgtgctggaggctcgaggggaaaaagtacgacatcgcgaggaggctggggacgctcgtcgtgagccattggtggtttacggagtgccttagggaggggaggcgcctcccagtggactcttacttgatgtggtgaagaagcagggccagtcccagagttgcctactcgttcccgtacacaaggcaaaaaaagtgccatcatggaggaccgagttttccaagagttacctgatgatttctgggacactcctctagccagaaccagctataaagttaagtttgatgattctgattctgattttgagtctgccctactaaaagaaaattctgttggtgatggagattctaagaaaaatcgttcatcagatgttaagaaaagaaagcgtatgaagcatgtcaatacatcaacggacagaaatgtcttaaactcgcaggacaatgtgtcaagtgtcatggaaagacattttcttcatttgtcaagtcatacaacgtccaagagcacatcaaagcagaaggaaaacttgtcacacttgcttcacaatgaagttcctatcaggatgggagaaaggaatgatcttactgaaaactttgaaaatgatagtttgtctgacagcttcagtgaacctcaaatttcagatactctgtgtgtagaagctcaaagaaaatttaccaaaacaagtgcaccatcatcatcacttcgacaaagtaccatggattctttatatgaatttggtgaaactagtaggcatgaaccagcaggaaaaaaagaacaagacaatgttgaattaaggaagacttcaagaagcttccttccatttgatatgtcaggacaggaaccacctttctgtactcaggagcaagtagataaatgtagctttggcactctagctgatgatgaaatgggatatgataacaaacccatggaaaagtcatctaatttagaaaggcaaacagaattatcatgcgtcatatgctggacagatttttcttctacaaggggcatcttaccatgtggacatcgattctgttattcatgcattcaaggatggtcggattgtctggcttctaggggtaaagtctcaacatgtcccctttgcaaagccagtttcacatggatcagtaaggtggacgaggcaggcaccttagatcagaaagtatactcgcagaccattccttgtgaagcttctaccgatgtttttgtgctgggcagtgaaggctacgatttctctggaccaacgtctgggcaaggagcatgctaccagtgccacttccgtgagcctgaggagcttcttctaagctgccacgtctgcagatcactgtgggtacactcgtactgccttgatcctccgctgactccttggacatgcatgcactgcagagatctgcgggtgctgtttcatcggtatcgttagccccacttactgtactagtcaaaccttaattgttgaaggaaattatcagaaggcttgaacaccgtagcggcttgtcttactgaaggactattaaggggtgtttgaatgcactagagataataattagtggctaaaattagttgaaacatctaaacaacctagctaatagttcagctattagctatttttggtaaattagttaatagttagataattatttgttagctagctaatttcactaataatttttagtcaactaactattagttctagtatattcaaacactccctaagtttgcaatgtaattttctagttccatttgatgctat

SEQ ID NO: 33190 - DNA, 1412 bp, Zea Mays
actacttcctccaatctcccactcattactcagcttaggaaggtccagggcctccagctccgatccaccacgctacgctagctctatgccggactcctcctcctccgccggcacaggcggcatggccccctcgagctcggcggcggcgtccattgccgcgctcgcggccgccgcggcgtccggcgacggctcggacgactccggggcggccaacaacaacggcgcgctgccgctgccgctgccgccgccgcacggggtggaggacaacaacagtcccgcggagctggcgggcgcgggtggcacctcccgggcggtggcgaggagggtcgcggcggccggcgcctccccggcggcggcggcgaggaggggcgccgccgtgaacgcccaggcggccggcggcgccgggccgagctgccaggtggagcggtgcagcgccgacatgggcgtggagaagcggtacaaccggaggcacaaggtgtgcgacgcgcaccgcaaggcgtccgtcgtcctcctcgccggcctccgccagcgcttctgccagcaatgcagccgcttgcagctttttttcttgggtcatggatagcacggtgagctgctggattggatcctaagctagctaggttgctctctcaactcaagatcttgcagaagcgtctctcagtctcatgcaacctctttggaggttccacgagctgtcgcacttcgacgacaccaagcgcagctgccgcctgcgcctggcggggcacaacgagcggcgccggaggaaccccgcggaggcgcaggaccagcacggcgggcggggcgacccggggagccaccacctccagatcagataaaaacctactacgtcagcatgctctctctcttctgtcatgcaggacgcacgcacctagcgtcgtcaccgatccatagtccgatatgtgtctcaagtgttgtgtgtgcgcgctctcgccgcctacccctgtcctgcagtgttgcgtagtatatggttctacgacctacacgtactgctgctactactgcgtgctaactttaatctgatggcagtccacagctagctagcacatcacctcctgtaagtaatgtgcttatctatatgtgcaccgaccggaaccggaggcgtgcgtacgctgatctgccacgaagcctactagtagttaaatgtaacgtaacctgcaggcaattaagcagggcgctgctatatatagcgtaattaattgtgcgtatgggtatggtggttcgattatcggatgtgtaatccctgtacgtggccgggcccgtgccaaacgtacggtgacctgtgcaggctctgtgtgtcgatgatgttgtactctgataatgatataatccattgtggtaatgtatgctatttaatatgtgtgcacactgtgtgtactgtgtgctcacacgtc

SEQ ID NO: 33191 - DNA, 2605 bp, Zea Mays
ttttcaacaagattcacgaagataatcaaggcaagtgtggtgggaagatccactgttgtagaggtggactctttggctcaaagaagatccaagtcttacagagaagcaacaacatcgaaagagtcggcttcaccagcactagaatctagcctaatcgataaggtacctatcgacgttcttcatcatggacgtggcatcgacgatcccgttccagggccttgcctacctcatcaccggcgaggtcagggaaaacgccgtgtacagtatgctgggcgtcctacgcctttggcgtctgcgaagggtcaagcagttcttcaccaggctcgagaaggacatccgcttcagctacttctggatccgcagcgcgcgtctcgtcgcggtgaccttgttcctggtccactgcgccgggtgcctgtactacctgatcgccgaccggtacccggaccggcagaagacgtggatcggcgcggtgatccccaacttccggcaggccagcctgcggatccgctacatctcttccatctactggtccatcaccaccatgaccaccgtcggctacggcgacctgcacgcccagaacaacgtcgagatgatcttcaacattttctacatgctcttcaacctcgggctcaccgcctacctcatcggcaacatgaccaacctcgtcgtcgagggcacccgccgcaccatggagtttaggaacagcatcagggcggcgtcgagcttcgtgggccggaaccacctgcctccgcggctgaagcagcagatcctggcctacatgtgcctcaagttcagggcggagagcctgaaccagcagcagctcatggaccagctgcccaagtccatctgcaagagcatctgcgagcacctcttcgtgccggtcgtcaaggacgtctacctcttcaggggggtctcaagagaaatgctcctgtccctggtcaccaagatgaaaccggagtacatcccgcccaaggaggacgtgatagtgcagaacgaggccccggacgacgtgtacgtcgtcgtctccggcgaggtggaggtcatactgttcgacggcatctacgagcaggtgcaggccacgctgggggcgcgggacatcttcggcgaggtgagcgcgctgagcgaccgggcgcaggccttcacgttccggacgaggactctcagccagctgctgcggctgaagcaggctacgctcaaggaggccatgcagagcaggcccgaagacagcgtcgtcgtcatcaagaacttcctcaagcatcaggtcgagatgcatggcatgaaggtcgaggacttgctgggagacaacaccggcgagcacgacgacgacgcgaatgtgctgacggtcgccgcgatgggaaacagcggcttactcgaggacctcctcagggcaggcaaggacgccgacgtcggtgacgccaagggcagaacagcattgcacatcgcggcgtccaaggggtacgaggactgcgtgctggtgctactcaagcacgcgtgcaatgtgaacatcagggacgcgcagggcaacacggcgatgtggaacgccatcgcggcggggcaccacaagaccttcaacctcctgtaccaattcgggcgcgcgtcgaacccgcgcgccggcggagacgtgatgtgcctcgcggcgcgccgcggccacctcggcgcgctccaggagctcctcaagctcggcctggacgtggactcggaggaccacgacggcgccaccgcgctgcgcgtcgcgatggccgagggccacgcggatgcggccaggttcctgatattgaacggggccagcgtggacaaggcgagcctcgacgacgacggctcaggttcaggctccggctctggcgccgcgcggctagcaatgtcgcccaccgagctgcgcgagctgctgcagaagcgggagctcggccactcgataacgatccacgactcgccagcggtggtcccgaacggcggctcgtcggggcacagccgtccaggaagattacagagcacaagttcggacagccagcgctggcctcgggtgagcgtatacaagggccaccctttcctcagaaaccgcacctctgaagctggcaagctgatcaacctaccaggcaccatggaagaattcagagccatcgtcggtgagaaactgaaagttgacgcggagaaggcgttgatcgtgagcgacgaaggagcggagatcgactcgatcgacgtgatccgggacaacgacaagctgttcatggtcaccgaagaagatctgaggcggctggcatcaatggactggctgtcgtgcgagtgatttggttcctcccaagataattggaggctaaatatagaatacagtacaagagtattgtgcttctacgatgtctaggattgatagattgatggcaactactgagtggcatgagctctatcgagcgactaatttgcaggcaatgtgtaccatgagttcggaccactgtccgttattaatgcaaggtcattcttcttgtaatttctataaggggtttcattttgaatcctattgggtacacactgacgggttcaaagatgtagttcaacaagcttggacggccacaattaactcctctgatgtcattcttcggctacatgttaa

SEQ ID NO: 33192 - DNA, 566 bp, Zea Mays
atcaaacgccaccatcgcggcgcgtcgccacctgccctgccctgccctccctaccgggtcccacgctgtcagttgcacagcaaaaccgccctccgcgtccccgtccccgtccccatcccgaaaccgcgcgtgtcgccagcccatagatcagagcctagccagagccagagctgagagccgaggagggaaacgaagaagcggccatggcgatgaagcggccggcgcgcagcgacccacacctgccacccgaggaggcggcacgggtggaggccgaggttcggagctacttcgacagcgtcgcgccgaggcgcccggccaagccgccgcgcagcgacccgtcggtggacaccttcgcggaacccgccgccgtcgacgccggggaccacgacttgccggagctccgcaagctgcgcgacctcgaggcgaagccccagaagctggtgttggacggagggggaggggacgtggatggcggggaggattacgtggagacgcgatactacgatggcctcataggcatcgacaagcagcatcacacgaaacgagtgtggtagccagaaaaccag

SEQ ID NO: 33193 - DNA, 925 bp, Zea Mays
cagacaaagtggttcattttctgaggacgttgatttgattcatataaacaactaacaaaaggcgcgcacacgatcggggtgacgcactgcgacaagttcgtgcggcggatctacacgttcaagcagcggctggcgtggaacccgccgatgaacctggacttcctgcgctcgctgcggcgggtgtgccccctcagctacagccccacggcgttcgccatgctggacgtcaccacgcccagggtcttcgacaacgcctacttcaacaacctccgctacaacaagggcctgctcgcctccgaccaggtgctcttcaccgaccgccgctcccgacccaccgtcaacctcttcgccgccaacgccaccgccttctacgaggcattcgtcgccgccatggccaagctcggcaggatcggcctcaagaccggcgccgacggcgagatacgccgcgtctgcaccgccgtcaactaagcctgcattggctgcttgctgcttgcgtgcgtgggtttcacttatttcacttcttctttctcttgtttatatacgtacgtttgtcggatggattttggtagccatgagatgacatccttgctctgagctagcggacctgccccgattggatgatatagattgatccagatgttcttctagtagattctaattctttagggcttgtttgggatcaaaggtaatggagtggattgaggggactagaatcccctactacttaattttgaatagtgagggattatagccccctcaatcccctccattaccctttgtcccaaacaagcccttatggatgtttcccattgacacgcggttacgcgcgcttcaaccgtacgcagctcacgaacttcctctacctctatatcatcagtatgtctccaaaagtccttcagcaacaacttccatgttctcaatcatg

SEQ ID NO: 33194 - DNA, 2747 bp, Zea Mays
cactgctatcgcacgtgcttcccgaccaaccgccgtggtcccctcactcgcggacactctccgggcgcccaccacctccgcctcttccgccgccgtgtgtgccggcgacgatgccgcgcaaggcctcctccaactcagatgcgcgggccaagtcgcggaagcggaagcgcgccgccgccagcgcctccccgtccaagcagccggacgaccactcagacgactccgacaccgccgcggcggcgaacggcgacgatgagacgtcccgcgcagcatccgttaacgggggcggaggaaccctagccggcgtcggcggcgatgacgaccccgtgctcgaccttcgtgcggcggaggtgctctcctcctccgccgagcccgtttccgccttccccgccgccgtccgccgtgccgtgagccggcctcacccctcggtgctggctgtaatcgccgccgagcgtgcggcggccagttccgacgatgctccggtcaccccagcctcggtacccgttctcgagaatatttcgcacgggcaactccaggtgatctcggcgatgctgcccgaccatccgtccctgtcctacgaccctgacaagccgtccacgtatgtctgcaccccacctccactgatggagggatgcggagtgcacaaacagttctatgacaaacttcacatcgtgcccaggcactcagattggtttgtgccacagacagtgcacaggttggagaggcaggttgtgccacagtacttctctggaaaatctcaggggcaaacaccagagaagtacatcatgttgaggaacaaggtgattgcgaaatatttggagcgacctgggaaaaggcttgtgtttgctgagtgccaggggcttgtcacaagcacacctgaattgtatgatcttagtaggatagttaggttcttggaatcttgggggatcattaattaccttgcaacagggtcagtgtaccgtggcccgaggacggcatcatctctgatcaaggaagagacaacaggggagcttcagctggtctctgcaccaatgaaatcaattgatggtttgattttgtttgatcggcccaaatgcagtatccaggcaaatgatatatcttcgttggtgtcaacttcatctgctccatttgtggttaatcatgacggtgattcagcaaatttggatgagaagatttgggagcgcttatcagagagttcttgtagtttctgctcacaacctttacccagcatgcactatgagtcacaaaaggagacagacattgctctttgttcagactgcttccacaatgcaaaatttgttactgggcattcaagcttagattttcagagagtggatgcgatgaaagatggatcagacactgatggggacagatggacagatcaggaaactttgctgttgttggagggcatagaaaagttcaatgataactggaatcatatcgcaggtcatgttgggacaaaatcaaaagcacaatgtattcaccatttcattcgtctcccggtggcagatggtttgttagagaacattgaagtgccagaagcatcccttccatctggaatgcaaagcagtggatttttgcattcagattccaatggcagtacttcagccaacctggaaaccagattccattcattaattctgctaatccagtcatgtcactggttgcatttttagctgctgaagtaggaccaagagttgcagcatcctgtgcaagtgcagcattatcggttttgacaagggaagattccaggatgaatgcagaaggcattgatgctatgggccatggtactcatctcaactatggaccctcatcatccatttcttctgaaactgtgaaaaatgctgcaagctgtggcttgtcagcagcagcaacaaagtccaagctttttgcagaccaggaggagcgtgaaattcagagattatctgccaccatcataaatcatcagttaaagagactggagttgaaactgaagcagtttgcggaggttgagacaatgctcttgaaggaaagtgagcggttagatctgatgaggcagcagctggtaactcagcgtatccggatgttatcaacccggttcacttccacaggtggtacaatacctggaggcagcagcggtatggtttcaaacctgatgaatcaggccagcggccttagaccgccgctgatgatgccaggctcggtgacccagtccagcatgccggcaatgtatgcaaataacatgcaggggcatccccagatggctctgctgcaacagcggcaacagatgctctcgttcggacctcgtttgcctctctcggccatcaaccccggctcatcctcgtcggcacccaacatgatgttcaaccatggcatgcccaactcggcagctcctaatcatcaccctttgctgagatcaccctcaggggacaattcaaatgtaggttagtgagatgagtttttcatttttttgggtcttagattcctgagctgtagcccttgactcgtgatcattaaccattgtaattcgattgcacaatcacatatagaggttgttaccagcgataggttctcattttctcttaggctgtggaccgtgtgtgcgtgactgtttgctcggatgagattgatgttgctagtggcttaggcgatgcacagaggatgtagagtttctttcaccctgactaattgttattactgcgccaccttagaatgatgtaaaaaatgaatccgcatgaattccccattcttcatcttggtttgcatct

SEQ ID NO: 33195 - DNA, 1657 bp, Zea Mays
tctcgggcccgccgagctgtgacgatgtaaaggcgggatcttgatgttgtgaaagaagatgacccaacaaacaacgtgccagacactatctttgcgaagattggcctgcagctgcacaggagggagaaccatccccttgggattctgaagaacacaatttatgattactttgacaagaacttcactggacagtttgacaagtttgatgacctttgcccccttgtttctgtcaagcagaattttgatgatgtcttggtcccttctgaccatgtaagccggagttacaatgacacatattatgttgatgatcaaacagtcttaaggtgtcataccagtgctcatcaagctgagctgctaagggatggacgtacacactttcttgtaactggagatgtttaccatggaagggttccgtgtgttctctcctgatgaatggtcaggttctggcttggatgggacagcatatgcagctgcagaactcaagaaaacactggaaggattggcaagacatctatttggtaaatcatttgtagcttgttccttatcatttgaggggatgacgaaattgatccttgtttcagataaactatagaaaaatgtcatctgcaggtgctgtagagatgcgatgggttgacacatacttcccatttaccaacccatcctttgagctcgaaatatattttcaggatgattggttagaggttttgggctgtggagttaccgagcaggaaattttgaaaagaaatggcaggagagatcatgtggcatgggcctttggattgggattggagcgtcttgcgatggtccttttcgacattccagatattcgactattctggtcgaatgataaacggttcacgtcccagttctcagaaggcaagcttggtgtcaagttcaagccattttcaaagtttcctccttgttacaaagatatgagtttctggatcaatggtgcatttacagaaaacaacttatgtgaggttgtcagaggaatagccggggatcttgttgaggaggtaaaacttattgataatttcaccaacaagaaaggcatgacaagtcattgctacagaatagcatataggtcaatggaacgttcgctcacagacgaggagattaacaatcttcagttgaatgtcagggaagctgtgaaagataaattgaaagtagagttgagatagcagcagctaattatgctgtcatagcatggactaaattttgcctgtctttatgtaaatcaattaaaaaggattttttatctatcgagaaaatgcgccatttgttcctggcattgatcacgttctcttctgtttagggaagagaaaaggtccctgttccatttgggaatcatatcttgtaattcataaggctttgtttggttgcacagggatcaaaggagattgaggaggattaaatccctctctattcaattttgactaggtagagatttaatcccctctaacctccttttaatccccttgtaaccgaacaagccctaagatgatgagctgtacacttctcactattttggaggacatgtggtttgggaattcatgtttggcctttcaattcaattttggccgttgtacattatttgtaacgaacaagtaaaagcactctgtatataaagtctaggatggttcaaatctgaaattaa

SEQ ID NO: 33196 - DNA, 1604 bp, Zea Mays
ctaccgtctgcgtctgcccgtcttcctctctctctctctctcctctccctcattctggatccaccgccgcagccttagctgggtccgtcgctgtcgctccgcctcccgctcgcttgccgggcccgacacgcccgccaccgcctccgctttgtctctccggcgatccgacgccccacccggcgtctgtgcagagcagtcgtgaggagttctctgttgtgggctgcccggcgatggaccggggcgagcgtctcggccgcgcgctggacgccttcgggggcaacctgtgggcgctggttgacgcagcgctggacgcggccgctcgcgaccgccccgacgagcttcgcgcgcgccgcgatagcatcgtcgagcgcctctacgctgccgccgcgggctgtagcaactgcgccgggcgtccgccgtctgttgccgctttagcggccgcggggctggaggaagaggacggcgaggaggcggctccggcttctccgtgggcggaggctgacgcgcaagccggtggcgcggaggcacagaccgaggtgctcggcgccggcgagcctgatctcgagagcaagatcgtggccatcagggacttcttggaggaccctaatcagcccgagaacgagctggtgagcttgctgcagaacctggcagacatggatgttacctacaacgcactccaggagactgacatcgggcggcaggttaatggtctgcgcaagcatccttcggccgaggtcaggcggctggtgaagcagctcatcaggaagtggaaggagatagtggacgactgggtgcgcctggacaattccggcggtgacggcagtgcctctgttatgactgatggtgactccccacataaaatccaaggcagaagccaccaaagccctcgggtttcggggtttcagtattctccaagcccacagaggtttatgtgctctttgctgctgaaattttagatggttcaacttcagagatggctaacaatgggtttgagtcaacaatggatgcgaagcgtagggccagccctgtaccagcacatcataactccaggcagatgaacaacaatcatcattctactactattaccaccagcacgtcatctgctccagctaaagtgacaagggagcaaaagcagagtcttgtggaccttgacaggcttgattctgccaggaagaggctccaggagaattaccaagaagcacaaaatgccaaaaagcagaggacaatccaagtgatggacatcaatgacataccaaagccgaagagcagaaacgctttcatccgcaagagcggcagcggtgggctcccggcgaggcaccgatagcctaacctccttcgtcggctggatatctgcgacacttgcgaagttgtgccctagaaccgcaacgggaaagaaaaagaagcaaacggtttcttgttctttttttccctgtaccttgactgcctaggtttacctccagtgtaatattgtcaggtacataagggtgaaatgatatgatgtttctcgaggaaaaagaaagaaattagtcactgtttttgctatggtttggttgctgttattgctgttggtcagtgctggatataatatgcataaaatgtgtgca

SEQ ID NO: 33197 - DNA, 502 bp, Zea Mays
atgaagacggcggcggctatctgccttcactggagctgtgagaaggctatggtgcaaattgttcagcagataaatcatgatggagaggtcaatcgagctcgctatatgccccaaaattcatttgtaattgctactaagacagttagcgcagaagtatatgttttcgactatagcaagcacccatctaagcctccactagatggtgcatgcaaccctgatttacggctgaagggacataattctgaaggatatggcttatcatggagtatttttaaagagggacatttgttaagtgggtctgacgatgctcaaatttgcttgtgggacattaaagcaaatagtagaaacaaaagtcttgacgccttgcagatttttaagattggaaaactatactttctttctctgatgagtacgagtagaaaaaccatttgtatctgccactgaaccgggaagtgctctatttgcaatctagggatttcaatttctcattagttgttttctt

SEQ ID NO: 33198 - DNA, 2055 bp, Zea Mays
ccacccatcgcctgttgatctctcggcacatcatctttaacgagtctgattttcccttctctacttttctctctagccccgtccaagagttggattcccttcagcttggtaccacaatcatatttgcagttttctgctggtgggattgtcaaaataccgaagtttgagatgatgatgtctaaaagtgaagcaaacaacaagcctgttctagctgcagatgatgtttacattgtaacagtctatggtaggatttattgcttgcagcttgacagagttagtatgtcattgaatctatatcgcttttaccgtgatgctgttgtacaacagtgtactctgccaacatactcaagcagaattgcagttagtgccgttgacaacataattatggttcaccaaatagatgcaaaagtagtcatgctttacgatgtgtccctggattcttatgccccagtttctgcaccacttccactgctattgagaggactgcccatcaatagtagacaagtatctcagactgcggatagccagtctagtgcatacggtggaaccatctatggagaaggttggaacttcctcattccagacctcatctgtgatgctgagaatgggctcttatggaagctccatttagatctggcggctattgctgctagtagttctgatgctccttcaattttggaattccttcagagacgaaagtctgacccaagcatggttaagactctatgcctagctatagttcggacaatcatcctggaaaggaggtcagtgcccacagttgctaaggcgatggatgttgtccttgattcctacacgcgtttgatgaaaatgggaggggcttttcctggggttaggcgaatacatgagcaaaatcagcagtcaggtagtcagcctattgatggctcccatgtggtttctcaggaatccagtcctggaacaacagttagtcctgctgtgaacccagaccacggaagtgaggctgtggatatatatgtgcagtcaaatccaggagttgagcatacaatagacaggggattactaaatataaacatatcttctgattctgtggacaatacatctgatgctgtcgacaaacgacagcaagctgtaggcgaagctagccgaccattgtcttcaggcacaatgacgcaacatggacaacatgctggaaccgtggcaatttctccaattgagatgttccagtctgtctttacacttgttgaagatgaaatgatgggtgatcctgcatatcttattgctgtcatcatagagtttctacggagtgtctcaaaggctgggcttaaggctcctcacaacctttatgtgatgacggcgacactactagctcgtagcaaccgttacgctgaaatagcattgtttgtgtcaaacaagattcttgagccgtgtaaagaactggcaatgcaacttatggagctgggtctgcagcacccgccaacgaggaagctgggcatggacatgctgagggagcgaggcctgcatcacgactacgtgactgcgatgctgcaagatgggtactacttggaggccctgcgctatgccagaaaatacaaggtgatcaccgtgcagcctgccctatttctggagaaagccctggcgaagaacagcgcccacaacctggctgcagtgctgagcttcttctgcgagttcactccgagcttcaaggccacatcggactttgtcagataccggcatattctgtctgaaatggtttgaacagctttccgttgtgcaaacttgttgtcccgaaatgacttggcacgtcctctgtaacaagcaacgtcacctcggagggtacttttatttaattcttttggtccctcttgcagaaaataatattttattgttgtgaataaaaaaacgttgcaattaccgatgaaaaacaagtctggcttgaggctaagatgatcgcttcccgctcgccgaccatgcagctagccatctcgtcacttatgctactcctagctatggatggccaaataggtgttaaatgggcatacactaaatacggtatttctagtagtgcttcggtatagc

SEQ ID NO: 33199 - DNA, 3673 bp, Zea Mays
aaccgaaagtccatttcgtccccaaaatttcgattttcgaaaccaaaccaaaccactctcctactacagctctcggcctccctcgcgttctctccatcgaactggcgaactgctcctgctcgtctcttcccacaccacgcattttgtcgggattcgggaaccctatcgccggatcttcgcggcggcggcggaaatggcgaatcccctcgcggggctgcaggaccacatcaagcttgcgcgggattacgcgctcgagggcctatacgacacctccataatcttcttcgacggcgccattgctcagatcaacaagcatctaactactttggacgatgctttggttcgtacgaaatggatgaactgcaagaaagcaatctctgaagaagtggaaagtgtgaaacagttggatgctcaattaaagtcccttaaagaagctcctgggacgaggcggtcctcatcacctcctattcgctccaataaatcatttgttttccaaccgttggacgagtatccaacatcttcaccagctccttttgatgatcctgatgtgtgggctccaccaagggatacaccgacccgaagaccaacaagaggtcaatctagtgcaagaaaatcctcccaagatggagcctgggcacgtggttcatcaaggactggaacacctagccgaagctcaaaacctaatgggagtaaaggaggctctgtggttaaatcatcaactgcctctaacagttctgtaaggaaaggaaaaccaagttcaagcaaggctgattcagcgagtagtgatgctgaggaaggtaagtccaagaagggtcaatatgaagggccagatatggacttagctgcaatgcttgaaagggatgttctggattctactccaggagtaagatgggatgatgttgccggacttagtgaggccaaacgactcctcgaggaagcagttgtgcttcctctctggatgcctgaatattttcagggtattcgtcgaccttggaaaggagttcttatgtttggtccaccaggcacgggaaagactcttttggcaaaggcagtggctacagaatgtggaacaacattcttcaatgtttcctctgcaacattggcctctaaatggcgcggcgaaagtgagcgcatggttcgttgtttatttgatcttgcgagggcctatgctccaagtacaattttcattgatgaaattgactccttatgcacatcacgtggagcatctggtgaacatgagtcgtcaagaagggtgaagtctgaacttctagtgcaaattgatggtgtaaacaatagctccaccactgaagatggtcagccaaaaattgttatggttctagctgcaacaaattttccatgggatattgatgaggcactgaggtcaggttgatcaccagagcctagaggactggtggctgaggtcaaggctactcagtcctgtttatgtcatttatatttttcgatgtatctagttacatttgttctaaacaaaacaaatccactaattgctcattccagttccttttgtaatgctttacaattctttgtgtcattgcgtttatagtgcctaattcttgttcagttatgtaattttcttcaagcaaagcacccaattttgcaggatgacatgattttgccgttatttgtccaaataatagggttagagtttttaaattggttcttcatacttttttcgaacgacgcaggagagctgcatgtcattctattaaaaaggagtaagaaaaaatacaagtgggggaccgaggcctaaaacccacacccttacagtacagacataggcacgccacacacacgagggataacgacccaacacagaagggggtggggggcttgctcaagagcccagccccaccaaccttgcgcacagaaagctaaacgcagaattaccagctagataccacaggttacggcagactacagaaacactaggcctaatcccctcaaacacacaatcgttcctgtgcatctcccaggccaccaaaataaacaaggatagacccttcttcagccttacagagaattaatgtgaaactacaaattacactgaactattggtgtcaaaatcattgattattttaccagggaaaaaacagatggttattttggcagttttggtccattgatgtatataggatactgttttataataacaggcatggctgcaaatgaaaaggctatgcaccacctcctgcctggtttcaccccagatggtatttttgttgaaatttggtggggatctgacatcatgcataacagttctacgaaccattggtatcccttttttgggcaacattcatgtctggtagtttcctgctttatgtagacactatttatgtctggtagttcaatagaattttgcctatatctatactagcggcatttacctgctagttataatttactctagatatttatcttcacacatgagaatactatttttttctcattattatttttcaccaggctattcccatgtatgctgctactattgccattgctacttctcttcttccatatgcatctaccacttctgatccaaattatagttcactttagctttatcgtaaaccatttctttttatctttgaccaaatttaaaggaaaatgtaatatctacaatatcaatctattttcttaaattctccattaaatatttcttaatagtgcatctattcgaacttatagatgttaatataattttctaaaactttggtcaaagttagagaagtctaacgtaggagaaagcataaggaactacaatttgaatagagggaatatgttagtaacttactattgttcacattaatgtgcattatgttgacttctaaattgcccaggcggaggctggagaagcgtatttatatcccacttccagatttcgaaagcagaaaggcacttatcaacattaatcttagaacagttcagatagctgcggatgttaacatcgatgaggttgctcggaggacagaaggctatagtggagatgacttgacaaatgtttgccgtgatgcttcaatgaacggtatgcggcgcaagatagcaggcaaaacccgcgacgagatcaagaacatgtcaaaggacgatatagccaaggacccagtggccatgtgcgactttgtggaggctctggtgaaggtccagaagagtgtctcgcctgcagacatagaaaagcacgagaagtggatggctgagtttggatctgcctgagacctcggtcatctccttcaacattggtttctgtggttgacacgacaagtgtatgttgatatccgctgaccgctggtgcatagatcagaggcacgaactatcttgtatattttcagggatactacaaattaagttcacgattatttcatttcaatccctgatatgtacattctagctgtgaaacgtgtctcatcaattagccgtggcaaccattgtcagatgttgattgaacgtaactgcagccccgcctatacctccagatgcttccagtttggattgaaacgtctgcttctagctcttccaagattttcatgggcgtgaagaaagcgttaatcactttgccactgcgcagtggtgccactgtagagctccccctctttatttctgtgttctttttacggtcctgtgttttgcatgtgtcagttccaaacacgccgttaacgtg

SEQ ID NO: 33200 - DNA, 2086 bp, Zea Mays
actttccatttctcattcttaactatagaggtattcccctagaagcagcacagtcgtcaagtttcatgttgcgggatacctatgtccattttttattgctgccatgacaacttgacacagcgaattgcccattgacacctgacatggcctggctcatatctgatacattgagaaagaatcttgctgcagagggcaagaggaagctcatgtgtgttatccatgagagggaaaaatggcagaagacaatgataggaaacctcttcatattgtgcacatctgtagtgaaatgtacccagtagcatcatgtggaccattatcagcatatgttgccagtttatcttgtgagattcaaaaaaaggctaacttggtggaggtgatactacccaagtacaccagcataaacttggatggaattcatggtctaaggagatctgaggcagaatatgaatcttatttcggtggcctttggcataaaaataaaatatggactggtacgtcaagtggtgttggtcttgtaataatagaaccatctcagctctcctattttagtcgtgatatgttacgtggctaccctgatgactttgagcgattttcctatttttcccgtgcatccctggattatattgttaaatctggaaagcggccagacattatacacatacataactgggaaactgctatagtggcaccgcttttctgggaaatatttgctcaccagggacttgggaacactcggatattactgacatgccaagacttgaattcagaatgcctagaggagccaaataaactggagatgtgtgggcttgatccccgtaagcttcatcgtcctgatcgtctgcaggatacaaacaagacacatcttgttaatattcttaagggaggcattgtttattcaaataaagtcgttttgatgtcctcaacacattcaaaagatgctcttattcagggttcacgacatgagctgcaatcaacattagccgcacatagggagaagatattggttgcatcttatggattggatggtgaactttgggatccattcaaagacatttatcttcctcgaaggtattctgccaatgatattgaggggaagtccatttgcagacaagcacttaggcgtagacttcggttcaatggtgattcatccattatagtaggatgtatctgtgatgataattcagatgtccatagtcttaaagaagcagttcatgttgctctgcacaggaatactcaggtcatcatcatggaaacgttagggtctgttgtgaactcaattttgcaagcattaaagggagagataaagggagacaaaatagcatttgttgaggcatatgatgaagctctggcacatttaatatatgcaggctctgatatcattctttgctcttccttccaagatccatcactgcaaatagcgatgaaggcaatgaagtatggatctgtgccagtacagttaaacttttccagcgatgaatcaagggagtcaaaggggcatgagtgccgcaatacagtaatgtctcagtacatcatctcaacctatggagatttgtctctttctcaagcacttgatgactttaaaaatgacccttcgcattgggatcgacagatcaaggatgggatggctaggggttcttcatgggacgcaaagtgctatagccttcattgggaggcttattcatccataacgaagctgtgaactgggcatctgctagagaagcacatgacctacatgaggcaccatctccccaaattaagggtaccattttttggcatataattagactatcatttaatttcttagatgaacatttaatcaagcaaaaggtcagtgaataaaaaatggtatgtagagctgcactggatttcacaatatttccaatttactattttgagtgtgcgtttttaggaacaagcatgaacagtgtcagtgcacttggcacatacacatcattctggacaaacaaacagtacccctccgttttaggggcctttttaaagcgtttttcaaggaataagaactcggataatagatttgcctcgcaattgtaactcatcagcgttcacaggatgcaaaaagaattgg

SEQ ID NO: 33201 - DNA, 1465 bp, Zea Mays
ctttaaaagataacgtttacatcgggtcaacaacaagcagtggcaggacgtttgggtgtgcgctatctgcagttagtcttgagtgatactagctgcaatttaatcagatcgatcaggtggatgggcatcctcagcagccgggaggagtgactccagcagggggttggaaagcttgcaatatgctgaggaacctcctgtggcctacatcgaagcacgacgtgtacctggtgcagagctactccgtgacgcactggtctgccctgctccggagaggaagagaggttctcaacgtggccggccggttggctccgacccagaacgtgaagggggctggaccgttgtcgagggttcagatcagcgccatggctgtgaaggacaacctcatggtggccggtggcttccagggagaactcatatgcaagtacgttgatagacccggggtggcattctgcaccagcctgaccggtggcagcagttccatcacgaacgccgtcgacatccaccaggcacccagcggcgccacgcgagtgatggcggcgaacaacgactgcgtcgtcaggacgttcgacgccgagagatacagccttctcacgcagctcaccttcccgtggtccgtcaacagcacgtcggtgagccccgacggcaagctgctggcggtcctgggcgacagcacggagtgcgtggtcgccgacccgcagtcgggcaaggcggtggcgacgctgcgcgggcacctggactactccttcgcgtcggcgtggcaccccgacggccgcgtcctggcgacggggaaccaggacgcgacgtgccggctgtgggacgcgcgcagcctgtcggagccgttcgccgtgctcggggcccggatcggcgccgtccggggcctccgcttctcccccgacggcaggttcctggccgcggccgaggccgccgacttcgtgcacgtgtacgacgccgcggccgggtacgccggcgccgcgcaggaggtggacgtgttcggggaggtcgccggcgccgcgttcagccccgacggcgaggcgctgttcgtgagcgtcgccgaccgcacctacggcggcctgctcgagttccgacgccggcgggcggaccgctacctcgacgcgtgtttcttctgagggagaggcgcgcgcgcgcgccgtctgttgtgtactgtgcatgtgcctgccggcgggcggcacgtatacatgtggtgtgttgtgtagtgtaaaacgcagagttttggtgcgtatcggacagcgtaccggctggagacaacctggccagggtgctttcaggagctagtatcgctttcttgtttgttttggacttcgggggaaaaacacttcagaatggtgcactcgggttgcctttaggtactacaagcttgctatagagatgctgtgtatcaattcgttaatgtaagaactgtaaaatacttctaatacttcttctgtcctaaattatattttatctc

SEQ ID NO: 33202 - DNA, 2881 bp, Zea Mays
ttcacatttgcggagggaagacttgccttggtttatcccttctccagaacccactcatgtggtcaaaactcatattgggacgatgacacacatagcatgcagctctcatttggagttgatgagtttttgataattgctccgctgagtgccagtggtgtgatcctcgatgatccagaatcaactaagcttttgagttctgtagcaattgctctttctaattgtggcagcaattggccagcgtttgtaccagttcacgacccttcacggaaagcctatatagggattcaaaatctgggaactgtatttactcgaagatttgaagctgaccgaattggtagtcaagtgccaataagactcatgcatctggaggggttacatgagctatttctgtcaaaatttgtcctatcctcgtcagattttccagctagggtaaaggttcacttctcaatgaagcttagctacaagaccccagaatatgatcatgataatgaaactttagattctgaagctactgagccattgactgaaaatgaagttgtgaaccaccctagaaaactatgggacgatgattgcccttgggcagagtggtactctgctgaggatcctgttaaaggttttgagttgactgccatctggggagagaggacatttgaagagacccttgagatggctgaagtggaaaatgcctcgtcctttgatgctgatagctggttccttcacccagttgtatctcgatacatggtagatgattctattggaaaatttgttgggtttgcatcccagctacatcttctagtaaatgcatatgaatcatcagtggaggcacaatttctagaagactttgttgcagatacttcaggccaggataatgcaaaatctactgctactgtgcctccaccatcagttattgatcgtgttatgaaagatcttttcagtgatgagactggcaactatatggaagcagaaaacaagtatagtcgtgctatgcgaggtgcacctgcagattcactttttggccagttctgtttgcatgcactgtggtttggcaactgcaatatatgcgcaattgctacactatggattgattttgtgcgggaaattcgttggtgctgggaggaatcagaaagattgcctaggatgaaaagcacttcaagcattgatctctcttcttgtcttatccaccaaaagttacaaatgctcacgatatgcattgagaggaagagatcactgaaccgtgagaaaggtactggctacaaagatgagacttcaaatagtacggcagtgaacaagtctaggaaaggatcagctggtgttgtgcctaaaatgatgctcctgaatacgtttcaggaaatgcatgctccatatactcaggatgcacctttgatgaccgaagatatgcatgaagaaaggctccatgcagctgaagcttttggcaatgccattggtctatctggacagctggaaagggatatattatgttccgatatgtctgcttttaaagctgcaaacccagatgctgtctttgaagattttattcggtggcattcacctggtgaatggttgagcgaggacaaaacagatggtaatgcaggctggcctcccaaaggaaagctttctcaccgtatgtcccaacatgggaatgtgtggcgcaaaatctggaatgatgctctgccattgcctgtttctgaacagaagtctttgcttgaccctgttcgggaaggagaaaaggtgcttcattaccttgaaactttaaggccacagcagctccttgaacaaatggtgtgtacagctttcaaatcatcagctgatatcctgaataagaccatgtatggtggcttcaaggaaatgaagacaaaaatggatcgactatatgtcaccatggcgtcaacactgaaatcttttctagggaattctgatgtcaatgatttggttggaggcctgaaacggctttgtcaagtttttgagcacatcgagaagttactgattcttgctgcttccatcaatcggaagcttattgatgctccacgactagctcaagcaatattttacgactactacaacttctaccttccaaaaatgggaactagcctggaaagcatttgctatgagaaggagttcacaactaaggaaaaggtcgggatgtatgagagagatgctgtgtcgaacctgtttcctccccctactgctaatcagtcttggaggaaagttttgagcatgggaaatcttctgaacggccatgaaccgatgcaaagggaaatcatattctcagtccaggagagaataagcaacggtcattattcgagcccaaccccattatgtaccaacaatgagaagatccagacacataggatgtatatatctgggacatctaatgacctttgggttgcattgtctgtaacgtcctgggattgagctgcacgatgtatgagaggagcaattggtgttttaattagcttagaatcccgttggtgcagataaactatcattgtattttttttttgttggatgtaccagaagtccagaaggggccaccaggacatggctagtgacgcactgaggacaagcatccatttttgacatcagatcaaagtattgattatttacgtcttgtagcagtcagaactcagaaatgctaatatattcttggcttcctctagagaaatggttgtagacaagctctatttggctgacgtttttggtctgttaggtggtgggctggtgagttgcaacacacacactggggttgatgtacgtaaacatcttgtatgacttttgcaatgagctaggctttgttcaatactcgagtccatgaaattttcaatatttgatatctgcccgcatttttttagatgggttcatcccatgtattcgcagttcgcac

SEQ ID NO: 33203 - DNA, 2051 bp, Zea Mays
gctctcgtcttcctctttcttctagtttcgtctagtcttcaaggaagaccggaaccgaggcgccctggccgagaactggagccaccggacgcacggctgctgccgaaatccacgggagaatgacgatggtcgaggccgaggctggtagggcggcgatccggcgcgccctgcggtcgctgaaacggaggcatctcgccgaggaaggggcgcacagcccggccatcgaggcgctaacccgtcccttcgccgcccacgctttggagtggaaggagaaggctgagaagcatgagttagagctgcagcaatgctacaaggcgcaatcccggctctctgagcagcttgtgactgagatagaagaagttgtggacaacatggtacttagcacttgtgcaaaacttcttcagcgaagagaatgtacaactaaagcagtcgcttgacgaaaaaataaaagccttagatcttctcattcaagagcatcagacagtgaaatccgagcttgaacaagcattgacgaaactaaaagctgcagaggatgagaaccaaaatctggttgatcgatggatgctagagaagatgaaggatgccgagaggctcaatgaggccaatgcgatgtatgaggagatggttctaaagctaaagacagctggagttggtggtatacaacttaatgcacagcaagaaactgatggcatcatacggcgttctgaagctggttacatagaaacgccaatcccatcaacatgcacaataactatccgtgctcatgatggtgggtgtggagctttgatgtttgagcataactcagacaagctaattagtgggggtcaggatcaaactgttaagatatggggtgcatctactggcgctttgaccgccaccctacatggttgcttggggtctgttaatgatcttgccgtgaccaacgataacaagtttgtgatcgctgcctgtagctccaacaagctgtttgtgtgggaagtcagtgggggacgtcctcgccacacgctgactggtcacacgaaaaatgtttcttctgttgatgcaagctgggtgaagagctttgttgttgctagttcatccagtgaccgtactatcaaggtttgggatctacagacaggtttctgcaagagcaccataatgtccgcgagcaaccccaactcgctagctttcatcgatggtgacaccatctgttcgggtcacagggatgggaatcttcggctgtgggatatccgcagtgggaaatgcaccacacagatagctgctcatctggatgtcacctcggtctgcgtgtcacggagcaggaatttcgttcttacaagtgggagagataacgtgcacaacctttttgatgttagaacgctggagatttgtggaacattcagggccatgggcaacagagtggtgagcagctggggcaaaccttctattagccccgacgaaaactgcatcgctgctggttcttctgatggatctgtttacatatggtcgaggctgaagaatggaacgccgaccatcctagagggtcattcttcacccgtcctggcaagtgcatggtgcggactaggagctcttgctacctccgacaggaaccatatctatatctggtcttgagagatgtacaatttcatcaaggcgtggaaactggagagtttcgcatcatcagtatgctaatatgtgttctcttcatttcttgatgacactagttttcatgtgattatgtgaacggattaactggttctgatttctgaacgttgtaaatatcagaagtgattgttcatcgtagtgatgactacttcagttcgccatatgtgtgatggtttgcaaggttttgatggctgaaatttcttggtattgacggctcaggtttgctgttattttaagggtaaacttttgggacaccagtcaaacaacattgacttgggaatagttttgaatgttaattttgcttcaattattaatttattaagtactacatgatccttgtgttctgctgagttgggatgttctggccttaccttacctatatttgtatagttaagtcggggtggcaa

SEQ ID NO: 33204 - DNA, 3045 bp, Zea Mays
cttttgtaagtttcggtaaagcaatatgccaaatatagagaaaaaggataaaggttgaagagagagaaaaagatagaggttgaagatgatcgtcaatctcttatcgatgcgcacaagctgaaaaaataatggaggctcgctctcactaagctccctgtttgctaaatcgcaactaatccgatgcaaaatatttgtagaagaagagagaatagagggttcaacgcagaggcagaacaacagctgccccaccaagcgccgtcctgtcggagatggcagctgcggctccggcggcgtgcaaggggaaacgaaagcggcacctctccgaggacgacgtctggctcctcctccacaggtaccatccagggacgatcctgacggcgctgcaggaggtggcgcagcacgcggatggccggcgcatagactggagggcggtggtggcgaagtcggccacggggatcacctccgcccgcgagtaccagatgctctggcgccacttcgcctatcatcacgacgtagacgagagcgtcgacgccgatgaccagcctctggacgatgacagtgacctagaactggagcttgaacccgatcccaacctgaccaaggaagctttatgtgaggcctctgcattagccaaggcgctaatatctggatcttcacaagcctctggtcatcgtattaacttggatactcatgttctgaacacccgaaatgaaaagatagtgcgggttccatctgagaaacagcttgctcaaagtcatcgtgtaacaaatgttgcaggtcctgtttccaattcaaaacagttagcccatataggaccctctgctggtcttttggatccaaatggaccttcaaaaaagaggaaaaagccaaaagcatggtctaaagaggaagatgcagacctggcagctggtgtgcagaagtatggtgaaggaaattgggaggatattttgcataaatgtaacttcgataatacaagaacgcctgatcagttatctcagagatgggcgctgaagcgtccaggaggatcaaccaagcctgctagcactaaacacgcctctgttggcttagaggaaagatcagcagccctcaaggcactttcattggctgtcggacctatgcgtggatcatctgcactgagatcaggagcttatccacaaagcattcagcataagtctacagtgtttgctcctaagatgccagaactaagatctgcagtaaccccttcaccggcaccagcagtgccagtcccagttgctatgcctctgcgtgtggcagctcaagtacaggctccgcctcatcaagggcatcaagctcctgcccatgctgcaccaccaaaattgttaaatgcttcaaataagacacggaagaagcaagcagctcagccaaatcccaccatcagtccttcctcaatacaagcagctgcgattgctgctggtgggcgacttgccacagcctcaaccgccgcaaattttttaaaagtcgcacaatctaagaatgctgtgcacataagatctctaggagcaacatctttgaaaccttccgcaagctttaaggcatcgattgtggttgagcatggaacacaacctgggggctcccagcacctagaacctctaaatgctagtgcagttcatgatgtttcaggagttgctgcagttaatcaatcagggccacttgctggggcatgttcagagactaagaaggcattgagtaccgcactagcacctgtcccatgcgacagcgaggaaaaggaggatgactcggaattttgtgtgattacgatagatgatctgttccctgaagatgcaaagcagccagaaactgtggataccaaggcaaagcaaccacaaaccacgggtctgaaggcaaatcagccagaaaacgcagatcccaaggtaatgcaacaagaaaccatggatcccaaatcaaagcagtcagatacagtagaggttgagatagttgatccgaaagataaagacatgctagagtttgatcaatatgttgcttctcaaggagggcacttaaacacggatgatctgaataaaagcaagtgtaccaacagtgtttcccaagcccaaggtcttgttggcagccagcaaaaactgattcctgcggatgggaaaggtagccctgtaactgtggttgggaaaggcaagcctgtaactgctggagtggcagcaactgggaggaagactaaattccctgtctcacatttggcagcagggaccccacgtggcattgttgacacagtcaacgccaacgccccaaataaaacgctagtaaggagggcagccatccctgcccctgtccctgctggttgccaagttaggaaggatgccatgaactcaaaaggtaaccaaatgacccctggcaatgccggttctggagtaccagccagcagtcagactagcgtggctgcacaagctgccagcaaagcaaatctaccatccagcagcagccaggccaagcccaataacatggtggtgaatggtggtaacaggctagtggttaatccaccgtccagcagccaagctagtgcggccgtgaacgacgctaacagggctgcgacaccacagtccagcaaccctgtcaacggtgccaacaacagagaggttaatccaccacccagcagccaggctagcacagccgtgaatggtgctgctaacaaggggaatgtgccagcagcagccaggcccccttaatacagtaaattttgtaatgattcccgtaggacttgtgtgcgtggaagaaatgtgtatagggcattaggcagaggtcatgtcattcttttcgccttgcatttgcagtttgcacccgtgaactggagaccactaggttggaatggttttttggctgctatctcctgctggccagttcccttgtgatgtaaatttttgatgcttgtgtttgtttacttgcgcccgagatgatggtgccaactttgtgcctgtctggacagatcattcgcatctcttaggggccgttcgtttccattggaataaacccggtttcgttccaactcatcaaaatttatataaattagagaag

SEQ ID NO: 33205 - DNA, 550 bp, Zea Mays
tttcactaaatgcatcaacagtttgacagacataatataatggcatataaggaacattgatcatccagaaacacgtctcaaacatatcctgataatgagtcattacaatatttgctaagataaaatgaacgcactgtctcccggagttgatattacaaatagaaatcaaaaaaacctgaaatggattaacaagtccatgaacggagatgcatattcttcaatattctgcccacgggagtaggatctcgtggtgtccagaatggattaataagcaaacaagggagtatttgacttcacttataacctcagcttgccgccgtcgccgccaagggagtgagggcctgagggagagccggagagggtaggccgcctgcacggctgcactgccgacctggcctctggcggtctgccgtcggccgtgagcccgtgagccgtgacagcctgcactgccgcctgccagtctggcgcctggcggtctgccgcccgccgtgagcacgagacagggagtggccactggccagccgccaacgcgaccacgtgagaggagagt

SEQ ID NO: 33206 - DNA, 686 bp, Zea Mays
gaattcaaccagccatttggctcacgggaaagccccgttcggcggggcatcgcgcacgggcgggcgcacgacgaggagggtcggacgatggcaccgcaggcgcaggagccgcacggagaccgcgcgcggtgcggcgcccgccagatgcagcaaccccagtaccccacgccgcgcgtgccttccgcgcgcggcagggcggggcggcgcggcggctgcgtccccaccgcggagacgccacgccgatcagacgtcgccacggagacgggcagttcggctcgtcgcgttcgtgctgccgtggcgcgccaggacctagcgcgtgaccgcgacgatcgaccgaggtaacgccccgtcgacggcattagcctctcccggagggaaccgccccccgcccagcgcccactgctcctgctggtccgtccctggcagtggcacgaagcctggctggttcggccgtcgcgtcgcgtggccgggtcgccatcgcctcggactaaaattccgtttgacctggcgcgtacgtacgtatcagacgatgacacgtactgccgacggcctcattgcgccggcgagtcgcgagtcgcgagtgcatgattgcgccgcccgttcctccacagcacagtagcgcgctgctgcatgcagtagccatggacggaggatcgacatggaccgagtctctctactctctacat

SEQ ID NO: 33207 - DNA, 6488 bp, Zea Mays
taatgttttgttcaaaggaaccttggcccttgctcagccaaacaagcgactgcgttcattgtctgagcacgttcctcatggttatcgtaggaaatcactttttgaaggtctcattcgatataatgttccattactaagagcaacatggtttattaaagttacatacctgaatcaggcccgaccggcacctaacagtacttcagtagttgcttctgataatcaacgatctaatcaatggacaaaggatgttgttgaatatttacaacagattttggacgaagtttgttctaaagagggtgccattgtacctccatcttttaaagagcagtcatcaccaggacttgctgctggaaccaatcaaataaaaatgaaaacggaatcatctccagctggagacagtgaagaacccttggtgcacttcaaatggcggtatatggttcgcctcatccaatggcatctcacagaagaattgcttgttccctcagtacttatcgaatggttatctaaccaacttcaggagagggattcagatgatgttttagagcttcttttgcctattatacttggtctggttgacaccattactctctcacaaacatatgtgcgcatgttcgtggagctactagtgagacgtctcaatgtcgatcgtccaaaaaggttttcagtttcttctgttatagcagagttactgcgatacatggtacttgcagtgccagatacatttgtttctttggattgctttcctttcccatcatttgtggttcctgatgtatatggtagaggtgctttgttgaagataaccagtggtggtggaattttatgttctaagaggcgtgatgcttatcggtatttgtcctgtggttatgctgtttcttccattcagaaacgtgcacatgatcttgcagcagttgctaaccctagccttcaagcacgtggtgcagccaaagtggtacaggctttggacaaagctcttgtcacaggaaatttgtcagtggcatatttttcactctttaatgatttatctgatgcgttaatggaagaaagatggattaaagaagtgaatccctgtttgcagtcttctctgatgtggattgggactgttgagctatcccttatctgttctatatttttcctttgtgaatgggcgacatgtgattaccgtgattgccgagcatctccctctcagaatgtgaaatttacaggaagaagagatttgtctcagatacacatggcagtgtctatcttgaagaataaaatggatgagatgaataacttgtctcgtcctaagagtagtactcgcatcacccttaataaagttgccaaaggttctttgaatgatgcttgtttgacagcagctgctgtggatgattcttctggactgagaagtaatgcaaaaaatgttgatgagaagaaggatacaaatgatatctttgaaagccctggtccactgcatgatattattgtgtgttggttggatcagcatgaagttagcaacgttgcaggttttacccgggtggatgttcttatcgcggagcttatccgcaatggtatatttttccctcaggtttatgtcaggcagctaattattagtggaattactgataagaacgatacaatgctggatgttgaaagaaaaaggaggcatcacagaactttgaagcagcttcctgggtcttctttatttgatgttcttgaggaaactaggactgcagaagagcaacagctatatgagatgatgtcaacatactctagtgagcgacgccttgttctctcagaactttcatgtggtcattcattttatgcaagtggcagaggtgagtacacttcaagttcctgcattcggaagcagagtgatcttccagttgcatcagaaggtgataagcatggaagagtgctagaacaagtagaagatgttaaagctcttttgtcaagtctgttgggttttacatatcctcccctagtggaatcaaaactttgtgaaatcaaaacaagctttcaagaatcagtaacgtcaacgctcacacaagttgagactggggaagccaaaagtggatgcgaggattgtatgaggtccaaggggcagaaattggatgacagcgccactcctttccaagggtttccattgattcaatcaggcgaggaggatatttggtgggtgaagaaagggacaaagttacaagaatctttcaacgttgaacctgtacagaagtctgttaagcaaacttctagaggtagggcaaaagttgttcgtaaaacacaaagtcttgcacagcttgcagctgctagaatcgaaggtagccagggggcatctactagtcatgtttgtgaaagcaagatgagctgtccccaccatgaacctaataacgatggtgacaacgtcaaagattttgatcacacaagggcagcaaacgtgactgcaatagggaagtcactaaaaagacttagattgctcgaaagacgatctgtctcttcatggttgttgaaatcaataagacagcttgttgatggaaacggaatgacagcttctaaagctaccaattctataagcatccttcctttgcagcctgatgataaaactgcatccaaatggaggctaggtgatgaagaactgctgtcagttctctatgtactggatacatgctgtgattcagtctctggagtgaagttcctcatatggttactagtgaaaattcgtggagtgggctcctcaggtcaacctgggaggacttatatgcttatgaggaacagagatcaccaagtttgtcaggtcaacgaggcacttgtgttctcatctctgcttaggtatgagaacatacttcttgcgaccgacatcttgcctgatgttctaagtgctttagtgaacagaaattctatgtcagcaactaccaggcatcctggttcaacagcttttgcttatgttcgatattttttgaagaaatatagagatgtggctagtgtggccaagtgggagaaaaactttcggaccacttgtgatcaacgcctgttagctgagcttgataatgggcggtccattgatggtgatttggtatcttcttcgggtattttagcaggcgaggagattgatgagcaggtccgccaaaagttgaatggaaggagttcaagactcgtgcagaatatgaaagagatagtgcaacggcaagctgatggaattcagcgcagtttaaaggaaaagaaagttcttgcaggcgcagcacccaggaatccactcacttttgagaaagaagatagttatcaaattgcacatgacattgttttgggcttagtagaatgcatcaggcaaaatgggggtgcaaatccagatggagacctttcaatagttgcttctgctgtttctgcaatcgttgtgaatgctgggcatatgatagcaaaacatttggattttgcaggaggaaactatcaaggtgttaattctgtggctacttcgctaaattttgttcggcacactttacttattcacataaattctctttgcttactaaaagaaactcttggagatcgcttcagccgtgcctttgaaatagctctggcggttgaaacttctgcagctgttacagcagcttttgctcctccaaagatgcaccgcaatcagtttcaaccatctcctgaggcccatgatgcatatggaaatcatacaagtgagctcagcaactcagggaaaggttttgttgggagaactgcaaaagtatctgctgctatttctgctcttgttgtgggggctgttgttcatggagctgttagccttgagcggatggttgctactctaaaaataaaagatggtctggatattatgcagcttttgagaggtttgaaatcaaatacgaatggtgtatcccatcctactggaggttttaggattgaaaattccacggaagtttcggtacattggtttaggattttattggggaactgcagaactgtctatgatgggcttattgcagatattcttggagatccatacattattgcactctcaaggttgcagcggatgcttcctctaactgtaatttttcctccagcctactcaatttttgccatggttctttggagacgatatatttttaactgtgaagatccacaactttatcagtctttttcaaatgcaataaacgatattaccagacatcagccttttcgagagatctacttccgtaatacacatcggctgtataatcttctggcttctgatgttggtgattcgaagtttgcagcaatgcttgaaagtcatagtccggaccggaattcaaaaatattgccatttatacctctccgtgcacgcctttttctggacgctattattgattgcaacacaccaactattcagggggatggtgcttcagagccttgtgatcccaaagataatgaactaaagctttcagagaggcttatgcaacttcttgatactcttcaacctgcaaaatttcactggcaatgggttgagatgaggcttcttttagatgaacaggctcttatggaaaaagttgcagcaggcaagacaacacttgaatcacttcggtcattatcccctaaagctgagggttttgccctttctgatagtgagaaaggatttactgaagtcattctatcaaggctacttgctagacctgacgctgctcctctgtattcagaacttgtccaccttcttggaaagcttcaagagtcacttgttatggatgtaaaatggattctacaagggcaagatgctattcttgggcgcaggtcaacaagacaacagcttgttcatattgcccaacgaaaaggtctttcaacaaaggcacaggtttggaaaccatggggttggtccagcttgcttagcgatgccattcctaataaaactgcaaaaaggaagttggaagtcacatcaattgaggaaggagaagttgtggatgacactgttgatgctaaaaggactaccaagactccccctcatagtgttgatagaagctttgaagggattagatcgataaataaatatttaactgagaaagcccttgctgaattagtattgccttgcatcgacagaagttctgctgatatccgtggaaatgaagtgccatcgaacaaatcaagtggccgtagaggaattcgaggtggaagcccaaacattggtagaagagctccggttggtaatgacccaagtcctccttcggcttctgctctgcgggcagcgttgtggttacgcctccagttcatcattaggttgcttccagtaatcatggcagataggagcatgagacatacgcttgcttctgcaattctaggcctgcttgcaacgcgcatgatttatgaagatgcagatttgccccttcctcctaccaacgcaactgctttaaggcgggatgtggattccttgctggaacctcccctggatgtcctgcttgaccggcctggcgaaagcctttttgagaagcttttatgcgttctccatgcactgcttggtagctacaaaccaagttggctgaagtcaaggtcagcctctaggtcgtcaattaaaagccaacgagatttctcagcatttgataacgaagcagccgagggcttacagtccgcgttggaccacatggaattgcctgaaacaatcaggcggaggatccaagcagccatgcctcttcttccaccatccaggcgcccttgtatgcaatgccaacctccgcagttgtcgttggctgcattatcaccactccagagcagtacctctggtgtaggtcctcaacagaaaagttcttgtgtgagttgggtgcccactaacgtatcagtcagaagcaaggcagcattgccttctcatgaccctgaaacggaggtagatccatggagcttgctggaagatggcacaaactgccccccctccacagcatctggaagcaatggctcgagtggagtgacgggagaccatgctaatctgaaagcttccagctggcttaagggtgccgtgagggtgaggaggacagaactgacctacattgggtctgtagatgacgacagctgatacgtgtatgattatcttggtgaattggaggcaaagaatttggtctcacttgttggcatttgtgtcgtgtgcaagttaaaagcaccaactgcatcgaattctttgagagctctgtaccacaaggtggaatggaaaccatatggcttttggttggttgttgtagtgttagaatacatcgctgcccccgatttgttttagttagggcctgtgggggcggctgtatatagttggaatccatttctggattcaatgggggagcttatttgagaatcaggcaggaagccatgtagtagatttctagccaagagccctgtacttgttttttttttgggtctgagatgtaattgtcatgtcacatatattcttttgatctaaggctgacggaagttgcattgcctatttgctttagctattactagtgcagcctagacatcatgagtttggatcgttctatgactaaaccgtcctactggtttgctgtttg

SEQ ID NO: 33208 - DNA, 2009 bp, Zea Mays
cttcactgtaggcgtccacaggcttggttctgccatcgcgctccgtccgcgatcccctccccgcgcccgatcctccacgctcgatcctcgaatcccgcggcttccttcgatggcacgaccccatccatctcgccagtgtccgtggtcccctccccgcgctccccaccacgacgacacgaccccatccatctcgctgctgtccacgcccagtcgcgcctcccacgatcacgcccacggacgcaacctccctccctccccgtccccgttcatgtcgcccccgtccgtgatcccctccccgccctcctctccgcgaccccatccatcctgtcgccgtccacgcccagcagcgctcaaaagcaaaaaagggtacgaatacgaatcccaatccagggccggagggcgagcgaactcaaaagcaagctgttccagtccaatccgccccagtccaaatctaatcgccgggtttaggcagaaggggtgggacgcggcgaggtttaggcggggtttgttttgtccctttcgtgcgattctgctctccgcgcgggaggcaagtactgacggaagcgaagaccaaggcggaggagggggtccccggcggtggaagtggaacgcgccgatgcgcaagtttcaggactccatcaaggccctccaggccgacatcgatcatgccaatgcgatagcagggtgtcggaattcttgagggactacgatggctcggtcatccagatgcgggtggcgtacagcgccgtcgcgcatttcctcctgcagtggaccgactgcaagctcgccggcgcgctcggcctcctcaaggttatgctatacaaggtgtgcgcggacggctcgtcggcgcttcctgattgggacatggaggccagcatcagggagttttacggcgtcattttcccgttgttgctgcagcttccgagtggcatcaccgagctggacgacaggaagcagaggaagctctgcctcaagaaattcaggagcagggatgagcagctctgggaggtggacacggagagggagcttgagtgtgggatctgcctcgaggttagccccaaggtcgtgctgcccaactgtgcccacatgctctgcatgcggtgctttgaggattggaaatgacacctactctactccgcagcttaaaacctcaagatatgtcggtaatcaaacaagtacaagtttcaaggaaatgggaatttcatggaaatacagacattgggtccatattacacattgatatgattttggctgacaaagagcgctgtctgaggtgcgtggtcaagtcgaggcgaagatgagcaaggaggatgtgctcaaggtgcaggtcttggattcaacatagtactagcagtttggaatcacccgacggggatgctttccatgtaataaatatttttggaacgtttcggatttaacttatgttgtttctattgcaatcaacatggtgtcactatttggattcaccagtaagaatatttgccatttgggcttgttaattagggtgaaattttatataaaacatgcctcgttcacttgctttccagttcttgatttcagatctctgaagccaattacgtacacattttcctaccacgacttttattctgctttccgtttctcaacgtcttggacattgccggcgagcgcggtctcctcgacaacttctactgctaactcgggtgcaagatgcccagcaaacttcccaatccagctgccggcaaggagatgaggttcccgacggcgacaattttccactacacaaccggattcttcagcagcatatggatccgttgaagcgccgtgtgacaatgccaccaaagagcagcaacaaacaagctcaaagtctccgctaaccactaatctcataaagcttgaattttctcattgctatgtttccttctcctagcaaagttaagatgtttgcacatttctagcttattaggtccttgtgtggaatgtgtttgaacaatgatctcatttaaacaatatcaacatgtgtgatatat

SEQ ID NO: 33209 - DNA, 278 bp, Zea Mays
tctacccctgctcgtcattctcacttttctgccctcctagcgatagggcctgtctgttctccttccgccgctgctcgtcgtcagccccagcctcgtcgtggatcctgccccaccactccctctcgattccaaggtggatcgacacagagatgaccccttccagcccgccgtggagacgacgcttgccttccagtctgacatggagaggatcctgctactgcgttctctgtccatccccaggacacaggatgatgaatcagccttagcggttttggaac

SEQ ID NO: 33210 - DNA, 868 bp, Zea Mays
cgtccctgccacctgttggagctggctgacatgtccagagcttctgctatataaatggcaggattggcagcccctgccctctcccttaccctccacgctattgcctgctccagctggccttcttcctcccccacccgatatagccacccatggcacctcctctcttccatggccgcctccctcaagctccagccgagctccctcctccgtgcggcaagacaacaggctaacgctccctgttcctcccttcccacggcgcccagcccaagctcctcttccccaccatggctgagctcaccggatctcctcccctcggcgcagtaggtcgagcagctcctcaactcccccctctgctcgagcaagccgtgtatggagcccccaacctgcagcaagccggagcacgcagcagcagtactactcacgtctagttgtccagggaagaagaagcccctttatctctatgatatgtgggctcaaggccatgggaaccttcggactcgggatgaagttgttcacaatatgaaaagcatggtcgggatgaaggtcgaaccagctccggagatacgcgcaaggaagcttcggctcagtagcagaaaagaaccgacttaaagaggaaaaggctatctagtcttcgatagattgtcctaatgtcaatagtaaacatgaagggcatgaatgtaattttacataggctgcgccctgtgcctataaataggtgaaccattaacatttgtgttgccttgttcttaactcatagcatttgagaacaagtccccaacaactaagtttgtctatatagaagccatagcaaattgaagtgtacttaactagtataataataaaggaactaatgaaagattagagcgaa

SEQ ID NO: 33211 - DNA, 158 bp, Zea Mays
gcctcaggttgtcaaatctttggcatttccagatgaaggcaatgttaggacatacgtggctctttttgcaggtatatacatgtcaatatcttggactactaaaataaacagaattgctaaagacaatgatgttgataaacacaacactactatacgtt

SEQ ID NO: 33212 - DNA, 1424 bp, Zea Mays
gtgcgaaggtggaagctaagtactagtagttgggagaaacttgatctagtgccagcacaatcttattattcagcagtaggtggattctcaagaaatcgagaacaaatctgcacaagagttgcctcctggttggattgaagtgaaggacccgacaactggagcgccatacttctacaatcaaagcactggagtgagtcaatgggatcgccctgacagtgttgtgaatatcatgcaacatcaagtttctccatccttgccagagaactgggaggaggcaattgacaaatcaacaggccacaaatactattataacacgaagacacagaccacacaatgggaacctcctacttctgtgaacaccagtgttagacctccagcttccaccaacactgcagttgagccagtcgctcaagctgcagatatttggaactctcaaatgcagagatgtttgggctgtggtggatggggagttggtcttgtccagccttggggatactgcaatcactgcacaagtacccatcttacacaaataatacgatgcacgccagtggtaacaatgctcccaaagctcaggggaatgtttcagctaagaacagatcaagctcaaagccacctttagggaaaccaaacagaaaagaccaccgcaaaagaaatcgccccgaggatgatgaacttgacccaatggacccgagttcttactcagatgctccacgcgggggctgggttgttggtttgaagggtgttcaaccacgagcagcagatactaccgcagctggacctttgttccaacaaagaccatatccctcaccgggtgctgtgttgagaaaaaatgcagaggtagcaacccatggcaagaaacgtggtggtatggctccgataacaaaaagaggagatggcagcgacggacttggggaggcagattagtcttttggtgaactgaaatgttgtgctatccgaatctccttggtggttgtctctggagctgctaaactatcattgcacgcctgaagaaaatcgaaaaaatattggctgccagatctggaatgaggaaactcactacagttcgcgagtttttgcagcgattaacgctagtgtactcgctggacctcgaggctagagcaatgcgagctcaccccggcttgctgatgacacattcactgagttcactgcggtttgccgatgacattcaatgtgcccttggtgtgaattttatatgaaaatgaactataatctgtaattggaaagagtgatttcaatgtaaggaattaacttttgtggggtgatgaaccatactagcgatgcacttagccaaacaagagaaatttggatttgtaccattaaaagattacaactttagatatatagcattgctatctcactaacatgtgtggtccacatgagacatgagtcaataacatgtggag

SEQ ID NO: 33213 - DNA, 2515 bp, Zea Mays
tgtccgcgtccatgttgtggcgtccgcagtctccacggaagcattagcagatgaagaggcggaatgttcttcttgggatagcgacgatgagtaccagaaattcatccaaaatatgaaccctccaagggtcaccatcgacaacacctcatgtccaagtgctatagttattcattatggcatactgttggaggtagtgcaggtcctcactaacctcaagctcatagtcacgaaggcatacatatcctcagacggaggatggttcatggatggtaggagagccattggtttctttccttttcgtcaaaatggaaagtgtccaccgacgaaggagaagccaaagcacaggagcatggtgctatgttcatggagaccagtgcaaaagctgggttcaacgtcaagcccctattccgcaagatcgctggatcccttctaggactagacgcactttcgtcaggaaagcaggaagacatggtcgacataaacctcagacctgccagcggttcgtcggcttcaggtgcagccgcgcagctggagcagaaatcaggcggttgctcctgttgagacttcgacagttttgtgttcagagaagctacaacagtactgcaacatcgagttaagtactttcagagagattgtgacgaagagtgttttcgcccaaacgtccagtagtgatatactgacatccatagcgagaagccaatttctgtgtacagatttgtttagcaagttatcatatgctaggatataactgtttgatacacaagggacaaaatctgtggaggtaagggcatctcacattttttttgatgaaacattagcaggagctctgccatatcatataagaagagcaagctagagtgtcacagtctttattacatgaatgatcaaatacttagagtccatagggaaaaagtgaaaactgttgactatatggctaagagacaatcatgatccatgaaaaattctaatggactcatatacacagagggggctagcgtgcttgagagaataatattagccgccaccgcatctctctatagaggtgtacgtgctcaagtcgccaccgttgtttctgtcgtggacatggaaattatatggcggattgctggacatgtagtattggcttatctggtggacgatagactgcctagaccacatgaattaccaaatacttttgagtctttgacatgcaaaaaagggtgaaaactccattagaaaactttagaagctgaaacaaatattcccttcagtattgagttatattagggtatttcatatccccttcaatattcagttttattagagtacttcattctaataaatcacatccaatttcattctgccaatcatattttctttttatgcaattttattctattgatcctattttctttgttttgtttttggcaatgaggtgtttcagcatcgacattcaatttcacagcaggaacttctccattccattccaatccaacatcgacaggcattccatttcacacagctaatcggtggagggaaaaatattcatcaggaaaccagctaatcgtggaaggaaaaaatattcatcaaagtggatgtcactggatgttttagtggatgtcaactttgtcatctactcgtgtttgataccaggatgcagtgcaaccatttccacatatggttccacatgcacattcagcgagtcaatcctgggatcgtgtggcttccatactgggctgttcacctcaccacatttgatggatgttagagagcgatttcagctagatggagaaaattttgaagtactcctggtggtgctagaacaagttgaagcctatttcaggttcctcgcgctgctcgcattcaagatattttctgctgagcaggtagatgttgctattctcgaggttggcctaggagggaagttcgatgcaactaatgtggttgttagttctcgtgaatgtcctgttgtctcgaaatacaaagcttctgttcgcacctaatcgcctaaaatggaaatgtttgactcattgtttaattcggggggaagctgaaggtggtctgatccgttctaggaagagaaaggctgaccaagtcatcatctccagggacgatgttagcgaaagtcaatttaatcaggtgttgatcattgggttgcaacaaatcatcggtggagactgagtcaccgcggccagaaaaccacggtctcaatttgaggagtttttccatctatgtttgttagaaggcataatgcctatttatctcttgtattcgaacatttggcaattaagaaatagaagattacttccccaatatcccttattcctaatctcacctttcacggcttgtggtgaacaatcacttgctattaccgactgacatgtccactcctcatatgtgcgatattggggttgatatatatgttgttcgtttccatgtaattattgtatactaacatttatcgaataatttttacaccgtcgcaacgcacgggcacacacctagtagtagttgatgatgcctttgcaggtttgca

SEQ ID NO: 33214 - DNA, 2934 bp, Zea Mays
ctttctctctctgcgcctgcgcctttctcttctccttctccttctccctcctctcaaccccaacaatctctgtctccccatctcctctcaacaaggcggcctcaacaaagtcccaccgcacctttctttaatggagcgagggtgagcctaacaaacactcgacacacaggaggaggtgctgcccgcttctcccctccctcagtctcactcgctccgctctcctccccgagaccaggaggccaagccaagaaccgcaaaccctcaggccgtggccatggcgcaaggacgggacccggaggagctcttcgaggagctgtggcgcgcctgcgcggggccgctcgtggagttgccccagaccaacgaaagggtcttctacttcctccagggtcacctagaacagctgcaagagccgacggacccggcgctgctggctgagcagatcaagatgttccaggtgcccaacaagatcctctgcaaggtcgtcaacgtcgagctcaaggccgagacagaaacggacgagatgtacgcccagatcactctgcagccggaaccagatcaagtggatctaccccaattacctgaaccgcccctgcaggagacgtcaaggcccgtggtgcactccttctgcaagatcctcacaccatccgacaccagtactcatggcggtttctccgttcttcggcgtcatgcaaacgaatgcctcccagcactggatatgtcgatgccgaccccgacccaagagctcatcacaaaggacctacatggatctgaatggaggttcaagcacatatacaggggccaaccccgtcggcaccttctgactactggatggagcacgtttgtcacatcaaagaagctgattgctggtgacgcgtttgtctacctgaggagcgagaccggacagcagcgtgtgggagtgaggcgcctcgtgcagaagcaaagcacaatgccagcatctgttatatcaagccaaagcatgcatcttggggtgcttgcaagtgcatcacacgctattaggactcattccattttcctagtgtattatagaccaaggttaagccaaagccaatacatcgtcaggctgaacaagtacctggaatctagtaaaattggattcgatgtgggcatgaggtttaagatgagttttgaaggggatgacgtccctataaagaagttttctggaacagttgtcgataaaggagatctttctccacaatggcaaggttctgaatggaagacattgaaggtcaaatgggacgaagccacaaacttaaatggccctgagagggtttcctcctgggaaattgaaccattcgatgcatccgcacctgccatcaccatgcccgtgcaaccatcaatgaaaaacaaaaggcctagggagacagctgaaggcctggatattcatgcactggaacctgctcaagaattctggctctctggaaggcctgaacagcatgagaagacaagcgtaagctccagcgaacccaaacatcaagtcgcttggacaagtgaacgcgcaggatacagtgccatgagcagttcaatctgtcagaattctgcagtaactgggagctggttcaagggcttcaattcctccggctcacacccttccctgccagagatctcccagaaactgtttcaggtcaccagcaacgacgcgagggttcctccttggcctgggctctccgcttatcatgctgacgagccctcttccaagctgtcctgcaacactgctctgtgcagctaccagaccgaggaggtggctccaagattttccaatgccgtcgaagaggaaaagaaggagcccggcatgttccgtctgtttggcgtcaatttgattaaccatgctaggagtagtgctaccgctgacaagacgagtgtgggagcaggggaaacatcggcgcgagctgctggttcttttgaagactctgctcagctatcaagagtgacgaaggatcatacgcacatggtgaacggaagcccccgagaaatccaaagccaccagagttgcagtggaaggagtcgtatcaaggtaacgagtttcaagttcttgtctttctacttgtcttgccgtgtaacctgtgtgtttgatctgtgctaggttcaaatgcatggaaatgacgtgtgcagagctgtggatttgggaaatctggatgggtacgagcagctgatgggtgaggttggagagatgtttgagatcaaagaccttggctccaaagagaaagaggaatggaaggttactttcattaacgacgagaatgagacaatggaagtcggagctgttccttggcaggagttttgccagatggtgaggaagatcgtgatccattccattggagacaggggccatatggaggcttgcccttgcctggggcaggatgggaagagggactattagaagaagggatttttttttttggctggggcagtcaggagatgggtgctgctgaaacatgatggcgtagcttgtcgatgacaaagaaggcaacagattggttgctggcgtcagttcttccttgagaaaaaaattcagtggaaggaagaagtgatgtaacataggatttgcagaaaagatttgataatgcgtcttttagaagtttggtttggtttaaagatgacaagttaatgtgtgtctagtgatctgcctaaagccttagcgacgggcaacaagcaataacaaggatggatgatgaccttaccttgggtatgttagctgtgtaaatattatgtatgtatgtatgggacattaaattggttggcatacttgactcctgatttatattgtacgtagtgtgttgcagtgctctggattcagttgtgatgtgctactattacaagtagtagaaggaatctggtttttagtccaagaatcaacatcaatatgtcaatcacaggcacactagtgtgtaattttagatctttttctgacatcca

SEQ ID NO: 33215 - DNA, 2796 bp, Zea Mays
ctgatctttgaccttataatctctatgatgggcatagaaatatgcttggggctgaattaacagtctcccatcatatcctcttatcacagctaaggcctgctcggtacttggtcaaccaattcatccctaggatgacatctatgtctacatcctgggtacccattactatcaaatcggcggagatctctatcccccttatttggactattgcacttgggcaaaatttatctgtttaggtcctcccatcaactaaactaaccctcatggtgggtacatgggtgctactggtatgttgtgtgtttctacccatgatgcagtcacaaaagaatgtgtggctccaatatcaaataacacatttacagaatgagattcgactgagaacgtgcctagtgccactcctagggtctcctgaactatgtcggtctctaggtggttcacctttccatactaggcacgaggatgtccatgattgtttgctccttgctgagatgcactgtgtcttgcaggggcattaggagctgactgttgttgagctactttctttgggcaatgcgacgcccagtggccttgttctccatagtgaaaacatcctcgacctcctccttgcactggggttgtctgaccattctgattagctgctggggcaggaaggcgaggtgcctagttgttctgcctctggtattggttccctcttggttgattgttctggcggcactactgctgttgctgctgctgctgaggaaactgcctctgatactgctgttgatgttaactttgatgctggtatccctgggggtgactttgcttgaactgctggggtggattgcctgagaaacaaggatgactgttgctcccaggctagggtctacttattttgcgcttccggtctcccatctcccggcgatccctctctgtcattatagccctgtcgatcagatgctagaaggtcgagaaggtgtgattcatcaactgataatgcaggggatcaaccaatcctctcaggaatcggtactgtctcttggcatcaatgttgacatcttctgaagcgtagcaagacaactgcaggaatcggtctcggtactcgctgacggacatggatccctgcttcagtgccaggaactccctttcttcactatcatcaagccctctggaacatggtaccgacagaaattttctctgaatttctcccaggtgatggcttcagggttggcatgggtggcgaggtaagactcccaccaggactgtgctgctcccgtcaacagacgaggaccatacagaaccttctctcgatctttgcactgagcagtgtgcaactcccgctctactgtgtgtagccaatcctcggcatccatggggtctgcagagtgggcgaagatagggggaagacctctcatgaactccacacgtttgtccctaggcatctgtgacatctgcacttgcgattggggctatggttgttgttgcacctgctacatggctgctagggtctacccaattgcctgcactgcttgagtctgcatcaggaacatctgctctattatcatcgggggtggtggtggaggcagccgtggctagggtgcctcatcctagggtgcctgctgctctagctgggtacgccttccacctcaacgcctattgtcagacatctgcggaatgcattcacacatcagaactgatcttgcaatctttcaacacaagaaaaggcatatagatatcttcacaatactgaatgaacaaccatcatcactgattctcaacacatccaaacacaactttcagataaagaggaaagaggaagtaaaaggttgcccaactaaataacagactttattaatactataattaaaccaagctgtagggaacacctacattttggttacagtcattacaaagatccaactccatcacatgttcaccataacatagcataaaacacatgataagcaaattatcctcactatctaagactaagacgcttgacttaagacttattacaaactccgacgctagcggtctaccgatccaaatctagcttggttctacagtcaggtgtgccataagcatggtaccctcatggcggtgagcgatacgtgtggcagaacctcccaagttattgggcccacatgcacctgcccttgtctcaaagacctcaaacggctatgcatgttcaccagataacttaacaggatccgttcgagtatcccaaggaccccgaataaaccacttacaaccaagatcgcaagattaagtaaacacaaatcacacaccaacattttgcagcggaatttctttattacaaaaagttacaggttacaacaaatttacattatatttatcggagtggttacaaaagtggttcaaagcaatatactttgaaatgttaaaaattatttataagtttgaaatatatgctagctcaatgacaatcctcaataagaagtatagaagagctattttaacctataagaaggccatgcccaccagcgcttaacatcatccacagcagcacaaattttagtacctgcaacaacatgggttcgaaaaccctaagtacgaagtgtactttcgcaagtcttacccgactaaggaaaaagactctcaaggatatgctggatttgggaatcaaggaaaggcttttatcaaaaatcaacattaatagtatgcagaaagcttactaaaatgagtccttactttcaacattttaatgctagattaagtattaatagaccttgtttgcatctagtctgatttcatcatcgcattaatcaatacaacatgatttttgctcattatgat

SEQ ID NO: 33216 - DNA, 198 bp, Zea Mays
tgtaggccatcgtccagccaaagcagacaccaaatgcctgctattccttaaagctgacaaacttggagaaggagaatatgagatcgtgatcacttgatagccacctcacatactcctgtagtaccgtgcggggcgaggatggaggacgcgaggggcacctggtggagtggtggcggctagggcaagattactccgtcg

SEQ ID NO: 33217 - DNA, 3342 bp, Zea Mays
ggcggaaccaaagccggcccacgctgctcgcctgctccggcgaccgccctccgcctccgccctgagtgacatcccctgcgaccagccgctcgccggcggtgttcgcgcttcgccggcacgccggcgtgcgccctcgtgtgccgtggctgctgcgtgccttgtccaccgaggtgactggaagccactattgatataaagcttcctagaagaagtttgcttgttcaatttacatgcaatgcatgtggtgaaaggaccaagcgcttgataaatagagtagcctatgaaagagggacaatttttcttcagtgtgcagggtgccaggtgtaccacaagtttgttgataatcttggtctagttgttgagtatgatctacgagaggaaaatgtggtacaaggagaaaatgtgattgatactaattctgaagattgatctgttgtgagaagcagtgttggtatgcaaaacatcctgttgtagcctgttgtctgaatgtctgtaggttttgacaatattgattatttatataaaatgacattttagttgctgcatatactcatctgaatacatgggggcctagatgtattttatagtgtgatatatggttttatgaaggaaacaaaggatcacgatactagagtaccctgcatttccaaaaaagacctgtcattaatatgggaccaatacatttttagcagattattctggctcttgtgatatggtactaatatttgatatgcacactactttgcaccattattggcctgcatcattgagattttgatcaactggggcaattttgtagtcatcaccttcgctatccttggcatcacccttctttcccttgaggaaccgaataaggcccggtgtcgtcattcctcataagcacttctgagatctctgttggagtcagcatcacctccttaggtcaatgcttgtttaccagtacacgagaaaatggaagctggatgcttctttaccaatacaccagcatttacagaaccactaggagcaacagcagcatactatgtcaaaaaccaacatgagacgccggcatggtttggacttgaatggtctctcctactgttacgcgatgaaagtatgctatcaggatgaagaatgcatgactggaacaaggaaggaacgcagcttcatggagtggttagggtgggttccgtcaaatgacactgttctcacagaatcacaagcaggggccgttggatgtctgcacttcgcagcagcaacaggatgacgatgacgaggatgcccgtgaatgcaggtggcagtgcaaatgtgcggtttcctgaaagcgaaaaaaaagggtggtgtttcgagtggcctccagtacaaagaccgcacagagcgagtggagattttggagaaagaagatttgtcggagtgggatacggaagcactgcccgattccagatctggcaggacgcaagggcactctggtctggtctggcaggataaatatacgatgatggtggtgcactggtgctgcgtcttttgcatatttattatgcaaatagcaacactaacataaaaaaaagatagaaaaaagaagattaaacccaaagtttggtctctggtagcctagtctgcgctgagctggtagtggtaaagtgataaaacaagcagtgaaatactaactttgtgcaggacaaaaaaaaagattcaatagcactggcctgaatggaaagatgaaaaagatagaaaagaaaagaagattcatcagtggtggtgctggctgcagtatcaaatattccctgacccaacatgctgggcgccccggattccagaacaggcacagtgggctctcctccgctacagcagcagcgacaacgcacctccttattttccttttttttttttttttttttgccccaacccacctcgttcggtcgcttttctttgctagtggaagtggattggttgattgatcgcacagaagaagaattcacacccacacacacagaccgagctgccgtccgctgctctctccacccctcctctcctcgcggaacaggcaggcaggcaggctgggattccccgtccgcggggggaggtggcattcgccgctagggcaggacggggaaggctggcgtccggcatggcgaccgaggaggtactccataaggtccagagtcttatattgcgctgccttcagatgtacatggaccagaaagaagtggtcgatgccctctcccaccactcgaagatagagccctgcattactgaacttgtttggcgacaacttgagcatcaaaatcctctgtttttcaaggcgtactatatgagactaatgcttaagaatcaaataatggtcttcaacaagcttcttcaggatcagtttgaggttatcaataaagaattttcttcagggatcccttctatgtcgcttcctaatggctctaactccaacctattgaagcaaaatccatgctttttgccagagactgctcctggatctgcaatgccagatggtataatgcacaatggaagttcgcgtggtataataaatggcacaccatctggcgatcaattgctcaatgctagtaaagacttgcatggccttcataatggaatagatgcttcgactagtctgcagtcagaccagaacgcagctgctgtgctgtatggtgtagacaacgagacaagtgcaacgataaagaccgagtcttgctattcgagcaatgctgattttgctttctgtgggaatactttcctggaatcgtgccagtcaataggcgatgcatctggtggtggatccttcagtagctcagagctgaacgggcaaccactaaacgattcaattctggatatggaatcatcgtcatttagcttcttgaaccaaatgccccaaagcttcatctttccggacttgggagacgatttcaaccaaagtgcagagataacacaatttctcaccccggaaacaaatttctccgattcgacagggggagaccatacaggttgagcggggtcatgcacagcgcaccaaccatttgtacatacgctcatgggcagtcaaacctgcactgatgaagagcttgaggaccttttgatctagctgtttcttttttctactcttctcgtcttatattgtggtagtttatgggttggtcttctggtatgccctgcgatggcgtcgttatcgtgccttgtacattgccgtgcttgtgtaagaaacattaggagcggcgttgttcgcgtcagcattgatttggctaattcctccgcttggcttggcttgtacaacgaattttatcaaaatattaactggattctgaaatcgagattttcgaccatcggtttgtgctattgtgtatgctgcttccaactatc

SEQ ID NO: 33218 - DNA, 3659 bp, Zea Mays
atgctctgctttggcctcgcgagctcgctgcgggacgccctagccgctgctcgccccgaccacatctccctggccgagcgctcccctgttgaagccccttgccgatgccttgccctcctccctccccacggtcttcttccccatggcgtcgggatccctccttccgacggctgtgctcctcaagcgtgctctactcgagctctgccggatctgcaacttccctgcgcgcgaccgcggcacatggtcctgtgctgcccatggcctcaactctccagctccctccatggccgagcaggcgctcccagcagcagcgatgcttgtttcctctccctagccactacgccatcatgctcccgctgcccctgcctttttttcctaagagccgagctccattcctggccgtgcccaggaagtcctgtccgtgggttggggccaaggctttccctggttggcctcgccgtgagcagcacccccgatatctgcgcgcgctgccggctcgctgttttgggaagcccagtggacaacacgacgtcgacgctcaccgggtgtttgctgtttttgcgcagccccatccgcgacgtcgttcacccccgaaggcaagccgctcaacgctcgtcgacgttcggagctatgcacaaatcagaatcgccatcgttcttacaaacgccgattgagtttgtttatggaacgaaagaggatgatcgtgcaagtgatgtggtgccacccacaagatgcagtcggtggacgaaccaaggaaggatggacataacaagtggatgctcgccaagcgagtacctcccctagcaaacactatctaagtgttaaattaaaggcaagctctggttttatgcataaccgtttattatgatattttactacacttaatgtttgtaggtttataatgtgcacttaagtgtaggagttgattgaaaccctagttgcatgaactcaggaatccttttgagatggatattagtatgctaggttgagtagctgctttactaattagggatctcggtagaagtcgagtgatttttctagcactcgtgcgaggtcaggacttggttgtatccattttgataacagaataatgatggtctatagacacggatccatggggatgcgttgtctacgagatgagaaattggaataaggattaatgtgcggatacctgtgtcaagcgtttgaacatactatacacatgccgagaaatatggtaaatcgtatacacatgccgagaaatatggtaaatcggtaagcctagtagctgagtgaacctagcagcagactttactcctgacacgacctgagacatggtctcccattccggttatggtgggtacaagtgtggtcactgcacgacggcagtcagggtcagtgaggcattgtacaccaaggcggtgagccctgatttgttgacggggaattgatggggacggttgatgtgtgtggggacggagtgcctcgccacgtcgtgtgtttaggtttaccttgcaaggataaaaactcaattcgaatcgtctgcttctcgcagctaatgagactgcttgatccattgtactgcattgagtaataagtggaaatgaggtgactggcaaaagatgttgattgatataatgtttgataccatgtatgaatagctaggtactcatctagttttaaaaagatcatactaaaacttgaaaagctaaaaattgattttagactcagctagtgcttttggcaaaccaaacccctcagcaaaacagctgcatgtctagaggtagaggagtagactcctcacaccggttaagtctagctgagtattagtatactcagccttgcttgtggcataattttttgcaggtactacttaagatgattgattgctggtgtgacttggccttcatccctgccaccgggatagatggtcgagagggttattgcttccgtaggagaggaccagaaggagtagcgtggccaggcttcgccatgttactcggttttctccgttagttatttctgctgcattaaaatttatggttattatttctgaaactccgataatgtaatcactaatgatactttcttaatttatggtattatgttttattgtatttctctgtgcctcaccttcgagtgagctagtggtattcgatcctggtaagtggctttatcggactagatccgagggactgacgggttattcctgtttaagtgtgttgctgcccttaagggtgtgacttaggcacttaagctggaataattcgggcggttccgccacaattactctaggaggaaaattttatgctaaagtttggctcaatggtgggagggagatagtagatgaagctatcatccgagatgaagaagtggtcattccggctcattaggcccaggaagaggcttagaaagccgaagaggctgtagatcttgaacgacgtatagaatttgtctacctccagaaccatatgacccagaacagatccatcgctaaagtgaattctggatgaatttagggtggtaaacgtagcaatagatgaagccatcaatttgttactgaacaaagctacggagaaggatgtatggggaatagcacgaagcggtatgcaggacctgcttcagctgattctgccgtacttcggcttcagctatttgtttctgcttctgaatagtgacttggcatgtccttgttttatgccccttaacttccccacagaatagacagaacaaccttcttggttgggagttgaatcttccaccgaagcttctacctcctctgcctcttggtgctggtggcctgtaggaactttgctgcgtccctgatgattgggagctttgctggccttgagtgtgatttcccttgttgtcgcttgagttgggattatggattgtcctgacatgcctagggtggagtcttcctctgaagcccctggtcatctcggagtatctatatgcttcttcccttctctgtcgaaagtcattgtcgaccctgatgtactcgtccatcttctacaaaagcttctccaaagtttgtggtggcttcctagcgaaatactgcgttgtcggtcctggtcggagccctttgatcatagcctcaatactcatttggcaccattggcgcctgttccctgagacgccaaaacctttcgacatacacctgcaggtattcctcatggtcctgtgtgcattggaacaaagcttaagcagttactggcttcgtctggaaaccttggaaactagttactagcatgtccttcagcttctaccatgacgtgattgttctcggccgaagggaggaatactatgtttgagccacgttcctaactgccatgacaaaggacttcgccatgacggaaatgttgccaccatatgatgatatggtcgcctcgtagatcctaaggaattgcttcagatcgaaatgcccatcatacatgggaagttgtggttgtttgtaggatggtggcgatgaggtagcctgcaactccactgctagagagaagcatcattaaaagtaaagttaccatgatggaaatcatgataccatacatcatcatagcttgggctttcttgatgaagctctctctgttgtgtccttcgtccttgctcgtcttgtgtgatatggcacatttcttcggcagcttcatgaatctttttctgaagtttagctagccaaagca

SEQ ID NO: 33219 - DNA, 1826 bp, Zea Mays
gcgtgtgcgtgtgtctgttgcctcggcccacatcacgccttcgcttcgcgccaccgccgtccgccagttcagctcaccctcgccgccggacagatagaagaaaattattggcgctctgacaaatccaactgaggttttcttggactacagatgaagcgggctcgaagggcgtatgtgcaagagatgactgatgagggatgctagtgaaattgatgaacttgttacgggcgtgctggcgaccgtcatcgaaccggcatgcccgaacaggctcagatgttaccggtaggcaggatggacttctatggtacaaggacgccgggcaacatgtcaatggggagttctccatggctgttgttcaggcaaataacttacttgaggaccagtgtcagatcgagtcgggcccactgagttttctagattctggaccatatggcactttcgttggtgtttacgatgggcatggtggtccagagacggcctgctatatcaatgatcatcttttccagaatctgaaaagatttgcatctgagcagaatgcaatgtctgctgatgtactgaagaaggcatatgaagctacagaagatggattcttctccattgttaccaaacaatggcctgtaaagcctcagatagcagctgtcggctcatgctgcctggtcggtgtaatttgtggtggcatgctttatgttgccaatgttggggattcccgtgtcgttttaggaaaacatgttaaggccactggagaagttttggctgtccaactgtcagcagaacataatgttagtattgcgtccgtgagaaaagaactgcagtcaatgcacccagaagataggcacattgttgttctcaagcacaatgtttggcgtgttaaaggactaattcaggtttgtagatcaattggtgatgcatatctcaaaaagcaagagttcaacagggaacccctatatgcaaaatttcgcctccgtgaaccttttcacaagccaatactaagttcagaaccatcaatcagtgtgcaaccactacaaccacacgaccagtttctcatatttgcatctgatggactttgggagcagttaaccaaccaagaggcagttgatattgttcgaagtagcccccgcagtggctgtgctaggaggctgataagagcggcactgcaagaggcagccaagaaaagagagatgaggtactcggacctcaagaagattgaccgcggtgttcgccgccacttccacgacgacataacagtcatagtagtgttccttgactccggcctcgtaagccaggcgagcacacaccgaggtccaactctttccttgcgaggcggtggcggcagcgctggcctgcgcagcaacacacttgcacctacgtgactataaagtgcctggtggagtggaggctactgactgaaggagaggcgccgaagttcctcaccagcgtatctgaatgccctcaatggtgtcaagttgtggactcaagtggatagcttcgctgaatcttctgatgatgctctgtggaaagctcgaatcctttccacctgaaaaagcaagtaatatgtcttccagtgctggaattaacccctagtgcatatatatatgtatgaaataataataaggcaaaaggaggagtaacttatttaactaatgctgtgaggtgtatttatgttttgtatgtgtactgctttttgactgctactgcatctactgttgttaattgaccactggtgaagtgaaatcactggtttcgtcttgctgtctcactgttactagttgttcacagcattgctggtttgactgttcctactatatacatatagtttatatattata

SEQ ID NO: 33220 - DNA, 3483 bp, Zea Mays
gcttcacttgctcgtctccgctggacgctggttggtggttgccttcgctcttcatccttcaaccaccaagccttggcatcgttctgccctgcgtgtggcggcggtccctggagaggagacaagccgactggcatgcaggcgtggtagagctctcacttcccctcagccaccaatgctaaagtgcgcataagctgctgggagccgatattgcatccgtcgggagcttggcaccaacaaaagctcgagttttccctttttcagcttcggtctggtgcgtgcggcgcggcgcctcccggagatgatggcctcctcgcaggagaaggccacgtcgggtgtcctgaggaacgcggcggcgctgctcgacgaaatgcagctcatgggagaaacgcagggtgcgaagaaggtgatcaactccgagctgtggcacgcgtgcgcggggccgctagtgtgcttgccgcagcgcgggagcctcgtctactacttcccgcagggccacagcgagcaggttgctgctaccactaaaaagataccgaattctcgcatcccaaactacccgagtctcccgccgcagctgctatgccaagtccacaacatcactttgcatgccgacaaagaaactgatgagatttactgccagatgaccctgcaaccgttacactcggaaacagacgtcttcccaattccaactcttggtgcctataccaaaagcaagcaccccaccgaatacttctgcaaaaatctaaccgcgagcgatacaagtacgcatggcggcttctcagtgccgcggagagctgccgagaagctgtttccgcaactggattactcaatgcagcctcctaatcaggagcttatcgtccgagatttgcatgataacatgtggacgttccgtcacatttatcgccagccaaagcgacatcttctaacaactggatggagcctttttgttggggcgaaacggcttaaagctggagactctgtcttatttatcagggatgagaagtcacagctccttgtcggtgttaggagggccacccgacaacaaccggctttgtcttcatccgtcctgtctactgacagtatgcacataggcgttcttgctgcagcagctcatgcagcatcaagtggtggctcatttactatttactacaatcctcggacaagcccgtcgccatttgtgattcctcttgcgaggtacaataaggccacgtatctgcaaccatctgttggaatgaggttcgcgatgatgtttgagacggaggagtcaagcaagcgcagatgcacaggtgctattgtgggaattagcgactatgacccgatgcgatggccaaactcaaagtggcgcaacttgcaggtagaatgggatgaacatgggtatggagaaagacctgaaagagttagcatatgggatatcgaaactccagagaacatggttttctcttctcctttgaattcgaagcggcaatgtcttcctagctatggagttccgggcctacaaattggatctgtaaatatgtcatcaattccaagggcacaaggaaatcctatcggtaacttgcagcacatgccagggatgggctcagaattggctctactgcttctcaatcaatctggccagaacatcggaagtccaatcgcttgtcaacaatcatcattttccagcattattcaaaatgctaagcacagctatttccctccaaagacgtttggtgcttccactgcttcaatgaagcaagaaagcatgccttcgactgaagcccagccacagttgaatgctcttggtattcagagaagtgatcgagtaagctgtgaagttcagacagctagtgattcaaatcctgcacaggagatgagtgttaaaccaagagcaccaagaagcacagattcacactcaagccaaagcatttcggatcaaaacagcaagggtgagcctagaacaaaaactcgaaggagcaagaagagctcgtatcagaaaaccatttcagataaatctgagctttgttcagtaccttctcagatttgtgacgacaagaagcatggttcagagccaagactggctgactgtgaagccgaacaagctacctgtgggaataacgaagaatcatctggagcacttacacatggtgattttgctggagagctccaagttcagcagcaggttgaacagcatgaactacttgcgccaccaaagatagaatcatcaaagtcacctgatggagggaagtccgtcagttcgttcccaaaccaagggtgtatcccacagttctttgagggtctggactggatgattccaccttcctattaccaagactccaatggcatccaatcagttaccgcgtcggataacatttttaatccatctgaaggtataccttccaccatgaacgctgatgccttggatgcgtttcaaacatcttgcctttctgagtgctttcctagctccattcaagagttcatcggcagtccggatataaacacactggcatttatgtcgcctgagatgcaacaattggatgccggcagcaacttgccgagcacatccaactcctatgtgcagatgagtttctcggaggagagccacagcgcatccttgagtggccttcacatggaagccatccatataaacagctcgtcatgctctcagccactggcgacggggagcttcgatgcaggggcgttcccgaaactgtcaaacataagagaatgccaacccttgcctctgcaagagatccacaccagttccatgggaacaccttcatgcagtatggacgcggcggcagagtacggcacggatagaagtgcgaagcaaatgaaaccaccggtccggacctatacaaaggttcagaagttaggatcagttggaagatgtattgacgttacacggttcagagattaccatgagttgaggtcagccattgcgtgcatgtttggactccaggggaagctggaacatcctggcagttcagattggaagcttgtttatgtcgactacgagaacgatgttcttctcgttggagacgatccatgggaggagttcatcaactgtgtgagatgcatccggatcttatcaccttcggaagtacagcagatgagcgagaacggcgtgcatgtcttgaacgactgcatccaaatagcttagcaaagtcacggctgtatgctctacagcctgcacagtgtaggctcttcttgtaaataaaaatatacagcatgtgcgtcaaattctctggtcgctctgtttcttttgtagcacgagaagaaacaattacagatgtcaacatcctgccaatgccatgtgtgtttctttcaggagtcaaattatttttttacgaagctgaatcgagctaacggacgtgaggaaattctgtaaaacaactgttaatcataaattctgtaaaagtatggtgtcgtggtaggtggggcattaccttagccttccggatgagctggctcgacaacagaccattccattcatagtgagggggcggt

SEQ ID NO: 33221 - DNA, 1739 bp, Zea Mays
atacatagttattctgttttaactgaaatagtttgtcgatttttgcgtgggaacaacaaatacatgatggtaccccttccatccaaaaaatgcaaggcctctatttgacaaacagtcgaactcttagtagaggcggtccagaggtcgttagtggatagtcaagaagagattcacagttgatgtcgaacaaataaaggaatccaataaacttactgcaacattgagaagggaaaatcctacatcagctacatgtataatcgaattatttgtataaacaagataggtacaggcagagcaattcggtagagagaagggagggtgcatgcttgcagcctcattagattactcagttactattttaggctgtcttattgcgccttcatagttggaagtagtatagattttaatcttctctgtatgagcttaatatacttttatttagcttcttgcaagcttgaatttcctggtgctcaaatgccacctgccacttttgtagtctctgctcggaactgtgttttcttactctaattatacatatacgttcatatagagatggaatcaccacccctcacggttgaagcgaccgcttttaccgagaaaatgatggacatgactttggaggatataatcaagatgtgaaagaaaaagaatcctggaggcaagaaaccccctaggcggccggtaaactctaaggtctataactctggatgtgtggtggtgttgaaattagttttgtgtataactgttccaacttcaaatagcttcgttttaggtgctatgtttgggaataaattttccagttaaaagtacatgacgtccacgatggactttcttggttttccaaggctcagttacttgctgcgatatattcctttggtgaagttttgccgtgcaccatgtgtgtatcttcaagattaaactaaattttgcattattcatcggttttcttaattcttgtagttgaatagctttaacctgaaacaatacaccagtcgctttcgctgttgtttactttggtggatagtttctattgggaagtgatttgacaccagcaaaggcatttacttctcttttttatttgtagtctgaaggtttagggttttcatgctctcgactctgatagctaactcaggaacgaaccaatggtaacaattttcttcatttaatggtggattaaatgaaactatcttcggtctttggtacttgctcaacatctacaataagtaggtcagtggaacatatgtcctgtcaccgttagattgggcgatcgaaccatggtacatcagtcaccttctttaatgatttttttgttctacttactaatctgctgctttactcttccctggtgtttgtactgacctttttaggaaatcttgcagaactgatattcaatgtaaaatattcagtgtgatagaaaaaagaagattagtcgagtatgatctttatttcaatctgccaatgctcttgcgtgtcaatggatgtttgcaaagacaacagatgccaatgcagactggcttcttcctaacaacaaacctcaacaagccaagagagacgacaattggcgacgtaggaaaaaagacgcattaatcaataacgtgtggattcctggcagtggcgtagacaaggggctctaaggtttgtacaaacatataaatacatattaattactactattttttaaatagttaagtatataaaaacagtgactgattcaataaagatttgttatttcttttgtt

SEQ ID NO: 33222 - DNA, 359 bp, Zea Mays
attcggttttatacaaaatatatttgtatactattattagcaagatgtcagagatatttatgtactatatttttactatagatgagtgagacgaaaagtgttatgtaagttacagagtagaaacaaattctactactgtataaaatcatttcccatcccccaccccatgaatttgagataggcttatatctgaactttggaaagtggtggaatgtcaaattccaaactaaataagttactttagtgagtgaattccaattcctttaaaatgaagggatccaaacatcccgttaggaaaatagaaatcccttaggctttgtttgggtaaagagggattgaagtggattgaggtgtattga

SEQ ID NO: 33223 - DNA, 1614 bp, Zea Mays
accccaccctcccctcccatcgcgattcgcgaatcaccaaactacccctcgttgtgaaaggaaggagacgaacgaggcagcggaaaggggagaggatttttcagattttccggcagcgacctacctagcccagcccagcgagagagaccgagcgacagcagctaccttctcccgacatgacgccgcatctgcccgccgtctcctcctcctccacgacgaccacatcccgcgccgccgccgccgctgccgcgcctccgtcctcgccgcatcagtaccggaggcggaggcggcgccgggtgccgggctgcctccgcccgcgcgccgcgtccgtccgctgctgcgccgcggcggcgcccgcgccgcaggcagcggtgcccgcggccgcgcgggccgaggcaaccacgcgggtcttcgtcgtgtccgacctgcacacggactacccggagaacatggagtgggtgcgccgcctgcccgccgaggtcggggcgggcaagggggaaggcgtcgacgcgctcgtcgtcgcgggcgacgtggccgagacaagggacaacttcgcgcgcaccatggagatgctcagggatggattcgccgccgtcttctacgtgccggggaaccacgacctctggctgcgccgcgagggcggccgctactgagctgggtgtggatacaggcccaagaacgataggtgacttgggaatcataccattgttctcatggtatcacaagagctttgacaaggagaaggatgttagcagtgtgcgtgttccgtcgctagaaatggcttgtaaagactttcatgcttgccaatggccttcagacctgacaaatgatgatgaggctcttgctctttactttgacaagttgaatgacaagaatcatgatgctactgaagaagtgaaaagtagcagcaaacagatattaacattttcacacttcgtaccaaggcaagagttgtgtccagagaaacgtatgctttattacccataccttcctaaggtaattggatctgattttttggaaaggaggctgagagatatacacagcaacagaaaagacggaggagcttgccatgtttttgggcacactcatttctgttgggattccgtggttgatgagatcaggtatgtgcaagcccctctggcatacccccgagaaagaaaacgtcggatgaacggcgaaggttggctgccattttgtgtataccgtgacggtttcaacccagaaatatatccggcattgtggtcagactactacaacaagaacaaaagggaacccgagaacactcagctcgcgccttgggttgccagccatttcgcgaggtaccacaagttccactgaccctttctaagttccctggctttttgccgaagtggatgcagttcgtctgttcaggatggtgttgaaacctgcatttacctgggaaaaggagatattgacgttttacctgtacacgatctttttcttgtttccactcttaccataacttttgggcaaagtaagcgctagcatctgttttgtactagtatgttgcacagatctgaataatgtgcataagattcttcaaagccttgctgcagtgcagaaatagtgaaattcttcatcccttttaaatta

SEQ ID NO: 33224 - DNA, 1676 bp, Zea Mays
aaatcggcagtggaccaatcgccgctcaccaaggccacctcatcacccagccacgttacatgaccaatcgcctgcgccgtagcgcgcacacctacgtgtcgagccgtcttcatccctccgaccggaaatcaacggtgcgtttgcttctctcctccggaaggttctcggcttctcgcaggcgcggcgaccggcttcaaccccaactcttcttcttcttcctcgcaaacttcgaacgggacgagaaggaagcggacgcgagaggagactaaccgacctcggatccatcgacgcgtgaagatgtcttcgcccgccgagtactacaaatcacttccacctataagcaaggcatatgggacattgtgtttctttaccaccgtgctagttcagctccagattttgcacccattatttctttacttagattaccccttggtgttcaagaagtttgagatatggaggctattgacaagtttctttttcctggcaccattttccatgaaatttggtattcgccttctgatgatgtaggttaaagttttgctgactactgattataaaatagtgacagttatgaactatctataattgtaaattagctttggttgtttggatttgctttatcgtgttttggcatgcagagcaaggtatggtgtcatgttggaaaagggtgcatttgataagcggactgcagatttcttatggatgatgatatttggtgccatctcactattgtccttttatcttccatgggctatgctcttattggatgtgatatttgggtcatcattaatgcctggacttctgggtatcatggttggacatctctactacttctttgcagtgttgcaccctcttgccaccgggaagagctacctcaagactcctaaatgggtacataagattgttgctcgattcaggataggcatgcaagcgaactcacccgtccgtccaccagccaatggcaacagcgggtctggtgtgtttagaggaagaagctataggctcaatcaatagattcacccacctcgtaatgtgatccatggtcggagtggcaatgtagaagcaaagaccagaacgcatagtagggtcaatcaaaattaagggttacccgtcagagattttcttaaaaaacctggacggacggaatggagaacccttccatttgctcatttagttgctaacaatgttcatcgtccatgtttacacatgaatataattctgtaatgacaatttgtgtacacttatgctggacttattgtcgcctctttttagctaggataagaacaaaagatgatgagtttgctcatgctggtgcttttggtccttactgggtggatttgtgcatgctgaacagcagaaggctagatctcgggttattgtcatctggcccaaaaaatgacatcaacaggtttccgtcacacaagatcggagtttgctgataatattgtagagacaatttagactttgcttgatggttgtcatacgtcaatgacgtcgaaagaaaatctgagaacaatacggctgtaaatttcacctttgtgtaattgtatcatagatatcgtcgagaaatcccaaatgcagtaatggctcgttgagcagaacttcaacactttttgcgctaggttctgggcattcatcatcatgttaacatacttcaagaaacaaagatgacaacg

SEQ ID NO: 33225 - DNA, 1334 bp, Zea Mays
ccaccccaccccacccgcaaaaccgaatccaaataatcgccaccgctctccgcaccgaatcgaagaaagcggcgatggcagcggagaagccggctccggtgcgcgtgctgtactgcggcgtctgcggcctcccggccgagtactgcgagttcggccccgacttccagcgctgcaagccctggctgcgggcgcacgcgcccggcgtctaccccgacgacctcgtcgccggtccctcctcgtccggcggtgcgggtggcgacagggacgtcgacaaggtcggggagcgcctccagggcgtcgggatctccgacggctccagcagcgccgcaggggatgcttccgcgtctaagcccgaagaggtcaaacgcctgcctggtgagattcgtcagattgtccgcaacaagcgcaaatgtgttactgtggtgaagggacttgaatggtttggtgtaaagctgagtgatgcttcaaagaagcttgggaagaagtttgcaaccggagcttctgttgttaagggcccgaccgagaaggaacagattgacgtgcaaggggacatatcatatgatattgtggagttcattacagatacatggcctgatgtacctgagtcggccattttcttcattgaagatggaaggaaggttcctgccgcttgatgtcactatgaggcgcaggaccaatggatttacaattataacacagagataaagcaaaggcgtggctgtcaaggcatgtagcggccataccagttcgtctctttgtccgaagtcatggactgttcttccaagttttatcaggagtggcgttttgtttaccaccgtcacctgcttccatcgtggaggagaagggaagaggagacgaagaaaggagaggaacacgggaagcgcgtgcaggtggtttgcgacatccaatccaacactgctctggtgcgagcagcagccagccacttgtattgtcccccgagccacgctacagcctacagctggactgccggaggcgtcgcaccagcaagagccgcgcaaaacatgtcagtgtcactgcctcactggcttcctgcatcgcttcgctccggtagttagtgcgacggtgatcgctggggcaagcgtatgcgtgtcttcttactgtgctgctggttggatttgcacgccaaatatgacgtggacgcctatcacatcagcacatgtataatagtctgcaacacttatatagccacatactccatgtaatgtccagcttttaatcaccctgccctaaagcttgggcattaactaatgcaagcatcgggttcactgtatcaaatattactccctccatccaaaaatcttcatcgtctgagc

SEQ ID NO: 33226 - DNA, 1991 bp, Zea Mays
ttcggctgcttctatcttgcagctcagaaacatgtggtcagtttccctccactccgtcggtttttttttttccttccattatctgcatgagcagataactccaaacgacgggctgagaggtgctgtgacactgcaggcgataaaggtatataagccaaacgcttttgcaaactgggagcctgggatcaccaaatggaccgtgttcttctgagctcccacttgccatctcacgctcatgcaaacacgaggttgcagcagggtcctggtggcctcaacagtataggatttgcagtcataaaaaagggatgcttgaagttaagatgttacgcgatcggcgatgaactcggtggtccagggcgctttaatttctttgtcagtgacgcagagggtgatccagacaaacctaccgatgggttctcctcgatcgaccaggctataggtgctttgcgtgaagggaagtttgttattgctgtagatgatgagaacggcgacaacgaaggcgaccttgtgatggcggccactctagtggaccagaagtcagtcgcattcatgatcaggaatggctctgggattatctcggtaggcatggaggaggaggacctgactagactgatgattccgatgatgtcccctatcacagaaatcgaagatatcacggctgctgcttccacggtgacagtggatgccagggttggcatatctacgggtgtgtcggctgcagacagggcgaagaccatcctcactctagcctcctctgactccaagcccagtgatctgaggagaccaggccacatattccccctcaagtaccggaacgggggcgtgctgaagagagctggccacacagaagcgtcggtggatctggttgcgttggcaggtctccgtcctgtgtccgttctctccaccgtcatggaccccagggacggttcgatggcaggcgtaacggttctccagcagatggctatggagcatgacatacccatcgtttcgattgctgatctcatccggttagtatatcctaaggtataggagaaagcgggagaagctggtggagctgattgctgtgtctcgcttgccgacgaaatggggcctcttccgagcctactgctaccagtccaggctcgatggaaccgagcacatcgctgttgtgaagggcgatatcggcgacggcgaagaggtcctggtgagggtgcactcggagtgcctgacgggggacatcctcggctcagcccgctgcgactgcggcaaccagctggagctggcgatgcagctgatcgagaaggccggccgtggcgtgctcgtgtacctccgcggccacgagggccgcggcattggcctgggccagaagctccgcgcctacaacctccaggacgagggccacgacaccgtcgaggccaacgtcgagctcggcctcgccgtggacgcccgcgagtacggcatcggcgcccagatactccgtgacatcggcgtgcgcacgatgcggctgatgaccaacaaccccgccaagttcatcgggctcaagggctacgggctcgccgtggtggggagggtgccggtgatctctcccatcaccaaggagaaccagaagtacctcgagaccaagcgcaccaagatgggccacgtctacggctccgatctcccgggaagcctgccggagttcgccaacccacaagaggcccccacagaacaagacgacgacgataaccaaaactgataaaaaaactatacggtgtcgtttttttaggaaaagataccaatataaccacaaattcttgtattccactgagaacgagtattgcagagtatttatttatcaactgcaaaattattaagtataatagagatacaaacttttatcaacgcctcttttacggaggtaaagcatgtttctccctaatatttattagagcctcatgtaagagaagcggatcaagctctcggccaggtactttccgtctgattggatgaccgcgcccatgcgtacaatctcg

SEQ ID NO: 33227 - DNA, 2331 bp, Zea Mays
atgtccatatccattccacttccacccatccccgtggcttctgtctgctgcgaccctgctccactccgtctgcatcacctgtcacggttgtcacctccaccacggctccagctccacccgcgctggtttagggccgctgctgggcgggtgacgagcgcggctgtcggattccgccgagcctcagtatgcgggcagcgggcgcggcctccgcctccgccacaccagccctggcgttccccttgtcttcccctatatatacagatcgatgtgtgttgttatctttattggaacaaatggccagacgtatttcatcacggcttcacttgttacaagcatccagaatttcccaaagagcaggggcccaacagtgggcatcctcaaaggatttatgggcctaactagcgccattctgacacaagtttatacagtgatgcacacaccagaccatgctgcgcttatcttcatggttgctgttggtccgtcgctggttgccattggcttgatgtttgttattaggcctgttggtggtcacaggcagatacggccatctgacaagaacagcttcatgttcatctacactgtatgcttgctcctcgcctcataccttgtcggtgctatgcttgtccaagatttcctgcaaccaagctatgatgtggttgtttttctgactgtgattctgttcgtcctccttatttcaccaatcgcaatccctgtgattgtgtcgttcatgccggaaaaagctcaacatctcatggaagatgctctcctatctgaaccattgacaggagaggcaagcagttcacgacaaaaggaggatcaaccagaggtcattttaagtgaggtagaagaggagaagtctaaggaaactgattcattgccgccatctgaaaggagaaagaggattgcggaattgcaggccaagctagtggaagcagcggcaagaggtggggttagaatcaaaagaaggccacaccgaggggataacttcaccctgatgcaggcattggtgaaggctgatttttggcttatttggctatcacttttgcttgggtcgggatcagggctgacagtgattgataacctgggtcagatgagccaggctattggttataaaaatgcacatatctttgtgtcactggtgagcatatggaactttcttggtcgtgttggaggtggctacttctctgagatcattgtcagggaacgtacatacccaaggcacatagcattggcagttgctcagatcgtgatggctgctgggcatttcctctttgctatggcttggcctggaactatgtacattgcgagcttgctggttggacttggatatggagctcactgggctattgtgccagctgctgtctccgagctttttggtgtaaaacactttggtgcgatgtacaattttctcatactagcgaaccccgcaggatccctcatcttctcagagctaattgtcagcaacctctatgaacatgaagctgagaaacaagctagccaacaccagatgtcagcattgctgtctccacgattgcttcgtgatactggctttcttgcagatgatgcactcaagtgtgaagggcctgcttgtttctttttcagctctctgattatgtcggtgttctgtgctgttgccgctgggttgagcctcctcgtcgttcaaaggaccagacaagtttatcctcgcctctacagttctgtccggacttgagattctccaattctgcatggatgggaagctcaaatcctcgtattctatgtccgtttattcttgcatacatatgcacaaagataagaaaagccagaagaataccttgtgtttcggttgacattttgttttctacaaccagacataggcggggtggactgcctcgttcccagtttataagctttcggcgctgagtattggactgtcccccaatgtatacccatttgtcatgatggtcagatagttgttgtctttataaggattcaaacaggatttagtattgctcataagctatttctgacattggggtgtgaaacaaattgtgagggtattccacatcttttgcatgtattattgtaatatccttattcctgacaaaagaaaaaagctcagggaaagcatattcaggcactcggttgtctcactagtccaaccatagttgtttagtcctgtcgtcctctatcatcaccctatagaaccccttgaaagtgttcattgtctttaatacatatttccaccagaaagatcacacctcccttgagaaaggtattgttccacccaagtaatgcttgcttgttccaaacgatgtttacccacggtatattgatctgttgaagaatttg

SEQ ID NO: 33228 - DNA, 2611 bp, Zea Mays
accggtggcctatatataggcctgtacgcaggagacaaatgaaggaggaatatattatcaaaccaatctctctctctcttgcaatgactctcaagcgcctagggctgctaccctagaaccaagcctgcggcagaggggtataacctcgccggagaagacagctatcctcatggaccgaaggtccatgacagacatgtaagactcgttttggaccaaaatctgatcatggaatggccacttcatctgcgggaagtatgactcctaggtctccaataacaactccaagatcaaatcatatagacatgcttttagccggtaaaaatgcaattaatgagagtgatgatcttccacagattgtcgaacttgctgatattgcacgatgcatagcaaatactcctctggatgaagaaagtgcattatctcaaatggttacctgcatagaagatctccaagaaattgtcaactgcaggaagcatgagtctctcacagtgcagacatttggaacacgaatagaaaaactacacagggagaagtatctgcagctctgtgactcggttgatatggacaaggttgattcagcaagcaccataatggatgaggaagacaacgttgttcgtagcttgcgcgcaagtcctgtccatccaatcaaggatcgcacttcaattgatgactttgaaatcatcaaacctattagccgtggagcatttggacgtgttttcttggccaagaaaagaactacgggagacctttttgctataaaggttcttaggaaggcagatatgattcggaaaaatgctgtcgagagtatattggctgaacgtgatatattgattacagtcaggaacccttttgtggtacggtttttctattcgtttacctcacgggacaatttgtatctggtcatggagtacctgaatggaggggacctttactcattactgaggaatttagggtgcctggatgaagacgttgttcgtgtatatcttgcagaagttgtactagctttggaatatttgcactctatgcacatagtccatagggatctaaagcctgacaacttgttgatagcccatgatggacatattaagttgacagattttgggttgtccaaggttggtttgattaacaacacatatgatctgtctcgtcctgttgttagtggggcttcactgtatggagatgatgagcctcagatgaatgaattcgagcaaatggatcaccgagcacggagacaaaatcgttctgctgttggaactcctgattatttagcaccagaaatccttttggggacaggacatggttgcagtgcagattggtggtccgttggtgtcattctatttgagctcattgttggcatacctccgttcaatgcagaacacccccagacaatttttgacaatattctgaattgcaaaataccttggccgcatgtcccagaagagatgagttttgatgcacaagatttaattgacaaattattgacagaagatcctcatcaacgactaggagcaaatggcgcctcagaggttaaacaacatccatttttcaaagacattagctgggatacccttgctaggcagaaggctgccttcgttccctcctcagatagtgcatttgatactagctacttcaccagtcgctattcttggaatccatcagatggaaacatatatgaagcatacgagtttgaggattccagtgataatggaagccttagtggaagcagtagttgtgtgagcaaccgccaagatgacatgggggaggacagcgatggcctcaatgagtttgaatctagtgcaaatgtcaattattctttcagcaacttctcgttcaagaatctatcacaacttgcttccatcaattatgatatgctcaccaaaggattgaaggatgatccaccgccaagaactgaaacgtagcaatcaatctaaatttggactctcatccgagtaatcaaacagtctacaaggtgttcgcgggatgtaggtcttgtacatatcaaagtgtgaggcatggtctgttccaattgaggctgttcctacatctcgcggagccgagtacagttttgttgttaccttgttttcatgaccaattgacatgccatcatcagtgaatcacccttgaccgaattgggcagagcgctgtctttttgttcccctttgctttttttttaaaaaaaaaatcagtccattatgagccttgggtttggggagattggcccaggttactgtattcagaatacaacccctgaagatgtaggtgggttttaggaaattgtcattctagaatttattctggacacatttagctaactgaacaagccctaagctggtagcccgctggatttcctgcggccagaaatgttcacagcattcttgatggccatgggatacagcattttgctaaatgtgtccagtgtcccacagaatctgggacattataagaataggaaccgattgaggctggtgctgtttgtttcaacagagagtacgggaacggtaatgcaactagcaaacggtgataattgtcaaaggaataaaaacgctctctgtttggttcagctttgggagcgcagcatccaaatagttgccgctgagactgaaagtttggc

SEQ ID NO: 33229 - DNA, 6326 bp, Zea Mays
tttgtaccattttatttttctattagttagacggcttcttctggtgtctcacgccattcttccattagggcatgggttcgaaccccacctcatacaccattttgtaatattttacgttgatttaactaaatggcccgacaagctaacgggttggcatagcatggtcagcatgtcgacatgtcgtgcgtgggccggagatactacccgtgggcgtcgggcctagtggggttgtaccgggtcgtctgtttggccatctatatacgtagatatggtttgtaacgtggaggttggttgcatcgaaggaacggtcgtacaatggtttatttgaaaatagatgtgagatattatttataaaaagatgacgcagaacgaccattaaaactattgctttaatacaatagagacaacgactatagaggttagagatggcaatggagacccgatccccgattccccgcggggaattcccctattaggggacgagtatgggactaatttagtccccgcaggatctaaacgggggaagtttaatcccatcgggttcgcggggacggggacggggaaccatcatctatccccgttccccgtttacccgccctacaaaactattttattcaagttagtcaatttacttgttaaaattatagtaaaaactcagtgcatagcatgttataaaataaaaaactaaactctaaaatagatgtctcttgtaattttcaatattgtttgttaaatttacattaatttgatacaatcaatttaaatttatctttaaatattgtacttctagcggggatagattctccgcgggattaccggagataaattctccgacaggaatgaggatgagagaaaaagctcccccgtgagcgtttacggggatggggacaaagaatttttctccccgtggggatgggatgaagagccattacccaacaggaaaatccccattatcatccctaatagaggtatagatagagaagatatattcaatttgatccacgtaaacccgaaaagacatgaagaaaaaaaataagtaggccaaaagtcagcgtgagcaatccgccgcacaaccccccacgacggcggctgccccaccgcgccccggccaccgtgattcgctgggccccgccgcctaggtacgccgtccccagaagccagaacgcgaaaagcgagcacgggcggtggcccacggcgtcgacgcccaggatccggtgaaccttccggtccatgcgagaaaagagaaagggtatcatggcaccacgctcacacgactacgcgagccgaggtggcggcggcgtcgtcaccggtcttcgacggcgatgtggcgcattggggtgccaggaattttcctcgcctagtcttttttttccctttctgagccaaacggaagcgccattaaaccatctctctcccggcactcccacgctcgctgcctttctttggctggcagccgctggctccccacctgtccctctccctcacacccttttccccccgtggcttctctcgctgccgcccctccgcaataaaccgctgccagcccgagcggctccatcgccccgctcgcgcttttcggagtgccaaaggccgtgattccagcgctgctttttttggaattcccgaccttcttcctctcctcgtcgtctcattgccattggagctagcgtctcttgcacagagacaggaacgatcccacaacgttgcctcgttgtttcctcggaattcttgcttctcctgccccttgttcctcgggattaatcttgcttcttctgcctctgctctgtgaaattcgaggtttttgatcaatcccggtgctctggtgtcgttgtttttcaggcccagggaggccgcgatggcgaacctgacgaacggctttgcgagcctccattgcgcaggggcgatgcatgtggacaaagggcacatgcaagcatcgggactgccttttctctctttcagaagatgcgcccagcttgatatctccagactaggtagcgtgcctcgtttcatgggcgcaacatctgctactgtctcccaacatcatgtgaggcagaggatcagcgccatcagagcctctactctttcctgcctgcaagacgatgccacaaaattctttgattttgtggttattggcagcggtgttgctggcctaaggtatgctctggaagtttcaaagcacggctctgttgctattatcaccaaggcagagcctcatgagagcaacacaaactatgcacaaggcggtgttagtgccgttctatgcccctcggattctgtagaaagtcacatgaaagacacaattgttgcaggggcttatttgtgcgatgaagagattgtcagggtagtttgcacagaaggtccagagcgtgtcaaggaactaattgccatgggtgcctcattcgaccatggtgaagatggtaggctgcaccttgcaagggaaggtggtcattctcacaacagaattgtccattctgccgatatgactggaagagagattgaaagagcactgcttcaagcagttcacaatgatgataacatatctttgtttggtcatcactttgctattgatctattgacatgtcagttctgttgcagaaaaatggtgaaatctattgctatggagtggattcaatagacattgaaacccagaaggtagtccgcttcatctcgaaagtgacattgcttgcatcaggaggagctggccatatatatcccacaaccaccaatccaccggtagctactggggacggaatcgcaatgtgtcatcgtgctcaggctgtaatatccaatatggagtttgtgcagttccatccaactgcactttcagatgagggcctgccaataaagccaaagacaagaagagagaatgcatttctcataacggaagcggtgagaggagacggaggaattctttacaaccagtccatggagagattcatgccgatgtacgatgaccgctcggagctggcgccgagagacgtggttgcgaggagcatagacgaccagctgaagaaacgaggcgaaaagtatgtcctcctggacatcagccacagaccaagagacaaggttcttgcccacttccccaacatcgccgccgagtgcctgcggtacggcctggacatcacccggcagcccatcccggtggtcccggcggcgcactacatgtgcggcggcgtccgggcagggctgcagggggagaccaacgtgaagggcctctacgtggccggcgaggtcgcgtgcacggggctgcacggtgccaaccggctagcaagcaactcgctgctggaagcgctggtgttcgccaggagggcggtgcagccgtccatcgacctcatggtggatgccgacggagatgccagaccgtcgctggtggcgaggtgggcacggccgacgctgccgcggtcggtgctgggcgacagcgtgctgtcggacatcgtggggcggacgaggcaggccaggatggagctgcaatcagtgatgtgggagtatgtcggcatcgtgcgctcgacggggcggctgaagcaggccgagtggaggatcggtgacctggagtcggagtgggaggagttcctgttccggcgggggtggaagccgaccacggtgggcgtcgaggtctgcgagatgcgcaacctcttctgctgcgccaagctcgtcgtcaggagcgcgctggccaggcgcgagagccgcggcctgcacttcaccgaggacttcccgtacctggaggagagcaggaggaagcctacggtcatcttcccggccgccgtgcaggagctcacgtggagctccaagccgttgcagaggcagctgcaagcagatgacaatgcatgcagttcatccggctgggccttggggattcgttaattcattcattaatttttaagaactctcagtcgacagcatacacaaaatccagacagttaggctgtagtagcctgcgtatctttgcaattcttgccagttccagctgttgcaacttgtaaacggtgttgttggagctgcattatggtttatgaaccttgatccgtagtatatgtatgtggtgattggctgattgcacaccaactgatgaccattgtgatgtcatgcagaaaaaattgcgagaacttctgaatttcatttaccacacaagtgagttgccatttgacatgtagatacatcatcgctagaagttcagagttcccatcacatttatacacacatgaaacctgcaccaaaaactttgttcagaaatgaagttgtcaggatcagctacatgtctcggcggaacagattgtatgcggagatgagggagcaaatggcgaaaacaacaaatgccacgaaagatatggcaatggagccgttcgccatgctcgggaaggaatcgctcccccagttctcaatcaaatcacttgctcgagcagttgctgatgacgatgacgatatcagaaggtatgctaccacctgaaacggcaaaagaagttaccatcatgagagcaagctcgtccctggaaattgggagtacacatctatattcacaatagttggggatcaggggcggactcaccacccaggcaccgcaggcggtggcctgggctggctcgccagctgcaatggagggcaaggcgcgagcacagtgcacggaagcaagcagcacgtggcacgagcacaggcgtggggatcacaccgtattctcgcctaggctgtcatcagttcctgggtccgccactgttggggatagacgggggagaaacgagctactccaatgcacagtttggttatctagtcgattctattccctaagagacagaccaggtgaccaattgtgattagtcatcgaccagggcgactaaacaacactagtagtcccctatatgtcaggacaaatatatatcatatactatgtatacaagtgcagaaccaaatctacacaagtgcagcagccaagacacaagccagcacccaccagcagcagtagacatacacatcagtaaatggcagaaaagcagaacaaacaggaattgctacaccgctactgcagcagtcaagattcaggaataagatctcaagaaaatggaggaatggaggaagtaccatgatcgtgagctcatcctcgcagaccagcagcagttaggatgggaagggttgcaaattggtccaaaaaaattaatcccaaaaacttaaaccgaagtggctccagccatagtagatgcacccaatgtctcagctgctcagcaattgcaatatgtttcttgctgctcaccccctagccgcctgactaatcatgattagtcatcacatgtctagaaaagtaatcagtctaatcaggttgtagctcctagtcgagtccagagtagcgattaggactactaaccgtgattaattgaatgacttaataacactgcaagtttcaaccctgaaactattgtgtttgtgggatacttgttgaagttagccatctaaactatctatttaacctttcacaaagtcaattctggcactagctatcacgtgcttagaaacagggaggaatggagatatgtcacctcaaatgtaagtgacaaggaggcagtatcaagtttgtgtaactgacaaaataaggagtataattgacactagtacagtgacatcacagtaaaggtgctgcacaccaatattatggtcttgtaactctatgcacttgagcacatattcgttgtgaagacatattaactaagcaagctcatgctcatcaattgctcactcactcaatttacatttgagcatggatgcaatgaacgtgaaaatgagatatgtcgaacatgccaatgatcttgctgatcctcatgtataaagtatcaagagtaagctaggttttatttccaggctgatgttgaatattctctactcaacttcagataagtagcaattaacatccacaaatattcatcacaaatttggatgacgcaaagtttagcacaggataggacgatcagaatgcaggcatttggtgcgtatcatatgaagaggcgatgaactaaccatgccgacttcaatccaggcagcaaatggagggagcataaattaaccaaggagtgtatcagcaatcacaagtaagtcatctccttcaccaccagattaaaaagcctatactgtgcttcagtaagacgacttctaccaattcctcttcctcggtgtaacatcatagcaaggagggcaaccatttgcacagccgtaaacaagcctacgaagagcgagcggtaaagacgacacgaggcagcaggcacacacctgatccatggtgaagtcgaagagatcacgcttgggatggggaatcaaatgcttgttcctcctcatgagctcggcgagcg

SEQ ID NO: 33230 - DNA, 2592 bp, Zea Mays
gaaaagactactcacacacgtcaaactgtcccccccgacgcaccgccccccgacgcaaccgcgtccgcgtcggaccactgccgccgaaaccctacacgcccccgccacgccgcggcatggcggatccgccgcccgtggccgcctccgcctcgccggcgcagcccgaccagctcgccgccgcggcctccgtgtccaccccgcagaaccccaaccccctcctctcccctcaaattcccccgtccccgaccgtctccgacctctccgcgcacatctcgtccccgcagcagctcgaccaggcggctgcggcagctgacgcttcgggcggcggaggatccatggattacctcccgcgcccgccgcagctgcaggcgccttcgcccacgcaggcaggggtcggcgccgcggggtttgcccagatcccccgctcggggtcgacctcacgcctctccacggccacccagctccagcagtacgcggctaggatgtacggcgggcagatgagcttctcgggtggcggagggctcgtgggccagcagcagctggcggggcgcgcccccatgcttgggcagggccagctggggatgctgcaaggccagggtaacgcggcatctgcggcacattttgggcttcagtcgcagatgttggcgcaggctaggcaaaaggtcatggcacaaaacacccaattgaataatgctaatacagctcaagtgctgcaagggatgcagcccatgggtgtcatgggtgctatggggatgaaccagacgagaccgaatgtaactattccctatggtgctcaacaaaggtttgcccaggcacaaatgaggccacaagcatctcaacaacctgcactgtctccacagaaggtacctggtcaaggtttgtcgaggacagcatcaattaccgcattaaattcacaactgtctggatcatcacaaaatggacagatggtggcaatgtctatgcctcagcaacagcaacagcagcagcaatggttgaagcaaatgcaaccatccatgggctcaccactttccccacagcaacaatatcagaaccagcagaggctcctgttgatgcagcatcttcagcagaagacaggattgaaccaacaacaacttctccaaatccaacaacagcatccacatctcaatgtccaacagctgattaagcagcaacaatttctgaagcagtttcagcagcagcaaccgctacaatctcctcgtgttttagcatctggttcacagaaatctgcgaatcttacaggctcgcagccgggtacaccattgtcaggtggaactatgactggtggaagtggaagtcagggagctgaaggaactagccaacttcttgggaaaaggaaaatacaagatctggttgcacaggtagatcccttaggcaaggttgacccagaagtggaggatttacttctagaaatcgctgatgacttcattggctcggtgactgcatttgcgtgtaccttggcaaagcacaggaaatcatcagttgtcgaagccaaggatgtgttgctgcacttagaaaaaaattggaatttatctattcctggtttctcacggggggataagaatcctcaaagaaattctgcaaagcaactggtagatccccaacattcagaaagtgatgttactggtatcagaggcacaagcaataaacttggtgctaataactcggttggaaatcatcaaatacgacctccgatggcagaaccttcagcaatgccaacaatgggccctctatcaaaagcccctcgcttctagtggttatgcttctcttccctatcgaaggaaaaattcctgtaagttcacggagtgactaatgtggtgcttcctagtttttaatgccaatatttaacagcccaaggttattagttttatgcccttgtttgctagtaccgttatctcagtatctgcttccattttagactttcaagtttctgtattatattaatgtacatggtactccaagattgattaagagtgtagcaaaaaaattcaaaagatgtcccgttcttgtttgagagtgacgcaacttgtgcatgcaacctacccagtgtatgatgtgctctaacaatcccaggattggactagaatagccaaaatcatcgactttgtatgctaaatattgtggagtgtcaggatactgaatgttctgattgttctcacaattagccttctgaagtttcaggacaatctacctggaaaacaacccgtaggctctaactcaaggattgctagcaagtggaagcacaataaatccacgagcatctgtggcaaactgcagatgcttgtcttacagttacaggaaagcagttgctgacttaccaatcctctacatggggtcatatgtaactttattttattttattttatttttgtgcccgtaaatgcccccatccgttgtatataaatgtttttttttttggcaatggggcattatcgtcaccagttttgatgttgctaggtaggtgaacaaatactaaagtggatgcaacttatataatttaatgaaatgtaagattgatgtcatttttcgttactgagcagctgtgccttatctaaggctggttttgggactttc

SEQ ID NO: 33231 - DNA, 1033 bp, Zea Mays
acagcacctcgatccatcgttcatctcacagcccaacccagcccagcaaccgcgaatccgtgttcatctccctactcgatcggcagccgcaagagctgaccctccgcttccccccaaaaaccctagccatcttgaggaagggaaagatgtccgtttaggagattggaaagctgctgacattgagatcttgaatacattccagctactttcagctaagccagttgtctatttggaacatggtggtgaaaccatacttcctttcagctgtgcttttgaacagaaactagtggatatgccagaagatgaagccgccaaatattgtgctgaaaaccagataacaagcatgatcccaaaaattatcaagactggttttgcagcaattcatctgatatactttttcactgctggtcctgatgaggtaaaatgttggcagatcagacgccagactaaagctcctcaagctgctggtgcaattcacactgattttgaaaggggtttcatatgcgctgaggtaatgaagtttgaagatctgaaagaactgggcagtgaatctgctgtaaaggctgctggaaaatacaagcaggaggggaaaacctatgtggtccaggacggggacatcatctttttcaaattcaacgtgtctggtggcgggaagaagtgaataatgtatgaagatggtagcatcaacagtgttttacgtcttaccccgaatttctcattcaacagtgtttacaccttgccccgtatttccacatttttgaggtcgcttgccagtagctctaggttccggtatcgaaaacttgtacaacaaggctccagaccgttgaaggatttgtattaataacatgcacaattgtatggcttgtgcttgagctctcgctgttaccagaagcttagaatcgtttgagttctgtggttcggttttgcgtggtttattgtgtaagctggtctaactgcaaatgatttgatgcttgtggcgggaacaaatgtatcaaccgtgaagctagttgtggaagctatgtgtgggtcccct

SEQ ID NO: 33232 - DNA, 2360 bp, Zea Mays
cgagcccctcaaatcccccttttcttttctctttccaccggtccccgagctgcagcacaagaagcgattccagctgttgtcttgcatctcccttgtgctatctcaccccatgttcgcacaggaaactgaagaagaggggtcagggcacagaccgcttcacgcagcagcccgcccgcggtcgcgcgtgcaaaaggagcgcacttgcgaaatgagctagaagatggcgatttagtggaggcgaaaagctgcgatggggctgggtcgtcgatggagaagtgctggcagcgtgccctagctctgggatttatcttacaacaagttgagcggatcaatacctgattccctgccaactttgccttccctacgagttctaaatgtatctggcaaccagctgagtgacgaatccctatgtaaaaattatactggaccacttattttcagacgtgattttgatggctcagtatgcaacaaaccttcacccagcccgtcaagaaataaagtagctatcatagctatttcagtagtggttcctgtgttagtactaattgtactacttcttacatatttcatctggtggcagaaaagaaagcctattgtgcaaccagtacccacacatggctcaacaagagatccagaacctgataatgcttcaggaatcaaaaaaagttatggctacaacctgaatataactgagaatcgtcagttcacatacaaagagctggagaagttcactaataatttcaagaagttcataggacaaggaggttttgggcccgtctactatggccgtttggaagatgacactgaggttgctgtcaagatgcgttctgaatcatcgtcacatgggcttgatgaatttttagctgaggttcagagcttgacaaaggtgcatcacaggaatctagtgtctttgattggttactgctgggaggaagatcatttggcgctggtttatgagtacatgcctcagggcagtctttttgatcatctgagaggtaaaaatggtgtttctgaagccttgaattggaggaaacgtgtacaggtagtgcttgaagctgcacaaggtctggattatctgcacaagggttgcagtttgccaatagtccaccgtgatgtgaagaccaacaacattctcttgggtcaaaatctgcaagctaaaatagcagattttggactttccaagacatatctgagcgacacacaaactcacatatcagtcactccagctggcacagctggttacatggaccctgagtaatgtcttatctttccctgtgtattctattaaaattttggtatttttccccatgtagcttatttttggatgagtgctaaatgaaagaaaactagtacatggtttccttgcattttttccttattcaataaaattatactcgtctggcgactattggtgtgttttgcggatgcgcatgtagtgcagcttgagtgaggcattgtagccagctgctgttacgaagtgcttgtcttgtactccctctgtcctatattataattcgttttggggttatagtgggttcatacaacatttgatgtatgcattttagatatgtgtctatgtttatcattatccatttgaatatagacataaaaagaaagagataaaacggatattattttggaacggagggagtaacttgttgtcgctgtttcttcaggtactaccagaccggaaggctcagtgagagcagcgacgtgttcagcttcggagttgttctgcttgaggtagccacaggcgagtccccgacattgccaggccaaggtcacatcaatcagcgcgttaaacagaagattgccactggcaacgttggctcgatcgctgattcgcgacttggaagcgcctacgacatcagctccatgtggaaggtaatcgacaccgctgtgatgtgcacggcggactctactgctcagaggccaacgatggccacagttgtgatacagctgaaggagagcctggcgttggaggaaactcgtgaaaagggaagtagcaacagggtgagccgagggagtgatgtagaagctatggcgtccacacttggtccattcgcaagatgaagctgtgcctgtacctggattcagttcatggttgacgctcgtgaactccttgtcatgtgaagacaactagtagcgtataattgtgggctgttttgaaccagcaattgcttgtgtgtgtatggactttgacaaaggtttggtgtgagcttgcagcttctccagaatccagatgtcatgctctgtatgtatctttgacaaagatttcccgtgtctatatataactgcatggtactaataacataaaggattgactttgtttgaagcgagggatcgagaaattgagcgtg

SEQ ID NO: 33233 - DNA, 3218 bp, Zea Mays
cctcccgtaagctccacgaccggagagagagagagcgcgcgctatccaagccaagaaactccccccgtagtccgcggcccgggctcacgaccgatccggtccgggcccgatggagctcctgagcggcggcgcgctggcgtggcagcagtaccgcgcgctgctccgcaagaacgccacgctcacctggcgcaaccgccgctcggcggcgctgcagctcttctcctcgctcgtattcatcttcctcatcttctgcatcgaccgcgccgtccgctccaggttctccagtaccaccgcctaccgcaacgtgcccgacccggaggcgctcgtcgcgccgccgatcccgccctgcgaggacaagttcttcatcaagtccccatgctacgacttcctctggagcgacggcgggagcgcccgcatcaggggcctcgtcgacgccatccggaggaacaaccccggccgacccatagcacccgaaaaggttttaggttttaggactccagatgatgttgatgcttggttgtttcaaaacccaatgcgttgccctggggctttacattttcaagatataaatgccactcagataaagtatggtattcagacaaactctactccggtagcacggagaggaacatatgaagaccctaccttcaagttccagataccactccaagttgcagctgagagggaaatggcaaggcttctgattggagacccaaattttagctggactgttggatttaaagaatttgctcacccagccacggagaccttctctaccattgctcaagcagggccaactttttttcttgccattgctatgttcggatttgttttccaaatcagtgcattggtggcagagaaagaactaaagcttcgtcaggctatgtctaccatggggctctatgaatcggcttactggttatcgtggtttacctgggaggcctttcttacaacactttcagcactttttactgtgctctttgggatgatgttccagttcgatttcttccttcataataattttggaatcctattcctcctgttcttcctattccaactgaacatgcttagttttgctttcatgatatccacgttcgtagcgaaggcagcatcagctactactgttggatttgcaatattcattattgggttcttgactcagcttgttaccacctttgggttcccttattcgtctgactacaaaaagttgtaccggacattgtggtctttatttcctcctgatttatttgccaaagccctcaacattctaggcaaggcaacagccactcctgaggataaaggttttagctggaatcagcgtggggagtgcccatcttttgagactgactgtgtcattactattgatgatatatataagtggctcatatccacatttttcttgtggtttgtccttgcgatatactttgacaacatacttccaaatgtaaacggcgttcggaagtcagttttctactttcttatgccttcatactggacgggtaaaggaggcaagatggaagagggaggcctctttagcttttttggttcaagccgtcctgcagatgatgctacccctactgacgaggatgtccttgcggagcaaaacctagtaaaggaacaagctgcaaacaatgcggtagatcctaatgttgcagttcaaatacatggtctacgtaagacatatccaggaactttcagcattggatgttgttgcaaatgctctaaatctaagccgtttcattcggttaaaggcttatgggtgaaccttgagaaggaccagctattttgtcttcttggtcccaatggagctggaaaaacaactacaatcagttgtctgactggaatcacaccaattacaggaggtgatgcattcatttatggtcactctgttcgaagcactgtgggaatgtcaaacatccgtaggatgatcggagtctgcccacagctaaagagcacatggaattgtttgccagcatcaagggattgcatccagcagcaatcacatcagtagcagaagagtcattagccaaagtaaagctcagccaagtaactaatgctcgagcaggcagctacagcggaggaatgaagcgccggctaagtgttgcgatcgcactgattggtgacccaaaattggtttttctcgatgaacctactactggcatggatccaataacaaggaggcatgtctgggacatcatagaggaggccaagaaaggaagagctattgtcttgaccacccattccatggaggaggctgatattcttggtgaccggatagctataatggcaaaggggaaactgcggtgcatcgggacatcaataaggctgaagtcgaaatttggaacaggatacattgctaatgttaatttctctggaaatggccacatgcagagccccaacatcaacagcaacactgaggctccggttaatccgaacatagaagctgtcaaatggttcttcaaggaacggcttgatgttaatccaaaagaggagagcaggacattcttgacatttgtcatccctcatcacaaagaaccacttctgacgagattctttggagagttgcaagacagggaaggggagtttggaatatcagacattcaactcggtctgacaacacttgaagaggtgttcctgaacattgcaaagcaggcagagctggagacctctactgctgaaggtaccctggtgactctcaacctgtcatcaggaacaacaattcagattcccaagggggctcgtttcgttggtattcctggaactgagacagaggagcatccaagaggcatcatggttgaggtgtactgggatcaggatgaaaatggatcgctctgcatttctgggcactctgacgagatgcccgtgccagttcatgctgagctgaggaggcctccgtcactttctcgtagggcctcaatggaccgtggacgtccagttgggtatatgattgacctgaaccaggtcccatgaaaaaaaggatgagtccaggtgcaacgtttagattggttttgatgcagattatctggtacatatagtatataggaatcttgtattcgtgtctttgtattagaagtcgtaaccttgtattgcagtagtaattggtaaagacatgctttgtaaaatatcctatagtgtaacacagtattttctgttgtatggcaaacaaaggctcgaaatatgacgcaatagaattacatggtaactacaccctgcgtctc

SEQ ID NO: 33234 - DNA, 3600 bp, Zea Mays
gcgattactagatgtattagagggtgtttgattttcatgttaccaaatatgtaaattaaaatatagttttagtttccgtatttaataatttagcggctagaatgctagaaattggtccctataaccaaacacccccttactatcgagggacgttttctagataatcaagttattgggtgctatttaggtttcctaaagtgtcacataagcatgaaattgatgaaacttgcgttaacaaaaatggaaggtacatgagctagccgagacgaggcccgaaagagagcgccattttcaatcggcgaaccagtcttagaggtaactctagttgttatctaaaagatttcctaaatcaataatttagatagctaatataaaacttatctacaacagttctctaaataaattttctaaatttaacaacttctcatctaaccttattttctctctgcatttggtaataatttagcaactctctgaaccaaaatgttggctccattacattgataatgaagataattaatacatttctgacttattttttatgtggatagatacaaaacaaaactaaacctatatttagagaattattggaaaactcataatttttatttctaaagttatttagcaacttattaaatctatgatttagacaactaaaatttagataactattaaagttctcagctcaacccccgcagatgtttttaattcgatttttattcgaaccaagccccatctctctcgtcttccacctcctgcgtcctgccttccccacccccaccgcacagcgcccggccggccccaaccagacagctccgtttcccctccccgtcctccctccacctcgaccgcgcaccaaacccgaaagcgcagccacatcccctcctccagccagcgcggccgcatccctcctccagccagcgcacttcgcatctgctccgcgtcaccccgagcggcggcgcctgcccccaccgggcagtgtgtacggccgcctcgtgttagggactggcggggcgcgagatccgggctgcaagggcgggcagggggtcccgttggtggcgccgcggtgtcgccgtgatctgcgatgagattgggcccggcggcgcggtactcgctgcggaggtagacggccatggcgaccaacaccaagcgcgcctacaagctccaggagtttgtggcgcatgcgtccaatgtgaactgcctcaagattgggaggaagacctcacgggttcttgtcaccggaggagaggatcataaggtcaatctttgggctattgggaagcccaattcaattctgagtttatcagggcacacaagtgctgtggagtcggttggttttgattccaccgaagtttttgtggctgcaggagcagccagtggaacaataaaactatgggatttggaggaggcaaagattgtccgtactcttactggacatagatcaaattgtatgtcagttgatttccatccttttggggaattctttgcctctgggtcattggacactaatctgaagatatgggatataagaaggaagaattgcatccatacatacaaaggtcacacacgaggagtgaatgctattagattcacacccgatgggcggtgggttgtgtctggtggcgaagataatatagtaaagctctgggatcttacagctggaaagttattacatgaattcaagtgtcatgagggtcagatccagtgcatagattttcatccccatgagttcctcctggcaacaggttcagctgataaaactgtcaagttctgggatttggagacatttgagttgattggatctacaggacctgagacgacaggtgttcggtccatgacattcaatcctgacggaagaactctgttatgtgggttgcacgaaagcttaaaggttttctcctgggagccaataagatgccatgatactgtcgatgtgggatggtctagacttgctgatttgaatgtccacgagggaaaacttcttggttgttctttcaatcaaagttgtgttggaatatgggttgttgatctgacgcgtcttgagtcatatgcaacgggtacttcaacaaaattaaatggccattctgaattgaagactgtgtctagtggcactatgcctttacaaaatgatagtggttcaagggctaacatagggcaatcatcagtcttgcaaagttcagagaataacttaaaagcttcctcaggaagactgtcggtttctcagaactcagattctgctcccaaagagactaaatcaacaccctctagcgggttggtcccaagcacaccacaaagggctggatttagctccaataatagatctgttggaaattcaacttttcaatctggtggtaccactaccaccttgaagagaagttcgttgcggagtaacagtgcctctaatgttcacaatttcagtaaagctgatatagtgcctgtcattgttcccagagctagctcaggaggggagttggttacgggttctagaagtgatgctggtgatgtggcacctgttctccctaaggtaaccagaagggctgatccttctagtgattctagaaaagaaagtaatgatgtggaacctgttattcctagagcaagctcaacaatggaaatagcctctgattcagcacccatttctacttccaagtcaggcagaaggttggaggctgcccctgattcaaaaaaagaaagtgctgatacagcacctgctgttcccaatcccagggcaaatgcaagaatggagatggcctctgattctgcacctgctcttttaaagacaaacaaaaagctagattctggtactgattcaaagaaagaaagtgctgatgcagtacctgttattctgatttctgattcaaggagagaaccctctgctggaagagtatcaccattcagaatccagtcaagatatgctgagctgcggaagctagcccatgccaaaattgacagaggaagtaaaactactggaacagatgacttcaattgccaaatatttcttccccgtaaaaatggtgtttttcaaacaataagttctgaagaaacccgtaaagatgtaaaatgtggtccagttgacaggacggaattttcaaattcatcagaaccaaatgcaagtgtccgcagtgagaattatgtttctagaatgcgcaaaccacgagataactgctatattgaagtttcaagaaaagggagagcaaggtcaagtgtctgtaattgggaagggcgggaccagtcccctagtcacgaagaaccgatgacagccagttcttcgctggctcctacaggccgtccaaattcatctgtatgtctaaaacaagccataaaccttttccttttatatgttctggtacttcatttttttaactcccaaaggttgtaaatatgtgggtttgttaagcttgaagatacttgtgcttactttattatctgatttcatttatcatggttcatggtggctgctgctgtcccattgattcttgtgcatgcatcatgggcctatgactcaaccattccttcaatcatactcttgccccaggcccagcctacacctatcactagttcccatttgaaaccctgttgaattccaataattcctatgaa

SEQ ID NO: 33235 - DNA, 2338 bp, Zea Mays
ggaaattgatggaaccccgtttctatgcgttatccaaagagctgcatagcagcgcttctcccagccacgtcttcatcacacacggtcgcggcgcgaagcaatggcgaccacggcgccgctgctctcgccccagcgcgcttgccctacccatctccggcgccgcctctcgcccctacatctcgtattccccctcgacgcgtcagcgaggcggctgcgccttcgccgggcgccgccaccttgttcggccaagttcggcaagttcgacgcctccgacgccccggcggaggccgaggaggcggggggcgcgacggatggtgggctggcgcagcccgtggaggaggacgacagttgcttgccatcggatttggagggcgcgattcggcagtcagggaaggcgagcgcagatttcgtaaactccggaggcatgcgagctatcgcagaactgctgatccctcagttggaattcctcaacgaggaaggagcacaggctgaactctgggcgttgtcaaagattttcctggacacacttgtacaagagacaggacaggtttggatacaagaaagttactgccattttccctgacgctggagcagctgcccttctcaagcatcaatggaaagatgcacaattcaagtgtgccagtttaggtgaccggaagccagttggtcctgaagatgaggtcgcagttatgattatccctgatcatcagatgctggaagctgttgaacgcatcacatctcaactctctgatgatcctgtatggaacttatgcctgatcagattgcaaatttctgcagatcctgtgtaaaaaatatatggaaaaaaagaaatttcattaatgttccaagcagattttgtagaataaagtttacatgaacaagagtattaggataaagggcatatgtgcagtgtggtaaatccagttccaggccataaatcaaccatatatttccatgttgtatattgtgcaaattggctaactaagttccatatccacccaagtagattcatcctagatcaatattcgttggcctagccctggtccagctgaattcctagatctgtccctgcatgcatgtgcttatttttttgaaatgaaccaggcaaagcatgcatgtgcttatgaaggatctaaaagtctgctccagcagattagtctattccacctacatgtataaccatttcatgaaagaactcatgtgaatcttcatgcctaaaactaaccatccatatctacaataatttaacattgaatttgaccagcaaccatctttgtatttgtatatatatttcatttaatgctatcctcaagtagtgtctaccttttaatgaagataagacctcttgtcatgtggaacccacggcttgttagtggagatgttggagtaggctttaatgtacggaatctgcggagaaatttcttaagcacttttaccactgtttactcgatgaggccattgccaactggtgcagtctttagatgctttccagggcagtggaaagtgttttatgatgatccaaataggccaaatcggtatttgcttgcccgagaactcacaagtaggcccgatgcaactgatattgagagaatatttggtggtgccgatgagcaatctgaagaggcaccatcgttgatgaacaatgtcatgggcgtgttcagttccgtgagtcggtttatgagggtcatctccaagtgagagtcgaagcaaacattgttcacacttgaagccatcaacaaccatcatgatgcttgagttatacaagaagattattttagtgcatccatgttgttttcagtctgtaattactccatggtactgctattcggaacagtatagtttggcgttccggcacatgccaccaaatgtgtgcacataccataccgtggattcctggagtcatctgctgatcctacaccgtgaggtcaattatgtaagtgtgacttagaaaaaaaatgtagatagatcctcattctggaaaaagccgggtatttgattgtaattcaatactgtgcttgatatatcacaatcagctcgcattttgtaattcaatactggacgaatataaattcaatcctttgttttacatgtgtgttgtgtcagtcaatcagaacatttttctactctacagtgagtcagaatatctatcctctaaagtgacacacttatcctcagtatatatagttatatacaccgaatactgctgaaataaccatttttttaaggaagagaaacatttgaatgaagtgacctaaatacagtacattcagaatcttgggccgatgcgatcagtgctcccggttttccacaggagaggcggaggcgctgtgagagcctg

SEQ ID NO: 33236 - DNA, 3879 bp, Zea Mays
tcccctcgcgatttccacctcctcccccacccccacctccgtaacccacttccaggtgggccccccacatcgccgccggtgacacgcacctccctccctgcctcccccgctaccgaccaccacgtccacgcccccggtcatgacgacctcgccgccgcccgccgagcaggaacagcaggaggaagaggaggtgctggtgccgcatggcccgcaccaggagctgcccaatggagcgcagccaatggaagttgtgcctgctgagccagctgctaccgtggagaaccaacagatagaggatccaccaatctcgagatttacttggaccattgagaatttatcaagagttagcacaaagaagctctactctgaaatttttgttgttggaggctacaagtggcgaattttgattttccctcgggggaataatgttgaattcttatctatgtatttggatgtagctgattctggagtcttgccctatggatggactagatacgcacaattcagcctctctgtggttaatcagattcacaacaagttcacaataagaaaagaaacacaacatcagttctctgctcgagaaagtgattggggtttcacttcatttatgccgctgggtgaactctacaacccaagtaggggttatcttgtaaatgatacttgtatagtggaagctgaagttgctgtgtgtaaagttgttgagtattggagttatgactctaaaaaggaaactggctatgttggtcttaaaaatcagggtgctacctgctatatgaattctcttcttcagacactctaccacattccgtatttcagaaaggctgtttatcacatgcccaccaccgagaacgatatgccctcaggaagcatcccactagctctacagtcactcttttataagttgcagtataatgacagcagtgtctctacaaaggagctcacaaaatcgtttgggtgggatatgcatgattcatttatgcaacatgatgtacaagaattgaacagagttctttccgagaagttggaagataagatgaagggaactgttgtggagggaacgatacaacaattgtttgaagggcaccacatgaactacattgagtatctccagcttgatgtcaaaggttgtcaggatgtctatgcttcatttgataagtacgtagaagtggagcgtctggaaggtgacaacaagtatcatgccgacaaacatggcctgcaggtcctagagccctctgaggcgtctatggaccacaatgggaggcaacatgctcatcgctactggatgtcttcaattccttgtaggtgtgttaaggatgcaaaaaaaggagttctttttatcgacttccctcctgttttgcaacttcagctaaaacgttttgagtatgatttcatgcgtgacacgatggtgaagataaacgatcgttatgaatttccactccaattggatcttgatagagataatggaaaatatttatctcctgatgctgacaggaatgtgcgtaatctttatacccttcacaggttcaagtttgatgatgagcgtgtgacaaaagaagatgcaaagagggcactagaagagcaatatggtggtgaggaggagctacctcagacaaatcctggcttaaacaacaccccattcaagtttactaaatattcaaatgcatacatgcttgtgtacattcgtgaaagtgacaaggacaaaattatatgtaatgtggatgagaaagatatagcggagcatcttcggattagattagaaaatgaccgtgaagagaaggaacgtcggaagaaggaaaaagcggaggcacacctctatactataatcaaggttgcaagggatgatgacttaaaagctcagatagggaaagacatatattttgatcttgttgatcatgataaagtcccaagcttccgtatccagaaacagatgacctttgctcaattcaaggaggaggtagcaaaagagtttggtattcctacacagtttcaacgattttggctgtgggccaagcgacaaaaccatacctaccgacctaacaggccattgtgtcctcaagacgaagcacatactgttgggcagctaaaggaactggtgaacaaggcccacaacgcagaactgaaactgttcttggaagttgaacttggactggaccttaaacctcttcctcttcccgacaagactagagaagatatatttcttttcttcaaactctatgaacctgaaaaggaacagctgcggtatgttggtaggctttttgtaaaggcttcaggaagaccacaggacattctgctgaagttaaggatgttggcaggtttttcacaggatgatgatattgaactttatgaggaaattaagttcgagcccaatgtgatgtgtgaatacattgacaacaggcttctgtttcgatcttgccagcttgaagacggggatataatttgttttcaaaagccttcaaaaccagatagtgcagaccgatatcgatttcctgacgtcccatcctttttgacgtatatacgtaaccggcaggtggtgcacttccgttcattggagaagcccaaggacgacgaattttgccttgagatgtcaaagattttcacatatgatcaagtcgtggaaaaagtagctgaaaaacttggcgtggatgacccatcgaaaattcgtcttacatcacataattgttattcgcaacagcctaagcctcaaccaataaagtacagaggcgttgaacgtctactggatatgctgattcattataaccagacttctgatattctgtactatgaagtattggacataccacttccagaattacaagcgctgaagacattaaaagttacctaccatcatgccacaaaagatgaggtgtcagttcacagtataagattaccaaaaaacagcactgttggcgatgtgctgaatgatatcaaaacgaaggttgagttgtctcataccaatgctgagctaagattacttgaggtcttttatcacaagatatacaaggtatttgcaccaaatgaaaagattgaaaacatcaatgatcagtactggacactgcgtgcagaggaggttccagaggaggagaaaaatcttggccccttcgatcgtttgattcatgtatatcattttacaaaagacactcaaaaccaaacgcaagttcagaactttggagaacctttttttatggttattcgtgaggatgagaccctatcttctatcaaagaacgtatacagaaaaagcttaaggttccagatgaggatttctcaaagtggaagtttgcatacatttcactcggtcgtcctgactattttgaagattcagatactgtagccctaaaattccagagaaacatgtatggagcttgggagcagtatcttggactggaacatccggacacggctcctaggaaggcacacacggctaatcagaaccggcattcattcgagagacctgtaaaaatttataactaggcatgttagaaattgagcgatgagctgccgctcaataccaagccaggctgaagttgctggcttgaaatagagagcatgttgctcaggtttttcgatggagctgtggaactagttcagaggagactgatcgggcgacttgtcatctttcctgtttgttttgctgccccggatatataaagttgtacagagatgaccccaccagacaattgtctttagtagataagataactttttacagtcgagtggccgatgttttagtcgatcactctgttctgcagttggtggtggtgctaggtggccttgagctgttgagggtacttgtctttcgactctttctgtatattattgacgcggcggatgtttgtaattccaatgatacatttcttacttgctggtttccggtgctttcc

SEQ ID NO: 33237 - DNA, 355 bp, Zea Mays
cctcaagctccagccagattgcagcgtgtgtgtgtggtaggtcttctgtccacacccatgttcacctctcccctgcccaagtttgcccagtcccagggtctggtatcccattcctctgtcagtggtgaccatgcccactgattgcctatctctccgtggccaagacgtctcagggagtgaccagcccgcatgaccctcgttccacgttctcctaagaaaacgaaaaagagagtgaggtgactcaagagaagacatcaccacctttgaaatctcaggcagggacttggctctacttcgacaactgtgagtccgagcctgactcaactacgaacgaaggcaagccccggtgcatgca

SEQ ID NO: 33238 - DNA, 743 bp, Zea Mays
aatgaaagtttctttcgctcagatacatctccattttgttctgaagctcatatttgggaatacaaaagaaccggggaaaaggcagagaggattgttggtctcaactctcaagtcagtaccagcaacagagttgaatgtttcgtaatttggtccaaagctagctcttgcttcctaggatctaatcagagtttatatcagataatgagtcgttaaactaccaagaaaatgcttgttgcacaccttgactggcctgtcctgagtcatgacccagatatgatcaagatgctatgtggaagttcctatccagccattttgtagtgggagaagcctggagagtatgtgttgtatgagcaacaatagcagaaacaacttttgcttcaataacaccaacaagatctctatacaacaactgcattcaccgccacaggatcaatcacttccatccatggaacctattcaatagcttccctaggcagaaagaacacaaatgaatatgaaacaacaggtgcgcaagttgttctgttatagttttgatttgtgagatattatttttatttcagatagcaatgtatagttttgtgttggtattttgcttgtgtctagctatacttaaaggagatctcttggatgaactgaagttattcaaatggattcttctttttagcatttttctcactagcatacatcctatatatttgaattgtttgcttttgaatttcatgtaaattttactatctttttaa

SEQ ID NO: 33239 - DNA, 1158 bp, Zea Mays
cttggaccgattcgctgctgtgatgaggtgtcaaacatgcccgacggctaaccccagtagtgtccattcggtgtctgtctgtccactctcgtgtcctcacgccaggtccagtcaacctgccccagcgccatcccttatttaagtgtttgtccagggagccctgttgtctcaagctttagttggatccttgggcatctctgtgaaggtgtgtacaagcctgagttcatctccttagcctccgcgtcggctttgttcagttcatcaagtgccattccattgtctggtactctggtgccacagcaaccatccttccacctcgccatggtcagagtatctcgagaagtttgttacccagaacggagttgtgccaccgcagaccggagccgtgaacagcctctgcgttgaccgaacaactcacgctttctccggtcgattccttgtgagcaccaaagtttagaattcccagaagaagatgataaaattcaagaagtggtttctgaagaggagtctgcttcagtgcctgctcatcaagtgatgggagccatctaactggggtttaatagagggatttagacctccgtctctgcaacaaaggtgatgaggagttctctatgtgttcatgaggctggagggcgcttccagttctagatgaggattagttaggcttgtgtataaggtttggagggttcctaccttcctgctagtgtaataagttatgcactttgagtatatcaggacttgtaataaatgtaactcttcctatgtaataaccttcagttttagaaatgaaaagaatatttttgtaaaagtcttccgctcttatctccgaactgtgtgtatcgaatgtgattactgtaatatgcatgtatggtgggagatccttgggatgatgagttcaagttgttgaactcgtgatagccttcttaagttacctggtacacgtgcatagccatctgaggccatcaaggcaaggattggtgcatgtgggctcgataacttgggagggctgccacactcataagtatacctttgatcatgtctcttttatatatgctatgactaatgtgttttcaagtgtatttcaaaccaagtcataggtatattgaaagggaattggagtcttcggcgaagacaaggcttccactccactctccgtct

SEQ ID NO: 33240 - DNA, 1498 bp, Zea Mays
ccccgacagttgttgtgtgtaagaaaaatagggtttcagtggcggcagcctccactcacgccgccgtcgcctccgagccccactgcccgatccagacaaccaccccgcccagatccagatccacctgtactggatctcacagcctccgcttctgctttcctttatgtcgtcgaccgcgatgtcttgggacgggtacggcgggcagatctaccctggaggcggtgttccagcagcctgagacgaccccccttgcaggcgccgacgggggagatggagctgccgagcaacgctggcgacggcgaactcctgcccatggaggagcacaaggagcgcgcgctgcggcacctactccgccgatccaagcgcccgctggaggagttcgtggccgccgtggcagacgtcgcggagcagctggtgagcgcgtatctggacctgggcgtcgagtggcgcggcgcagactggcgggagcggttcctggccagtcgtacgatagcgcgagctcgatggccaggcgtagggcacacgtcacaccgggtggcaactggcagggcaatgcccgatcaggtctccgtcgtcgattcgtctgaacagctatcctcatcatattttaatgtctcgagcataatacggagtacatatctgtatttacgtcagcgttattgcaacgctctctctccgtggtctcttctacatactataatagtagtacattagtactaacaatgtggttggccatggcatgcttgcttcgagatcaacatgaacaatggaagcacaagtacgggaatccatgtagaaggtgatgaaaatcttgtatctgtaatggtttttgttcagatatcttctgattttgatggtttgcagtggattgttttccagcgtgaagattttccggtgccaattgccacggaataatgccttctactcagctcaacctccaaagcatgatggctctgacaaaccactctgtccaggagctcctgtatgccactggtgtggtacctggaaaggtgataaaatatgtagtagctgcaagaaagcaaggtactgttatgagaaacatcaggcactgcattggcgtactggtcataaaaatgattgcctccagataataagttctgttgcttcaaattcagttctgccagctgtaggaatagggatttgtttggcttccaaatggtttgttggtcctaaaatagtcagaatcacatgacatctgtgctatagatatggacctcggtggttttctccacattaggaaagctggaagagccttttgaactcagtttttttgctaacagtggtgttatggtgaaacagagttttgtgtgtatgtaccaacagataaaatgtaaacacgacattatcatagttgagtacaggaataattatctcgtatatcttattgcaaaatctgaaacagttctcctgtagatggttagcttgcattttacgctacattcgttattatgaaacagatggacgatttacgttaaaa

SEQ ID NO: 33241 - DNA, 1053 bp, Zea Mays
cccgtcgtcctctccatttccttctgtctgcttgccctcaaaccctagcccgtaccggcgtccaccttcgcgcaccctcgcctcaccaaacacccacggcgcattggcgcttccacctcttatcgtacgaaggcgagcggctttcacggtgtctctctgtcgcatgcaatggcaccgctgtttgaggggcgcccaacagctgcctgcccacggcatgctcaggggcgctggggtcccttgccgctgtccctgaagtctagcctgggttgttgatcttgccgcagatgcggtactccattacttctccgcccgcgccatcatttcggccacacctcagtctgttggtcggtcgcagatcccttgccccgtcgagcttaatatgcaatccgttgcttgtgaagattgtcgtgttttggacaatgccaacctttgtttccgctgtgcctgccaaggttgtggcttccttgggtgatgcttatttgagaacatagctgttgtgctctgagcatgtcctgtgtgcctgtcatggcggcttcttttggcgacatcataccaacatattcaatgtcaggctttaaaggagtgagctggtttttatattttaactgatgcacctggatgctttattgagcggtgtctatgaaatgatttggatggaagattggagaaacgcccatgggcctggcaaactgtggcatgtggctttgaactttgccaattggagacctgatgtggatcattttgggacgcgagttaagccccctgtttggagtgccagaaacaaaacagatggagaagggaaaaaggtgtcaggggataagagccagcgcctgatcaccgttttattcgtttttgagtaaactgtagcgagcaacaggtagcctataattgagacaatgctgaatggattgtagaaaaggatctgctttaatttccgttaatttagcgccttcagtgatgttcctagttgctggagtacatgttaagtatatttaccatttaaatcctcccaccactctcgcgtagctttataaaaaagctcttaataaacca

SEQ ID NO: 33242 - DNA, 2965 bp, Zea Mays
tggctttgttgggctcacatgtctctcaccgatggtaggcatccgatttggtaggaaatctgggcgctgatagatccattggcagatttattgggtatatcgcaagttcttcggcgggtactgcaactgctcataccatgattgcagagctgagaacaccttgaagctaggagatgtcatccagtaccatgaatgtggttaccgcattctctataagaagcgggcaccgatccatgtgtagtaccagcaaacttcccattttctatgactccaaggccttatgtcatccagcaatggcagttgccgttcagtttggactatagaattcaattatgagttcagtttgttgatattaaaggaaagatacaggtcagcctcttttacttaacaaggattcatacttaaatacttaacaaggattcatacttaaatttatctgatgcaatttttcaactgaacgtgaacttggcaggggtgagtacggagtagtgtacaagcgagttctgcattgagctgtcgtagagagcgtagacagacactctagccaacgttgttggctgggattggaacacaaaagcgagacaagggatgagaagcacaggaggagccaggtgaggtgaggtggcgacacacaggagtcgggcaagctcagctcatctcatctcatgctctactaaaaaggattagcccatctcaagagaaaagagtaacattgtcagcccactgcaataaccacactattaccagtcttgaaattcactttttgtttgtttgtcatagaaccagggattcatgacaggaaatgatctccttctcaagataagaaaattgcatttaagttactaatcagtgtatggtttactagtttggcggaggcctcaatccgggtctagaccaaggtcatggtggcgacgaaggtggaggccgaggtggagggtgatgcttccactctcagtcttggggtggggtcgtggggatgacatatgagagtggggtgcagtggtggctcgtcgacatcagccattggcacccttcccctgcccagttcgatgatgcaccctccctcctactacttcacgatggcaccaccatctccaggtaccgtgccgatggaggaaaggagaaacaaggtattttgaagattaagagtgatgccacatacttagcgatggggtgcttgatatcctagatattgtactagcttcagacctcgccgaattgacaccttcgaagaaatgaagtcgccagattggtaggctttgagtgtttcaccagaggaagtatgtagtgcagttaaggaaggaaatgaacttccatcagacttgatagacacactactaaagtggatcccaagcaatgatgaggagcttaggcttcgactgtcctcccatagcaccgccacaccgcatgcgtccgcggcggcgtccgcctcggcgccggtctcgcacaccgctccctagctggggaagttcatcgcctccgagcccttcaacgtggggggattcgattgggcgatctacttctaccccgatgggaagagcggcgaggatggcgttgtctacgtctcgctcttcatagccctggccagcgaaggcaccgatgtgcgcgcgctgttcgaggtcacgctcgtcgaccagagcggcaaggggcaagacaaggtgcatacccactttgggaggtctctcgagagcgacccatacaccctcaagtaccgcgacagcatgtgatgagtctatgtacaggttgtttcctacggtatgcttatctatggtggaaagaaaaagtgattgactcatacttgaaaagaaaagatggcctttgcccattgacgcctgagacaaccagaaatttgccatgacctcgttcctgaccaagaaaaactgtcaagcacagaatcacagttgatatattgggattccaaggtatcagaggctgatatggatgcaatgtggaaacatcctgatgtgtataaggagtggataaaatctggtgagagacgtggaaatgtacgattctcccatgatgcaaagaacatgccttacctttctcgcgtcgaggtgaaggatatgattgccttctcatgttgtgtatatgatggtggtgatgaggagaaggaaatggatgcagccagagaaataggttggagagggaaatttactaagagaggacgtgtaataagaccaggaattattagaatgagtggaaaatgtcctcttacacctttggaggttgggttaatgcttcgtggaatggatttcagcaataagactgcaatctttttggcatctggaaagatttacaaagcagagaagaacatggcttctcttcttgaaatgtttcctctcctacagacaaaagagacactggcatcagaagaggaacttgctccattcaagatggctgctgttgactatagtatttgtgcccaaagtgaagtttttgtgaccacacaaggtggaaatcccgcattttttatgggtcacaggagatacttgtatggtgggcattcaaaaacaattaaaccagacaaaagaaggcttgctgtactcttcaataatccacgtatagggtggacggcattgaagcggcacttgcttaatatgagagcatacagtgatgtcaaggggatcgaaatgaaaagaccaaacgaatctatatataccttcccgtgtcctgactgcatgtgccgcttgaacagaacagaacactcgaaatccaaacagagtagatagtatatttcgtatgtagaccaaatggctaaaaccatccaatattttcatagactgaaaatgcagagaaagcaacaaaggtgtatcaatacagtcgtacaagcttagtatcggatggtttttaatttgtatagcaaagcacgggcacatacctatatatcttttaatgtatgtaaatattcttaacctttaaaagatactaacaagcaggtataacgataattaatgtttctata

SEQ ID NO: 33243 - DNA, 3430 bp, Zea Mays
atggagctattgctttttggtggtggtgtttttgctgaacttcaatggctgattgccaggcaggagtactcccatagctcagtccttggaattcaagacaaccgagctcttaagcttccagtatgtgtcaactttaatctgcaaaacggcggcgcacaagaatgggctgacgagagcaggaggttatcattaagcaaagccggcaatagtaatggttccactcatctagggtctggtattttccatcatgaacccttggaagatttcaagagctccaaccaatctctattgcacagtgtaagacaaagaatggcaccaaattctcttgcgaataggcacgtcaacacggaattggcaaagcatcatgcgattaagcatgctgcagttgctgtgtcagcactgaccagtgttgttaatgatgaccttaaatcagtgaagaggcctaaggaatctgaagtggaggttcattggtctaatggccccaagtttcattctcatattccgaaaatctctgaagttgaaacaagcctgcgatttgatgaaaatgctacagatggctatgctaaagatgtgaatgaatgctcacctgaggagacagtacaaccctctcgaactagagcgccctcatcccaggagtctctagatgcacggaaggcactcagtaccatatatgacaaagttctggtggttgacaatgtcatgtcagctaggagtgttgttcaactgcttactacgaagtacagaaattatattcatgcatgtgacacagaggtagctaatattaatgttaaacaagagacaccagttggccatggaaaggtcacatgctttagcatttactctggcactaaaggtgctgaggctgattttggaaatggcaagacatgcatttgggtggatgtgctagatggtggaccagatgtactcatggagtttgtcccattttttgaggattcatcaatcaggaaggtttggcacaactatagttttgatagtcatgttatagagaactatggaattaaagttgctggatttcatgctgatacaatgcatcttgcacgactttgggattcttcaagaagaacagatggaggatattctcttgagggacttacaaatgatcatagggtcatgggtgttgttccaaaggaattacaaaagattgggaagagatcaatgaaaaccatctttggtcggaaaaaaataaagaaggatgggtcagaagggaagattactgcaattgagcctgttgaaattttacaaagagaagacagagaattgtggatctgctattcttcgttagattccatgagtaccttgaggctttatgagagcttgaaaagcaagcttgaaaggaagccctggacttttgacggttaccccagacccggaggttcattgtacgatttctacgaggagtattggtgtcctttcggtgctattcttgtaaaaatggaaacagctggaatgcttgttgaccgtgcttacctttcagagattgaaaaggttgctgttgcacagcgcgaatcagctgcagataaatttcggaagtgggcatctaagtattgccctgatgcaaaatacatgaatgttaatagtgacactcagattcgacaactcttcttcggtggtatagagaacataaggcaagaaggttccaaagtatcgcacaattgaccttttcagcattgtggaagacctgaaaactgatatatttactgcaagtggttggccttcagttagtggggctgcattgagaaatttggctgggaaggttccatcagatcttgtttactcaacagatgatgtaaatgatgatgaatgtggtattcattctgaaatttcccattgtgatctagaagacacctcttcttatggtactgcatatgatgcatttgggggaggaaaggaaggaaaagaagcatgccatgccattgcagctttgtgtgagatctgttctattaactcgttaatatccaacttcattcttcctctacagggaaatcatatatcatgtaaggaagggcggattcactgttccttaaatatcaacacagagacaggacgtttatcggcaagggcaccaaatttacagaaccaacctgcacttgaaaaggataggtataaaatccgccaagcttttgttgcagctccagggaacactcttattgttgctgattatggtcagctggaactcaggatcttggcgcatcttgctgattgcaaaagcatgttagatgcttttaaagctggcggcgacttccattccaggacagccatgaacatgtatcagcatattcgtgaggctgttgaagaagagaaagtaattcttgagtggcatcctcaacccggtcaagagaaacctcctgtgccgttgttgaaggatgcttttggtgctgagaggaggaaagctaagatgctaaatttctccattgcatatgggaaaacggctcatgggcttgctcgtgattggaaggtttctgttaaggaagcaaaagatacactgaaactctggtatagcgatagaaaggaagttctggcttggcaaatgaagcagaaacagctagcacatgagaagcgtgaagtttatactttgcttgggcgatcacgccgttttccaaatatggctcatgcaacttctggccaaaggggtcacattgagcgtgctgctatcaatgctcctgtacagggcagtgcagctgatgttgctatgtgtgcaatgcttgagatagacaggaatactcgtcttaaggagcttggttggacgctactcttgcaggtgcatgatgaagtgatactggaagggccttcagagtctgcggagctggccaagtccatagttgttgagtgcatgtctaagcccttctatggcaccaatatcctgaaggtcgaccttgctgttgatgccaagtgtgcacagaattggtatgcggccaaatagacctgttaagtgtcccagaagggcgtcaattccttcggtgaaactcggtggattttgaactggtatctgctggctgctgctagtagcctagtgagctcatctccacgtggatgccatgcactgattatttcgctgttgatctggacagtgaggggtcagcactgagcagcgaaggcactgtacactattccgtattccctataggtcgggtagcttcaccttccacactccctgttaggatctctcgatcattcatgcctgatgtagttggtcgtcctggatagcagtgaagactaagcatgccgtgttcataagatttatttagcatgctgatgtgttgagttgctgaccagttctgctgacgtctaacactgttgcacgcactgcaacaatgttttgatcacaagagaatgtagttgattgtgagcgttcttaatctccttatttctgctgttgaactgtgcgtcttgttaattgtatcttctctaa

SEQ ID NO: 33244 - DNA, 2248 bp, Zea Mays
atggagaagcttggacggccaacgtcggtagtcaagctcatcaccggaagactcaaagacgccgacgtcgtcttcatcgacgctctgagagccgcaacctgcggcttcgacttccgcagaatcgtggagtcccatctgtgcatcccagtcgtctacttcctctctcgggattatggggtcaccggcgacgtgtctgaggctctgcagcgcactgtttgggctgccacctacgtcgtcaggaagcccctcgacgctggagaactcagcaggctgtggaaggtcatcaagtggtccaagtttttgctgcggcgcgcatggccggaatggcctcgcggcagccgagtgcgtcccgccgtcgtcggagcacttctgcccggctcctctaccgttgatggccgatgggaagacgacgacgacgacggccgcgaacatttcagggcggtgagggcaggaagaggccggaggaggaagctgggtgatcgccaataccacggcggacgatcctccggccgcggtggcggcggcggcgttgcagttggaattggaataggacgacgccagccaactgagagactggagcaaatgaacttgacaggatggcagcaggagaacgatgacgacgacggcgtgtttcctatccaccaacagcctgcacaacagaaccgaccaggagtccagaccatggacgatgtccagaaccagcagcatggtcggtccctgttcatgcagcccggcccccagacgctcaatgtgccgcacaacaaccccatgatctcccccgacgctggctggccgagcagcagcaatgtcgcagccttcgctggcgccagcaacaccaccggcccaacactgctgcagggagtgtaccaagcaccggcggcacgaggagcaagagcagcatcgccggcaccgcatgcggtgtacgcaccaccagcgccaggactgcgccctccggtgtatcagcagcagcagcaacccatggcgcccctctacgacttcggcgacatggtcgcaccgcccgcggcagtaccactaccaataccaaccatggccgccaccagcggacaccagccgcagttcaccctcaaccatcaccaccagcagcagcaggaggaggaaatgtttgcgccgcggaggcaaggcggctggatggggagtcgtcgtcgtcgcgagaccggacccatcatgctttccttccagcagccacaggccgctgatcctttcacccctatggctggcagtggcacggcctttggagcttcatcacctacaggtgctacagatgcaggagcgtacggggccgctgccgtggcacaggcacagcttcagtccccgaacgctggtgctcaaccagctgacagcagctttgatgatgtgctccgagccatgatggagatggactactatgccaacaactgcagcgccgaagcactcatggccccggctacagacgagttagcaggtatgcaagcagcagcagcacttggcagcagcggcaactacaacgctggaccattcatggtgacggatgcgaatggcggcaatggtacaccattcatggcgctggcgctagcgccacaggatcccgccgcgccaactgggaaccaaaaccaagtccaggtggagttgggagcaccggacatctacggcggatcactgctggtggggtctcatcaaggcggcgggactagtgcaatgttcaatggggatggtgacatggcaccaatgtttccttctaacgagtacggtgcgactgcgaacgccatgttctctctggatgcccttctggatttcgacgacggcgtcccaacgtaccctgaaggccaccaggtcgctgcagctgatagcaccaccgccagcaacgctacaggaatcatgtcaaatggcggggaaagtggtggctcgggaccgagctggaacatgggagctgcagctgctgatgaaggtctggatatgttggaagagttcttaatggaggacaatgagtctggttttcttctcccgcaagacatgaacaatggcctccagtagctggtggtgcagccatgacgagaaacctgagagattttaagagttcgagagaggaagagaactataaattagctagattcaataatgtacaggcaaccctgtctaaagttctgtttgctgtagaactagatacttggtgcacccgtacttagaagtgtttggtaagatacagaaaaggggagtgcccctgtgatcattttccgtgtgtttggttgag

SEQ ID NO: 33245 - DNA, 878 bp, Zea Mays
tatctgtcatttcaaaaccatttgtgtatagcttttgagatgcttggccaaaacctatatgaactgctcaaaaggaatcacttaagaggtctgaaattgaaatatgttcaagccttctcaaaacagatattggatgccatggttgtgatgagagaagctggaatcatccattgtgatttgaagccagaaaatatcctgttagctcccagtgtcacaacagctgcagaagtgaaagttattgattttggatcagcctgcctggagggtaaaacggtttactcgtacatccagagccgctattacaggtctccagaggttctccttggctatccatatactaccgcgatcgacatgtggtcgtttggctgcatagttgctgaactgtttctaggtttgccattgtttcctggagcgtcagaatatgatgtgcttcagcgaatgatgaaaattcttgggggccaaccaccagatgaactgctaagggaagctaaaaacactgcaaggttttttaaacatgttggaagtatctatcctggcaatgaggcacctactggtctttgtagtgcgtacaaaagtttaagtgaagaagatgttgaagtgagagactccaagaagccacagatgggaaagtggtacttcccacacctaaagcttgacaaactcatatgtacctatccttggaacaattccgaactgacagagacagaaaaaatggatcgtttgggattagttgatttcttgaagggtctccttgaatttgatccaaataagagatggtcaccattgcaggctctataccatccattcataacaggcaaatcgttcaccggtccatatgaacctgtacctgagaccacaagaattgtgacctgttgttc

SEQ ID NO: 33246 - DNA, 3698 bp, Zea Mays
tgaaaatgggagaagcaagggaaacattaggaaatcacaccaatcagcaaaacaattaaacccttgattgtgattttcagctgtgcaaatcttaattagatatctcagataatccatcaactagacaaacatacaaagtgaaccgaacaactctcaaacaatatgatatttcctaggcaactctcaaaggaaaaagtcacatagcaaatgacataatttagtacatgtaatgaattctgatgatgtatgccaagtttatcactagcgtacatgtctaaagctgactggcatccgcttgcttatacaaatccaaaatatgacattactacagtaaggcatcaccattcacaaacaagaaaatagtacctcgttgttgtggccacatttcttcttgcggcagttaacagccttggtgtgcaagcgagtatagcacctggatcagatatttgacatcaagcacttagactaccctaggttcatactgaatataagaatttccaatgcaaacacaatactatttacaaaactatctaggggggaaatcaaatggtcctttgtaataatgtttacgaacaaagcaaactaggtgcaagacagtaaacgtcaaaacacagacaaaacaagaaccagagaaacttgcagtgatcaaaagtctgaatgattggcaggccagacaaaatatatgcctcaaaagttaagctcgtaaggcgacttacacatctaattgattcatcattccagccaatcaactatgagcataggaaagcacaaatcccagaccaaactcaaaagatacttcaactgaacaaacaagttatactacctaattggttcatcacccctgccaatccactaaactgaatacaatgaaacaaagatagtggactgtcacaagtggttatatgttgcatattttaagacattcccggttgttgaaaatttaggagattagaccttcattagtatagatgcagatcattggtctcctcatacgagccaaattttcaagaaataccaacgaaggtgatggcacacaagttgatgcacacaatgataccacgcaagatgatgcacttgaaggcaaggaagatgattgtttgtgctactatgccgctccataattttattcgtgagcattctagtggtgatgtgggctttgcaaattgtggttgagatcctgattttgtgcctactatcccaatttcccaaatagatacaataaataactgaataatcagtgtcaccacatgcctcagatcaatccacttctaaatcaagttttactacaatggatgcatttcgtgatagtatagcaacgactctcacttgtgtggaattagcaccaaatatttatgcaatattttgcaacatctatttgtagtgacttgtgtgaagagtgaagacaatgattatgtaatatgttactagtttattattgctgcaaggttgaatatttgaatttatttgaaaaaatcatatagtgatttatctttgttgtattgttgaatagtcaagttcatagcaaaaatagttgcataaagatcattattctcaataaaacaattagctaaaacaaccaaatgataggaaggtcattgcagcctcaaacttcacttttctagagttggatgcacctttctggtcaaacacagtcaaaactccagaggagagcagctccagtctggagttatagagcaaagctactctgaagtggagtggagccatacaaacacaccttagttggcgtagatttttgtgaatccgcttttggctagcgataacgtcttctgggtttccaaaggcttctactcgactcctctaggccttttgggacgtgaccttcatcttgtgcgacttgccaaacgaatccgtcacaatactgccgaatgcaatggaagcttcctaccataacagtcgacccttttcacaccggtcaacgcagtaaccaaacattcggacgcgcataaaatcgccacgcacgcatcgctggttttgccgtcgcagagcagaaggcactccgggacggcagcgtgctctgcagacgctgaaggcaggatgtggctggaagaggtgaggcggagggagcgtggagagcttcgcgctcggcggtttgaggccgccgcccgagcgtgccgcacggcttcgctcgcgctctccaatcgcaaggagtttgtcaccccacatcacggcgccgtcaactcgctccaggttgatttgacagaggggaggtacctgctctccggggcatcggatgggtcggccgctgtgttcgatgtgtggaacgcgactgaatacgaaaccgggttcatagcaaagcacaggaacatactgcttgtggacaagcaacaccagaatggccacaagttcgccatctcggcggccgtttggtatcctgtggatacggggctgtttgtcacagcatcctttgaccagtttgtcaaagtttgggatacaaattcgactcaagtcgtcatggaatttaagatgcctggaaaagtgtacactgcagccatgtctccaatcgcaacaacgcacgtgctcattgctactgggagtgcagatgttcaggtccgtctatgtgacattgcttctggagcctttacccacacgttgtctggtcatcgtgatggtatcatgtctttggagtggtctgcctcaagtgagtggattttgatgagtggtggctgtgacggggcaatacgtttttgggacattagaagagctggatgctttcgggttctggaccaatcaaggtctcaacttggaaaaaggccccttgttaaaagtgctctatataaggatcacacagattccttaggaccttcaccttccgcaaggagaaggacaggcatttctaagaagagttcatcagctttgcgcaaaattcaaaacccgacacatggacacatgcaacagagattgcatcctggtttgtcatctagtcaaaaccgtgctactgctcattatggtgctgttactggtttacgaacaactgcagatgggatgtaccttcttagctcaggatctgattctcgcttaagactatgggacatcgattcaggctgcaatacgctggtcaattttgaagctatgcgattgcagacaggcaagccattacaattagctgtcactgaggatccttcacttgtatttgttccatgtatggcaagcatcaaggcatacaatttatggtctggtaaaacatttcaaacattccgggggcactatgaacttgtgagttgctgctactatagtgaacaggaccaagaactttatactggcagcaacgacaggcaaattcttgtgtggtctccatcaactccagcttttactaaaatggaagatgatgacaagatcctttctgcagctgatgaggataactggagcgactgagaaaccctggagccgggaggagtgtgtcttgtatctactgacatcgatgttactgatgttaacaaataacatgtcgaggttgttaggtcttgttagcagcccctaaatgatgatattgtcttggtgtattttcaaaaatatgtacattaccatgtgaaaatttgacagatcattgaataatttgtagatttatctcaggaggatagagggatgtttgacgttcgccaaaatgttgtttagccctggagccttgttttcttcactgtgtattaatgctttacccaaaaataagaatttttctgagc

SEQ ID NO: 33247 - DNA, 1637 bp, Zea Mays
cgaaacagcctcagccaaccagtcaaccaaacaggccctcagatttgcactcggccggcatggcatttatcccccacctacaatctcaggcaatccgccattactgagagccccatcgcacatcgggtcgtggcaagctcgcgacgcggaagcgccaccgctcccctgtccgtctccgtccacctcctgtgccggctgcctgcctaccacatcaatcagtgtgaccatccagcacattcccatgacgggccacgccagcctgctgctgccggcgctcgccgccgtcctgctctgctgccccctcgcgcaatgcgggcagcagaactacacctccatgttcagcttcggcgactcgctcaccgacaccggcaacctgctcgtgtccagcccgctctccaaccacatcgtcggccgctacccctacggcatcacctacttccaccgctccaccggccgctgctccgacggccgcctcgtcgtcgacttcctagcgcaagcgttcggcctgccgctgctgcagccgtacctgcagtcccgcggcaaggacctgcgccggggcgtcaacttcgccgtcggcggcgccaccgccatggatccgcccttcttccaggagatcggcgcgtccgacaagctctggaccaacctgtccctcagcgtccagctcggctggttcgagcagctcaagccgtcgctctgcagctcaccgaaagagtgcaaggagtacttcagcaagtccctcttcctggtcggagagatcggggggaacgactacaactacgccttcttcaagggcaagaccctggacgacgccaagacctacgtccccacggtcgccgccgcggtcaccgatgccaccgagaggctgatcaaggccggcgccacgcacctggtggtgccggggaacctgcccatgggctgctcgtcggcgtacctgaccctgcacccgggccgcaacggcagcgactacgacgccgccggttgcctcaggacgtacaacgacttcgcgcagcaccacaacgctgtgctccagcggaaactgcgggcgctccgggcgaagtacccgcaggcgaggatcatgtacgccgactactacggcgccgccatgtccttcgccaagaaccccaagcagttcggggccgctgcggacgtgctgcggcggcggcgggccgtacaacttcaacccgaaggcgagctgcggcgtgcgggggtccagcgtgtgcgcggacccgtcggcgtacgccaactgggacggcgtgcacctgacggaggccgcctaccacgccatcgccgacagcatcctcaacgggccctacaccagccccaggctcctctgatccgaacgccggtggttgaagctcgtcgtccgtccatcggcagccgcagctcatacaactgtagtggcgccaacaatgtggctggcctgtgagcttgctagctgtggtaattaaacgaatgctgtacgtagtactccctactactagtgtgagagtgtgacggtgttgggactggaactggaactggaagggtaactcgtaactaaaaatggtggagttttgcgtccgttcgtttcttggcatgatgtgactttggcgtggggctgtgtcgtggatcgttaaggccttgttcgtttacgtcgg

SEQ ID NO: 33248 - DNA, 866 bp, Zea Mays
cgctgggccttttgttttgtttcctatttcctttccttctcgtgtagcttttcggccggcgaccgcgacctgaccgtccgccactgcgcacctgccggcgtctgggcgacgccccgccgccagcctgccaccaccacgacgcctgcaccggaatccgacactgtctcaaccactccgtcgtgcctatccgaagctcaacggcggagcccggtgggatagggcggaggcgctgaggcctgagggggagactggacctgggctgcacgaggtaggctgtgcggtggcggaaggaatcaccgatgagcgatgcgcaggcgacaggggatggtccgcgctgcgttggctgcggcgggcgcgtgaagacgctcttcgtgcagtactccccgggcaacatccgcttgatgaaatgcgataagtgcaaggctgttgctgatccctacatcgagtgcgagttcatgatcatcttgattgatctcgtcctgcacaagacaagggcgtaccgccatgttctgtttaataagctgagcatgggatcatccgttgacaagggaatactttaccggtctactttgatacacattgctcttgacacatgtatccttagaattcataatttttttctttgatttggtttactataaactgtctgcccaacttaagcagtccatgactatgtaatgtaagtcagaatatctttttcgaaaggaaacagagctggtggggcttcttccaggagcattttctcaacagtttccaattgcactgaggttgttggcgatgcattattgggaaacatcgtatttatattcatgttactcctgggagtgcgattttttctcaaattatctttcgatattataagtcag

SEQ ID NO: 33249 - DNA, 3878 bp, Zea Mays
tccgtatggtgcacggttctgccatcgtctcctctccgcgacgcacgcctccctctcctccgccccaccctcctccccacgccatcggcaccgccatcatcagatccggcccaagacgcctctgccccacgcgcccgagtcgtcgaggcacactcctgcccgcctccggcgtccacgcacatctccgcctcacctcggcgcccgagtcgtcgcacgcgttcgaggtggcgtccatcccggcaccggcctcacgcaccatctacagctcccaactctgctcctctcagttctccctctgcattccaccttctctcccttcctctccaagcaccgtcctcctcgcctagatccgtacaagctgcaaataacctctccggtggcaagacagatggagtcgatctccggcgaggatgctccgaagcacaacctgatcctgtccgcgctcgtctccaacctacagtgcatgctcgccgcccgccgcccgttcacggcagaggtcagcaccgccgccacagctagcgaggctgaggccttggctcaggaagcagaggcgtccgatgcccccacgggagatgggacgctggcgaggcccatcgtgctgctgacctgtgccggaggggaaccggtcggcgggtctcgcggcgctcgtcgacgccctcgttgccgccggccgctgcgatgtccacgtgtgtgcccccgaatcgtacatgctgtgacttagaaaaccaaaccacagcgggaccggtgctcggatagggtccaacggcgatgcaagcaaggagtggcatgcggccggaggggcgcagatcggctcctgcacgtgcagcgcagccgcgtgacagtgaagcagggaggccgcgataggcggcacagggagggtgcgacggaggcaaagtgcaagcacctggggacttcaggtaagtagaaaaccaacactgaatttgtcggttctctgttttgtgattgaccgattggtttgttgatctcagaaacaaaaaattgtttcaccgtcaagcaccaatttttaggtaggtcagtgttttgggatgattctccgatgcatcaatagcaaccttgtgcttggcaaagttatttgccctgataatgttgtaggtttagtgaaaagaaatatactgacatatccatcgatccatcgatgcccaatggagattgacctctatcaagatttagttacgtgtctcaatagggcaatatttctgtgagttgtatactgtggattcctcatctgcatcatgaattgatcgcactatttatgccctatttttcaaaccatggtttctgtaattctttgcaccatggtatttttctcaaatgattttatctttcacaacccggactgaagtcactgaagcagaaagaaagagtacaagtctactactgcagaaagcaaggaggatgccaacagaagcagatttcatgtttggatcggataaaatcttaagcaaaatgggagaaggtttgggttttctgcaatctgtcgtctcctcttctgctgggtatctccgttattattctaatgaagagggctatgagttggattttcgtaggtacatttgagcgtgttttggaatgctgggaccgtgaaacacatgaatatgttgccataaaagttgttcgcagtatccacaagtactctgatgctacaatgattgagatagatgtgctcaatcgccttgtagaaaatgaaaaatatagatctctgtgagtatctcagagacctaattgcttaaagtataaccctattctatttttgacttgacagttcctcttcaatttgtcagctgtgctcaaatttagagatggcttgactatcgtaatcatatatgcatggatgcgttactttatgtttgcttgtatttaatatagaaggctcccttgccttcgttcgatcatgtggtatttgaaagtgatgtctctataaatgaagtaaggtagggcaatgcttatgttactgttgtcagttattagctttttaaaccatgcatctgtcaatgtgtcctgtttcaatagggtcttattataggacgtgatggcactgaattaggatgtttgttcttttgctacctttgttaaacaacatcagatcattcgtattgtatccttcctcggattgcttcttttgttctactacaaatatgcccaacatggcagggagaggtctcgaggtcaagcctggacccactgtcaagtgtgtgcttggacatgactttatcctgcactttccactgctgcacttggggaatcaaagaaaagtgaaagtaccatgtcaaagttgatgaccagaagcttgctattggaaccctctctattgaaaaatacccctagatagaaattgatttggttttcaataaagagtgtgagttgtcacacacatagaaaactacctgtgtatttttctttggttacaaggttgagcaaccaatcgaggaagatgaatatcctttttaacattgatttttttagttttatttcatgtaagactgatctaaacaatttctttgtggagtattttgtttccttgatctcatttttgcttcttgcctcttacataatggatcttgattctgaagatgaagagaaggagctaaacattccagtaatcaaggaaaatggcaaaggtgatgggaaggcagttgctgcagcttcaaaatcaagtcttgggcttgaaaaaaagcaaggatgagtatgagtctgatgattctgatgagggtgagtgattatctcctgaagaaggaaatgttgtgatttgaagggtatggtgcagaaaagttttgtctgcatgtcatgacagtttcatacaacgcacgggcgaacgcactgggagcctaccacctcccgtgctcaccattgccgtgtttgatacctgactgctactgatgttacttcgaatctctggggtgctcatggagtcatggtgcatatgctcatgtttgcagggtgtcagtttttttcatcgtctacttctagagataacaactttagcatgttggttaaagattcttggtgtgctaagcttttcttttttgcttcatttgaaactcaactatatagatggtgccctactttacattttgcaaacacaaactgctccaaaataaatggaagcttatgtcttcatctctcgtgtgcttcatccgtgtgcttggaattttagccccttcttttgcttctaacatagatgcttttgtgttacatgtatttggttaccgaattaggaccatgttttctctttggatatttcagaactaatatccccaaaagattcccttatctaaacacttgagtaggggaagcaaccatgttgtgctgcgataagagcgtagctgatatgtgatttgtaatttgcatctttttaatgtcatgtaacagtaagaccccatatgtatgactcatagttttttgctttccctaagctaggttccaagtgaagacataccccacagacttatcaatatcgataaaaaggattagattagtataaatatatttacctatcactaaaaattgtatattgactttttagaaataatttgtgcgtattgataatgtttgctcggcatcagttcaaactatttggttcgacgtatttataatattattacatatttatatcgtcaatataatattagtactacgatgatattttctcacatggattttacatatcatattaatatttgttgtttcatatctattgttaattcatattatttttagacatgaatttggtacaatatagaagaaattggttggtgctttactgtatggagtatggttttctacaatatacttatgcatgtgactacaacatcgattgttgtcaactgtgcaaatatagaattgttcagacattcttg

SEQ ID NO: 33250 - DNA, 1442 bp, Zea Mays
ggccctatccagaagtccagaaccttccccaatcacccacacggccacacctggccccgcccaacttccatttatgcacaggcggactcgcggactcggggctcgtaccaacaggaaaaaaggcccagaggcagtgccgtgaccgattcgagacgcaagagaaggatcgagacgaggcggcggttttccggggcagcatcgtctcggccacgaagatgtcttactcaaggggctcaaggtatggatctcgctcaccttactcgagaagcacaaggtaccgaagtcgctctaggagtgtcgactctagtgatgctgaaaaccctgggaacaacctgtatgtgactggtttgtcggctcgtgtaacggatcgagatctggagaagcacttctccactgagggtgaggtgattgatgcaagcgttgtgtatgatccttggacaagggaatcacgggggtttggttttgttaccatggctgctgttaaagatgcagatcgctgcatcaaatatctggaccgttctgtgttgcaaggtcgggtcataactgttgagaagattttgttgacagcaacagggtagatgttggtagctgctctgcaacaaactgatacaacctaacaccaaaccatgccaacctcagccaaagggcaaagagaagacgaggtagaaccccaacacctgggaagtatcttggcacaaaatcatcccgtggacggaggtactccacaagctactcacctgatcggaggggccgttacagttcccgctactcacctgatcggagggactgtcatggtagagaccggtcatactctccatatgacagaaggcgatcatactctccttacggcagggatgaatcatattccccttactatggccggcgatcatactcaccttactacagcagacggtatcgttcaaggtccccatactgctacagaagacgcaggtcaccttctgtttcgccatactaccgccggcacagccattccccagaatccgagagatcaacaagctattctcctaagaaagggagtaaaagggaaccctcgcgtagcagatactctggcaagagtcgtcattcaagggaaagccactctcatagccgcagttcgtactccaggtctgtgtccagggagcgctcagcttgatctgcgaggtgtgtcgtcctaggtggttataagatatgcgctgtatttgcatctatcagaacttgtgtacttcgtatattacgaacttgagaactgtatggatgtgtgcattgtgccaaattatgttcattctgtgctatctttctgatgctatcttgctattgttggtttgaacttggtaatttagtttacaaaatcattcgacatgtggagtccctttttatggaacatttcgttcattattttgggatactagtggaaatgtatgtggcacgcgtgtgtatgtgaa

SEQ ID NO: 33251 - DNA, 955 bp, Zea Mays
actgatgggcttacctgcagactgcagatgttgttgcaaatgagttgtggagaaccgtagattcaaatggttggagagcatcttctgcaccacgcatctgttggcctcccccaccagctgaatctgagagcaatgggtacttgcgtgtctggtgcaacggcggcttgacccaacaacgcagtgcaatatgtaatgctgttgtcgtagcacgaatcatgaatgctacactagtgctgccagagttagacacaaattcattttggcacgatgagagtggttttgtagatatatatgatgttccccacttcatcaacacattgaaatatgatgttcgaattgtcatgagcattccaaaaatcactgcacaaggaaagaccaagaagctcaaagcatataagattttacctcctagagatgcacccgttacttggtacagaacaactgctttggagagactaaggaagtatggtgcaatatatttaactccattttcacaccgtttggcagaaaaaattgatgatccagagttccagagattgagatgcagggtgaattatcacgcactacgatttaagccaagtatcatgaaaacaagtagtgatatagcgaataagctccattcagaaggccatttcatgtcaattcatcttcggtttgagctggatgtgcttgcatatgctgggtgcttcgacatattcacacctgaagaacaggaaatcctgttgaggcatcggaacaaatattttccattgctgttgaggtattggggcaaatattttccaggaaacacacctgactacagggaaagaaggctcattggaaagtgccctttaactccagaagaggcatttggtcgaggttgcatttggcgtctttctcaacagccagccaacattgcggcagagctacactgcatggcgccggatagtattatcgttcaaactaaccctttgtt

SEQ ID NO: 33252 - DNA, 2008 bp, Zea Mays
ggtcgcagttttgcacaaagatcctctgtcttttcgcgatttagctcgtgctcctccctcgacgtggtctccggaatccagatctgtatcacgggaagcacatctgctggcctacaccagattcttccatggttgtattatcacaatgtcattggtgtttcacatttctttctattagttgaaggagaggctgcaaagccagctgtcacctctgttcttgaatctattcagccgcatttggaatgagacttggctagcaggtttcttttacaagccgtgtaattacgaactatttgtcaagcaatcactaaacatggaaatggctattattatggcaagggatgctagaatggattggatcattcacctcgatactgatgagttgattcatccagctggtgcccgagagtactccctgaggcgattgcttttagatgttcctgacaacgttgacatggttatcttccccaattatgaaagcagcattgactgtatgacattaaggatccttttactgaggtatagaactactgttatctgtaacatatattcaaaagaaagggaaaaatgctctgtatcctattgatgatccactggcttgagaaacaaagtgccacctgtacgtaactggatatagtttcactgtctagaaaaaaactatagtttagcaaacactacacataactactctcattaatgcattgcaggaattgataggattggtcggattatcgttggctgtgtttgataggttgcatgttttataaattcttttgtgcctgcaggtttccatgtttaagaaatatctttacgatttcatttttcacaatatgcatatggtatcataactctcgaaatgctcacggaaattgtcatgagtggaaacgatttcatttttcgcatatgcatgtagtatcttttttttaactgaaattgtatgacaggatgtagttatgtctgaatcagatacaatattttaccttcttcatgtgccttgtactcatcacagaaatgtttcctcatggtccattctccagcatacaatgtatagccagccatgccagagaaccatataggtgtcttttgaatggcccctttcttactgtgcattggtggctaactggataactgactcggagagctaatgagtaatgaatcctcccgtgtattgtgtcatggcaggcctttataattgcatcgacagcaactgaggaggagatggggaactggtaccgggaacataactatgccccatggctatcattcgtggcctcaaggaacccgacgtctttaccaatgcagtaacatcagcgaaagcacagtcgaaaacgaagccgtcaaacatgggtctcggaaacaaggaggctatggccatccaaccgaacgtaactgctggtcagtccacactggaaggtggtcacgagaggttacaggcaaccgtaagaaagatcttggaaatggtggacgcccaggaacaggaagaagcaatgccgccgaggccgtcccctggtttgctcgagctctcggaacgcgccactgctttgtcatgacgacttgacgacgctgtgaggttctggaggcgttattaagcatggactcgggttgtttaaccatgctaggtgatacagcgcccgatagggcgctattttttctagtttctttaatgtagcctgcagtctgcacgctgtgccattgtggatagatcgatcgagcctggtgcatatgccccaccatatatatgtttaattaaccttgcacgttaaagagtccctttccataatcaagggaaaaaacttaaaaaatgacggtcaaattttctactattgagcgtgggtttaactctgacggatctagaatgtcacatgccaacggtgttttttttttgaagtggtctaagagttgatagattttatatgtatccacgatggctttgccaatctaaaaaatctgacgattcagtctatcggggttaatatgcacaaatgtatgttagggctatatattcttt

SEQ ID NO: 33253 - DNA, 928 bp, Zea Mays
cttgtgatgctgcggggctggcgacaaccaccagcagcatcgaagacaggaggagaaaggagaggtggtggggcgatggcagcgactgcggcggagggggtggccgcgacggcgctgcgagccgtgctggggcgggcgggtatggcggcggagcggtcggggtgcgccgcggaggcggtacgggttgtggcggtggggaagaccaagcctgtttcgatgctgcggcagctatacgacgcgggccaccgctgcttcggcgagaactacgtgcaggagttcgtcaccaaggccccccagcttccgcaagatacccggtggcattttatcgggcacctgcagagcaacaaagtgaaaccactgttagctgctgttccaaatcttgatatggttgagggcgtagacaatgaaaagctaaatctggaatcgatccctccaaatgtgtcgaccttgctaagcatgtgaaactagcatgcccacacctaatattttcaggtctgatgacaataggtatgaaagactactcgtcaacaccagaaaattttaaggcattggttaattgtaagcttgaagtttgcaaggcccttgacataccaacagaacagtttgaactctccatgggaatgtctggtgactttgagcaagcgattgagatgggcagcacgaatgtgaggattggatcaaccatttttggaccaagggagtatccaaacaaaaggcagaactagtgagattcaacgcataagtgtcatctcaatacccagtcctcttgattaaccttttgcctatgtaagcatgatgctatgtataaatgcacatgtgaataggtaacatgtacaacctcatacaacactgtttgcagggggaggggggggaactctccatacaacagtacggcactgtataagaaattttgtgacatggccttgaa

SEQ ID NO: 33254 - DNA, 2374 bp, Zea Mays
ccaccgtgttccccatatcgtccagttgccgtagttttacgcgagaacgcacgcgcgcatctgccaaaacaaacaaacccacgtcccggccaccgcgcgcgcgcgtgcctcgtcgtcgtcctagctagctagctcgatcgatcctccctcgctcagctgccgtcgacctctctctcgcggagagagagatagagagaggttggggtttgtcggcactcggcaatcgacatcatgaggcgcttcctgcctgctggaggcggcggcggcggcggggagccgtcgtcctcctcgtcgtcgggcgggcaccagcaccaccagcacggcgggctcgcatcgggcgagagggcggcggcgggcctgcggtaccgaggaggcgccgacatatcgctggggcacgggcacgacgatggtggacatggtcgtagcatcgacgcggcggacaggcggaacgacgggtccatggacatgctggcgcggcacagcagctcgccggtcggcttcttctccaacctcgtggtggacaacgggtatccacgctcaaataaagccggaggcggtggtggcgtcgaaggtcagcagcatgatccatcaacggccgccaatgccagtggcagcagtgcccggaagatgaagacgcccgagttcaacttcaccggtgcgcagcagggccagcagctgggcgcggccgcgggccacctctcgcggatctccgaggacggcgccttcccgggcggcatgatgggcgaccgcgcgggccgcggctctgctggcgagagcagcggtgccgccgcggcggcgcgctcgtactcggccggcgggttctccatcgttgggccgtgggaggagtccagggacatcattaccaccctcggcgcatacgaccctcagtttagcggcgccatggcgggtacggcgctagagatggcgggcatggacaggtacgtgcagctgcagcaagaccaggtgccgttcaaagtgcgcgccaagcgcgggtgcgccacgcaccccaggagcatcgccgagagggagaggaggacgaggatcagcgagaagctcaggaagctccaggacctcgtgcccaacatggacaaggtataactactacacgtgagtagttcatctatgagactatggcgtcgcaatttgcaaaggttttcttgcgcgtaatgcatagattaattctaagagatcgaggcggcgtcgtcagaccactcagatgatacatatatagaatgatgatcactgtgcaaagcagcagttctagtttgtgcatctagctaatacctgcagtcctgcacgaggcagagcaataatggagatgcatgggatcggagtatctaattaagcaaactatcttactgaacactaactagaagcgaaagaaattttaactgaaggcgatcttgcttatcatatgcatgtgtgttgatgccacagcaaacgagcaccgcggacatgttggaccttgcagttgagcacatcaggggcctgcagagcgagctgcaggctctgaaacacgaacaggagaagtgtacctgctgccgaaagcgatagcgattcacgacggccgggggatcggaccaagagagcagaaacacgtacgtcgtctatcatatctgtagcggttcatagttgatacgtgcccttaccttcagtgtccttgatgagaggaatgtacatggatgaagacatgacagacagccatctaattttagttacaacaacatgtcggattacctactgctccaccttttccgaagaccgaagcaacgaagacccatgtgagcaactagctagccagtagccagtgcagtgcagtgctaaaatgggcggccctcctagtctgatccgatgatccttggatttcttctgttcctgcttgatgttcaactccaattttagatctcttttaggatctgaaaacagttttgctatttatttaaacaagctgcttaattttattttgatatttagtataattaatatttgttgactgacgtcagaagaagaggctccttttttttttcttttgtataaggtaaaagaaagggcttttaggcttttatacagatataaaggctttggtgatgtttttgtatatatttcttaaacttataattgtttcaataggcattataatagatctgtattatttcagaagagggtatttgcatatagactcagcacaatacttctttataagataggggaagttttgccgtgaaatttaataaactttttttttgaatgtgtcatgtgtttcattaaggatggctctaatgcacaggggttgtatctaataacgtcatatcactattgaccagccggtctgtatctaccactgtcaacatttatctaccagaacttttcagtg

SEQ ID NO: 33255 - DNA, 601 bp, Zea Mays
cacgagataaagaacattgcgaacgggtgggagtagattttaccaatgtttgtgaatcatacatggccgcccacgatgatatgcagagtcacggcggaaggattgctccggtgagcaatcaccgacgcccggtgcaagcactagatccgtctgtccctcgaacacccgtctcacaccctcacgaacgtccgggacctcgccctggcccctaaatagccctggaatcacagaacgacggtgaggctgcttcgcggcgtccaccaattccccacagtgcttccctaggcaccggttctgcaccagacctccatggtaacatcagcgcgacaccaagcagttccctggccccaaaccgaggcaacgttgttgctatctccgtgaatcaacggtggcgggcatggcttcacgcacctgattccccggcggtggcatgggcggccttctgttcacacactccccgcccggcgccgaagcagtcctcggctggatgggatggggtggccgcgagcttggctataaataccccggagtccgatcgggggatcaaccccaacaaccccgaggcggcggtagcgggttctgttcgggtggggacgaagag

SEQ ID NO: 33256 - DNA, 5914 bp, Zea Mays
atcccaagttcttgattctattaagtgatggttcgcatgagtgatctctttgatgtcatctatagaagaccgctctttgttgaggactaccagatttgcgagaagaagggtcattcgatgcgttgtagcaagtccaggttgtcctaataggaaatctaggacagcgtctcccaacgtaaaagtagctgcttatagcaactatgcgccaagactcctcgttgagtcaagctccaagaagagcgaacaccatgatagcagcagacaccgtgaagaaactattgatacatacaatgggctgtcaggttctgatgcagcagaattgacaagtaatagagatgtagaaattgaagtggatttgcagcacatttctgaggaggaattgccaggaaaagtatcgattaatgcatcattaggagaaatggaaacagtggatgaagctgaggtcgaggaggataagtttgaggtagatacctcaggaattgtattgcgcaatgttgcagttcgggaagtggatccaaaggatgaacataatgctaaagatgtatttgtggtagattcgtcaggaactgcaccagataatgctgcagtggaggaagtggtagatgaagctgaggttgaagaggatatggttgatgtggatatcttgggacttgacttgaataatgcaacgatcgaggaaattgatttgatggaagaggctttactggagaacttcgacgtggattcaccaggcaatgcttctagtggtcgaacctatgggggtgtggatgagttgggtgagctgccttcaacatccgtggattgcatcgccattaacggaaaacgtagaagtttgaagcctaagcccttgccaattgtcaggttccaggaacaagaacagatagttttaagcattgttgacgaagaagggttgattgctagttcatgtgaagaaggccaaccggtggtagattacgataagcaagaggaaaactctaccgctttcgatgaacagaagcaattaactgatgatttccctgaagaaggcatatctatagttcacttccctgagccaaacaatgatattgttggatcctcaaaattcttggagcaaaaacaagaattggatggttcttataaacaagatcgatcaaccactggattgcatgaacaagatcagtctgttgttagttcacacggacaagataaatcaattgttggtgtgcctcagcaaatccagtacaatgatcaatctattgctggttctcatagacaagatcaatcaattgccggtgcacctgagcaaatccaatccgttgctggctatataaaaccaaatcaatctattgttggttcttgtaaacaacatgaattgattattcctgagcctaagaaaatcgaatccatcatcagttacaatgaaatagatcaatctattgttggttctcacaaacaagacaaatctgttgttagtgtgcctgagcaaatccaatccattgttagtcacagcaaaccaaatcaatctactgttgattcttatagacaagctgaatcaattattggtgtgcctgagaaagtccaatccatcaccagttacgataaactagaccagtccattgttggttctcttaaacaagatgagcctattattagcgtgcctgagaaaatccaatccattgtccattacactaaaccaaatcagtctattgttggcttgcccaaacaacaacaatcaattgttcatatcgttgaaccaaaacagtccatagatggtttccctaaacaagatctatcaatcgttggtatctccaatgagtttcaaacaaagcaactggctactgttgggactcatgatggattgcttatgaagggtgtggaagctaaggagacatctcaaaagactgaaggggatacacttcaggcaacgttcaatgtcgacaacttgtcacagaaacaggaaggcttaactaaagaagcagacgagataacaattattgagaaaatcaatgatgaagaccttgtgatgattgaagaacagaaaagcatagccatgaatgaagaacagacgattgttaccgaagaagacattccaatggctaaggttgagataggaattgacaaggccaaatttttacatctgctttctgaagaagagagttcatgggatgaaaatgaagtgggaataattgaggctgatgaacagtatgaagtcgatgagacatctatgtccactgaacaagatatccaggaatcacctaatgatgatttggatccacaagcactatggagtatgcttcaagagcttgctgaaaaaaattattcgctgggaaacaagttgtttacttatccagatgtattgaaagctgattcaacaattgatctctatttcaatcgtgatctatcagctgtggccaatgagcctgatgtacttatcaaaggagcattcaatgggtggaagtggagatttttcactgaaaaattgcacaagagcgagctggcaggggactggtggtgctgcaaactatacattcctaagcaggcatacagaatggactttgtgttttttaacggacacacggtatatgaaaataataacaataatgatttcgtgatacaaatagaaagcaccatggatgaaaatttatttgaggatttcttggctgaagaaaagcaacgagaacttgagaaccttgcaaatgaggaagctgaaaggaggagacaaactgatgagcagcggcgaatggaggaagaaagggccgcagataaagctgacagggtacaagccaaggttgaggtagagacgaagaagaataaattgtgcaatgtattgggtttagccagagctcctgttgataatttatggtacattgagcccatcacgactggacaagaggctactgtcagattgtattataacataaactcaagacctctagttcacagtactgagatatggatgcatggtggctataacaattggattgatggactctcttttgctgaaaggcttgttcatcatcatgacaaagattgtgattggtggtttgtagatgttgtcgtgcctgaaagaacatatgtattggactgggtttttgctgacggcccaccagggagtgcaaggaattatgacaacaatggaggacatgattttcatgctacccttccaaataacatgactgaggaagagtattggatggaagaagaacaaaggatctatacaaggcttcaacaagagaggagggaaagggaggaggctattaaaaggaaggctgagagaaatgcaaaaatgaaagctgagatgaaggaaaagactatgagaatgttcctggtttctcagaaacacattgtttacaccgaaccacttgaaatacatgctggaactactattgatgtgctttataatccttctaatacagttctaactggaaagccagaggtttggtttcgatgttcatttaatcgttggatgtatccaggtggggtgttgccacctcagaagatggtacaagcagaaaatggttcacacctaaaagtaacagtttacgttccacgagatgcctatatgatggactttgttttctcggagtcagaagaaggtggaatttatgataacagaaatgggttagactatcatattcctgtttttgggtcaattgcaaaggaaccacctatgcacattgtccacatcgctgttgagatggcaccaatcgcaaaggttggaggtcttggtgatgttgtcactagtctttcacgtgctgtgcaagatttaggacacaatgtggaggttattcttccaaagtacggttgcttgaatctaagcaatgtcaagaatctacacatccatcagagtttttcttggggtggttctgaaataaaagtgtggcgtggactagtcgaaggcctttgtgtttacttcctggaacctcaaaatgggatgtttggagtcggatatgtatatggcagggacgatgaccgccgatttggcttcttctgtcgttctgctctagagtttctcctccaaagtggatcttctcctaacataatacattgccatgattggtcaagtgctcctgttgcctggctacacaaggaaaactacgcgaagtctagcttggcaaatgcacgggtggtattcaccatccacaatcttgaatttggagcgcatcatattggcaaagcaatgagatattgtgataaagccacaactgtctctaatacatattcaaaggaagtgtcaggtcatggtgccatcgttcctcatcttgggaaattctatggcattctgaatggaattgatccagatatatgggatccgtacaatgacaactttatcccggtccactacacttgtgagaatgtggttgaaggcaagagggctgctaagagggcactgcagcagaagtttgggttacagcaaatcgatgtccccgtcgtaggaatcgtcactcgcctgacagcccaaaaggggatccacctgatcaagcatgcgattcaccgtacactcgaacggaacggacaggtggttttgcttggttcagcgccggactctcgaatccaagctgattttgtcaacctggcgaataagctccacggcgtaaaccatgggcaagtgaggctttccttgacctacgacgagcctctctcgcatctgatatacgctggctctgacttcattctggtcccatctatatttgagccttgcggcctaactcagctcgtcgccatgcggtatgggaccatcccgattgtccgcaagactggagggctcttcgacactgtcttcgatgtggacaatgacaaggaacgagcccgagatcgaggccttgagcccaacgggtttagctttgacggagctgatagcaacggtgttgactacgcgctgaacagggcgatctcagcttggttcgatgcccggagctggttccactccctttgcaagagagtcatggagcaggactggtcgtggaaccgacctgccctcgactacatcgagctctaccgttcagcgtccaaattgtaataatccaaccaacggccaatgtagtgtgttgtctgcaggtctcagatgcagccattcagcttttgcaggttcctgggcattgctgtacagcctccttgtctttagttagctccattccccgaggagcacagtgcaattttttatcctcagttattatgcatagattgtctcagtagaatgctttcttcgggcatgtatgtttgtttcctctgttgttgaattctggtgttaagtcgtgtataggaatctacaggaaatgaaaaagtccatttcctgcttcaaccttttagggctaccatgcacatgagacctttcaaatgcaaagaatattaggactagactactagtctgtgaactctatttttttccaaggatttctattttttcaaggaaaaataaactaatttttcttcggaaaatggaaatctttttaaaaaatggggttcccaaactagcccgtagagtatagatctagaattggtctagtggtttctcaagaaaaaaaaacatacgccttttcttgtcatatgcttatttaagtttattttgtacaaactttgagatccttcaaaaacaccccaatggctggtgtagtgaccagtgaaataaagaggatcaatggggaggaatcccccacctctctcccgcagatgtcacccagcaccggccaacctcacctgtccagtgaaattaaggttggttgcgacgacagcccatcaatggaaaccaacctcgccccgtgtcgggatctaccttcctcaccaccacgccgatctcaccttccataggagctacctaggcactgttacctattataggtacatgacattgtacatctttgtatgaacttacatcaatgccaaaaatccttcaaacatggactatacagtcataggagggtatctttgtcttctc

SEQ ID NO: 33257 - DNA, 2106 bp, Zea Mays
ttttttttggttggatgcagcatgttgtgttgtgtgtgtaaatgtggcagggcgagggagcaagtctctcattccttttgctggagtcccgctttaaagccacgcgcgcgcgtacacaacgcaagcgcagaagaagacttgcccttgcccacctcctcctcctcctcctcctcctccgccgccgcgcgcttcacacccctcatctcctcgcggcaatggccaccgcaccgtgcgctccccaatgattgctgctccactccgacgaccgatcgccattgccgcgcaagcaggttgtgttactagcttgctgtcgcttaggtagttttgtgttttagcttggttcacacgatgaccaacgaaaacaatggcaacggcacgaaccccgcgtcggcgagcggctggctaggcttctcgctgtcgcctcacatggcttccgccatggacgaacaccagcaccagcaccagcaccataatggcctcttcttcccttccgtcaccgcggcatacggcctcggtggcggcgacggcgtggtggccgccagcgcgtcgccgtactacacgccgcagctggcgtccatgccgctgaagtccgacggctccctctgcatcatggaggcgctccgcaggagcgaccaacaggatcaccacgggcccaagctggaggacttcctcggcgcggcggcgcagtcgcaggccatggcgctgagcctggacaaccccgccgccgccgcctccagcttctactactacggcggcggcggcggtccggggcaccagcacgggttcctgcagccgtgcggcgacctgtacggcggaacctcggccgcgtccctggtgtccgcggacgacgaggcggccgccgcgacggccatggcgagctgggtggcggcggcgcgcgccgagagcggcgtgctgtccgccgccgcagccgcggggcaccaccacgcgctggccctgtccatgagctccgggtcgctgtcgagctgcgtgaccgcgcaccccgcggcgcccgagtacggcgcggcggcggcgctggacggcgggcgcaagcgcggcggcgcggcggggcagaagcagcccgtgcaccaccgcaagtccatcgacacgttcgggcagaggacgtcgcagtaccgcggcgtgaccaggcataggtggacggggaggtacgaggcgcacctgtgggacaacagctgcaagaaggaaggccagaccaggaagggcaggcagggtaattaatatgaggcgcgagagctggctggcgcacgcgcacacttgattattaattagaataactataactaactaactaactaacttggtgatggttgtctgacttgtggggacggctcgtgatctcctgctcgatccctgtggctgtgacgccgcgcgcagtctatctcggcgggtacgacgtggaggagaaggcggcgagagcctacgacctggcggcgctcaagtactggggcccttccacgcacatcaacttcccgctggaggactaccaggatgagctggaggagatgaagaacatgacgcggcaggagtacgtggcgcacctcaggaggaagagcagcggcttctcgcggggcgcgtccatgtaccggggagtcacaaggcaccaccagcacgggcggtggcaggcgcgcatcggccgcgtctccggcaacaaggacctctacctcggcaccttcagagaagctatgtgtctgatcaagcaccagagttatcaatgcaagatacgaagaggaaaggagcactgagaagcaactgtggtgcaaaaaaaaaggacattgaaaacagaacaatgaggtcagagctactggagaacatgtgaggagcaaggtgtgattgcttgcacaagcgcaagagactacgatcctatttgattgaaggcattggaaaactgtctagctaggcattaagatccaaccacaacatcccctgggctgtgaaccagagaggtactaggggggacgatgttcttagtctctctccaaccgtttcatctctcaaatcattgcattcgtaatttctattcatatttaaatacctctccctcaactattctctttctatttcaccttctctttaacgttttaacgccag

SEQ ID NO: 33258 - DNA, 324 bp, Zea Mays
tactgaaaagggatcgaacactacctttgcatgcataaaaggcttagtaagacgcaacagatcttaactgaatctagtttctgttcatatcacagttttttgcctagataatgcagtaatatctgttttgtaccgtagcagttcacagcaacaaaaggttttatccccttggatgactattgatgtaggtgatctgagacctttggtttatgatagaacatggtcttctacttgatctggtatgataatatggactctcagttaaagctataccaactttgagagttcatacaaagttagcttagatgacaagggatccgaaga

SEQ ID NO: 33259 - DNA, 4024 bp, Zea Mays
cacatgtgaaaccatttttcaaaagggcgaaaacgccgcgtgccccagcatatccaccacagtaaccaaaacctcgccggcggcgggcggcggcgggcggccatgtcgcactggaaggagaaggagaatgctccacctctcccgctctacccaagcggcgcctctaacccctctcatctcctcccctgcaagcgcccgctgcaatccccatccccatgcccaccgctgcgccggccgctcgtcgatatcactggcaacgcattggaacagcggggcgggtatgggtatacaactcccctcccgaacgcttccaggccttgcgggtttcttctgcacgacgacgaagacgacatgaacgaggcattcttgcgggaggtggacgccatctgcgaggagcgtgcgcggtccacggccaggaaggaggaaaaggagaaggagaaggagaaggagaagaagccagcagaggagcataaggggacgggcggagtggcgctcatggcggcagcgggcacgattgacgccgctggaacagagacagcaacgcttgacgatgctttctgggaggaggtgagcgccatctgtgaggagtgtgatgcccagtctgctgccaagagccaggagaggacgaaggaggaggggagcttggtgctgtcctgcgatgatgcttcactcccccctgctatttccatcaccgcggagggtggggagtttgaagatgcattctgggagatcaatgccgttatggaggagcacaatgccaaagctcatgccaagtatcaggaggggctcaagggaatggaggagaaagatggattgttagcactgtgcggtgatcatgatccttcagtttccccagtaatatccgttgcaatggggggtggagcgcttgttgatgcactccttggtgaggttgatgctgccgtccatgatgggcatgctgatatgtctgctgctaagggccaggtggaacagcaagatatggaactagaaaaggaggaagatgaagcgtgtgctccaaagaagtacaatgaatatttgcactccttgaatgataggcagaaggaggctgcatgtaatgatgttgctgttcctctaatgattgttgctggtccaggaagtggaaagacttccacaatggttggtagggtgctcacacttctcaaagagggtattccaccaccaaacattcttgctatgacattcaccacggctgctgcctcagaaatgagagagaggatagggacagtggtgggaaaggcagttgccaaggatattgcaataagcacatttcactcattttgcttgcagctttgcagaacacatgctgaaaagctaggacgcacatctgaattcataatctacggacatggacagcaacgaagggcgcttattgagacagagcgccttttggaaaatgacaaaaataatggtgttggagatacaactaaacagtatgatggggacataaaaaattctttcaaagacaaagctaaaaagtggcagaaatttattacacaggcaaaagcttcaggaagaactccagaggactatgaaaaaaagggtgatttgacaggagcttctgttcttcgacattacaatgaaatattaagatcttgtaatgctcttgattaccatgatttcattaactcatctataacccttctcacaaattttcctgaagtgtacaaagagtgtcaggatatgtggcgggcaattgtagttgatgagtttcaggataccagtgctatgcagtattgtcttctgaagattctagcttcccacaatcatataactattgtcggtgatgaagatcagtccatcttcagtttcaatggtgccgatgtatctggctttgattcatttcgtaaagattttccggatcataaagagatcaggttgagcaagaattaccgctccacacgtgcaattgttgaagcagcaactgctctaattcagaacaacactaagcggcatcatcctaggcttgtagagaccgacaacccttctggctgtaagatcactgtcaaggagtgccacagtgaagattcacaatgcgcatttgttattgacaaaatcattgaaattacatctggtaccgctgaggggtgcaactttggcaacattgctgtcctatatcgaagacagataactggcaaagctttccaagtctccttccgcaacaggaaaattccctttaacattcatggtgtggctttctacaggaaaaaggtgatcaaagctatcatggcaatacttcggaccacattacctggttgtgatgatggtccttggcgtcaagccttcaaggcccttttacccggtgacaaagaagaaaagaagaagattatatatcatgttcaaaagatttcactggctagaacgtgtagttttttaactgctgctagtgacatcttcagcgctaaggtctctggtaccttcaaaagggcccagattactcaaggacgtaaggttttatcgaccttggatagcctatcaaaacttgttgaaaaggaacaatcagtttcagtcatcatttcgtctgcgggagacatgctacctcagaaatatctccttgagaagcgtgctgttgttgatgttgataatggcaagttattaaatgaagatagtgatatcagatcggtccttcagtttttaatggatgatgtgtctgacttcttgtcaacacatttttctagttcaatggagagaagcaagactgatgagaaaggctgtgcttctacacttaaagctttcattgattatatatctttgagggaaactgaaaattttcgatcccgaaaggaggaaaataagaattctatcacattaacaactattcatcagtcaaaaggtttggagtgggatgttgtgtttattgtgcaggcaaatgattcggaaattcctttgttgcatgagtacaatggtagtgtgaaagaagctggaagcacactggaggaggagaggaggttactctatgttgcaatgacacgagctcggaaaaagctgtacatcttgcatgttacaattgattctaaccgtcagcttctgcaaccatcacgttttctcagggaaattcctgatcaccttcttgaggtgcagggcgaagagcctctgagaaaaatgcctgaacgaccttcaggtgatgttccttttgatgactctgaagtggatacatcaatcggaaagccaattatgggaccaaacgaagcttcatcttatccagaacaggctcaggcatgccttgctaatgatttcttgagaaggtttgatattgatgatagatcggtagtctcacatatatttcatcattggggcaagaagcaggcatttcaaaatccaaagagattacttgaaaagatcagttttgtaattgatgaacgcctacgtggtaaaggatacaagcgcaaggatgtcttgcgaaagctgaaatcgttcctaagcggtgatgaagcattgggctacgcacaatatgttatcaagtgggaacagattcctatagaaaagcggaatcatttgataagagaaaggcaggaacatttccaaaagcagaggattgagaactctatgggttcgtcagaacccacagccaagcagatatcgtaccttcgaagcttggggtgcaccatcactccgacttctcgcttacacgcatcacatcttatcgaaaagtacaaatcgctctaacttggttgaagaaagtacaaatcacaacattttattgttttttatgtacatgccgtccatactacaaatgtagtagtgttgtgtactggatacatcaaggttgtacggcagctccgatcatatctattgtctgttcttcttagccatattcctgtagtacatgctgcattgttgtgacaccaagagtttttgcttctcttgggccttggcagtggtattggctaggcactggctaaccttgtactccattcctacttatatgaactccattgtgtttattattcatgagataaaaaaacattacactgaataaactgtcatctaagcaaatgaaaaaaaa

SEQ ID NO: 33260 - DNA, 2060 bp, Zea Mays
ccgtgtcggtagctgttgattggatttggtcgccgagtgagggcgcgaggacgcggaggggaaaagttcttgccctccggagttcgaaaacaagatgggagaggatcgggaggaatggatcgattttcttgccttatgaatacccccagcatgagtatcggagtttcctgtagtgctgctgttgatggagtcaatggatgcctcacctacagtacatgtcgttcaagaaactactactatcagtattctcataccactaacttgcaaatttcaccagtagaccagatgcctttgcctcggaaattaaagaaatcaattcagcgaaacgcttactttttaacccagaagaggaagctcgtaccacactgttcatcagaccttagtacctcctgcagaggagtgcccaactatttatcaatcaatgttttgcaagaccaatcaaatacaaaacagggagctattcgtaaagcgcttgtcattttgaatcctaattctggattccgcagctctcgggatgttttctaccagaaagtgcaatcaacattgaaggcttcaagatggaagtcattgaaacagcatatgccgggcatgcaaaggttctttcttctactgttgacctcaaaaaattccctgatggtattatatgtgttggtggcgatgggatcgtcaatgaggttttgaatggattacttagtagagacgattttgacgtggcaattcgatttcccattgggataatacctgctggttctgataattcattggtgtggactgttcttggcatcagggatcctgtttctgcggcaatcgctttagctaagggggatttcacaccaatagatgtgtttgccgtaaagtggatccaagctggagtgactcattttggtttgacagcttcctactatggtttcgtagctgatgttctgcaactgtcagaaaagttccgcgtgcagctcggtcccttccgttacgttgttgctggccttctgaagtttctttcattaccccagtacagatttgaggtggactatctcccttcatcgctgcaggggagaagttctgaatcaagaccactggctgaaaaacgtcacgaacagctttctgatgacggcaaggttaggagaggcacacagaccaacggtaggatcaaagacgactgggttaccaggaacggggagtttcttggcatttttgtttgcaatcacttctgcaagcctgcccaggggttactttctcctgttatcgcaccgaaagcgcggcacgacgacggcagcctggacctgattctcgtccatggaagcggcaggctgagactgttttgcttctttgttgcctatcagctctgctggcatcttctactcccctacgtggaatatgtcaagataaaagaagtgaaggttaggccagttggcagtacccacagtggttgtggcgtcgacggtgagcttcttgatggagagcgcggtgctgaatggcagtgctcgctgcttccagcacaaggcaggctgcttggccaggatcccggtgctttcaactagttagggctcgttcggttagctctcaatccatgtagattgagtgagattagatgagtttgaatcccaaacaagtcaaacttcttaattttttccaatcccatctaatccatgtgtattgggaataaccgaacaaggcttactgttttatctgtccagcagtaccgaggttgttggttaatttcatgataagagagcgagtttcagcaatgttcgtatactgattatacagtattctgtctctatagattgtagctgcagcagtctgaacaactgattttaatttttggccactattttcgtatatttattgtgagtttgtgaacaaggctagagcctagtgcacataggggaaaagcttaggcgctggataccagattgccagtgccatgttttgctgtatcgtgaaagctagcaggtgcagagttgggattggaatagcagtagtataagattgtcttcagcgtcctctccatccacaacacatattgtccataccgtatacgttcaaaaacacatatattc

SEQ ID NO: 33261 - DNA, 3377 bp, Zea Mays
aatgacaccagccgcaatagctgaatgctgcagcttgagttatttggcagtgtggttagaaattcgaccgctagctcaatctttctgcacaaataaacatgccgttgtgaagatgtagattacaagtgagaagattagaataaggttgatctaaacaggattccacaaaatactccagcttcagtgcttctgtatgaatcagaaaaattacataaggtactaatcatgaacataatatgtcaaatttgtccatcttactgcttctatcatcctagaaagtaaaaagagaaagtactatttggcatacatcaatgcgattattgtgcaaaatcaacaaatataaagccaagctaaaaatgctaacaacaaaattgtatctcttataaaatcctattcacactgaattaacaaaatcatctcgtgcattgtttatggcagtaaacaagtaatacgcaatcctccattaaaagaggcgactaaaacgatggaagcataatcacataaacggaattcctagccacagggttacatgagctaacgttcaccgaaacagaagcagaagggtgacctttcgagcgacagctccttgctctggagggagaggacgaggtcgaggtgttcccacgcgcccttggcgccgccgtcgccgtcgaagcgaagtctagcgaacttgagatcgctcggaccctccccttggcaaggctgcgattggttccaccgccgcttcctcgctgcgccgggcctcgcggtcgcggcagccgtctccatggcaatggcgtctgtcatgagcggaagtggaggctagggttctgggtttggaggcacgtgctgcctcgcccgtttgatttctccgtgcccgaagacgcgccgtgaaaccttcttccgcgtccgaccaatattaataaagcacgaatcttaaagatgtgctaaccagactgaccgaccgagtcaccgtcacggtcaccgcggccccagcccaacccagagcattcttggtcccgatttcctcagctcaggtgccgggttccccaggcacaagctacaaaccctaacccatccgggagcaccggaaattttggaggctgaaacggaaaggggagaaggcgatgacgacgagggagccgcgcgaggcgtcccggcgcgatgggcgcgactcgcacgggaggcgcccccactcctcgttcaggtcgcggagggacgatcccagcccaaggagaagagatgacaggaggcgtgaatcggacagggcgcaccacagaagtcgagatggagaatttttggaggtggtggaccatgatcagaagcggaatagagatgctgcgcagagcgctgaccctccgaatgctgagtcgaagtcagcgagtgatatgaagaatggcccctccaccaggcatgagagatcacctaggggaaccaaacgattttctgagtcgagtgaggcatggcggcctcggtctttctttcaggttcttatcttttctcagtgtattatatcaaaagggaataccaccaatagcttctgctctctattacaaattgtttcatcatagctacaaatagtgtgctttgactatcacggttacatacatatgtgctcacgatgttacagagctcactattttggatagctaatagtaatatagtattttatggagttgctattttagatagccgaacagcaagtattccacattcggtaacttcaccggtactggaaaatgtacctaacagattagtgttattaggtggatccataggtcattatttgcttgtggtctggattgcaaacatcctggttatgacagctctggtaactaatgcaattgtgccgagtgttgtctaataacaaatattgtgttgatagtagagacatttaatgtgcccaaaacattataagtattccatgtttgtgttattctgaataaatgctatatatttattttaagactcacggttaaaggacttctgagtcgtatgttaagaggctctggagtgcatatgatttttttaggatttgtgttatcctatgtagaatgtagaaaccgatatttgagataatcagctcaaattagtacctataggttcgttttcacccatgtttagctcaaatattcattagctatcctctgtttgtgattatgtgtgaaccactgaacctgtcgttgcatttctgttatttaagttcatgaaatgtagttttagtgtacagattagttagattcatggatatggtttgccagctttggttaacatgaatatacttgtcttaattaatggttgcaagtaacaactctaacattcatatgcatcttttgtagaatcatctgaagtgtggaggttggtctctgcataaagaatgttaggtcattgttaaatcatacaaaaattcttccacttgtcgtacatacataacacattcctcctgatgtagtgggacttcttttatgacacattgattcaaatgcccactgtttgtaacaatgttagactacctgtgcttctatgtacagcacaatgagcgtggaagtgctgggcaaggtggtcggcattatgaccgccaggctagtgactatggaaggcaaagggagcatctctctgatagagataaacagaagacagagagacacagtttgcagggaaagattgagctggaccagcaaaagaaggatggtgattcaacatggaagcatgatggatttttccagttggaggaagcagcaccccttgccaagaagaggccaccatttcaggagatgaagatacaagaatctgctgacactgtaacagaaccagattctagatcaaggaattatcaggcacggggatatggaaatcatcgacccttcctaaggccagatgatcgaggctttagaagggggtttcctgaccacaggagtgatggccagaggaatgggcatgatataaggggaagattttctgttaggggaggaatggacagagacaggtttaacaattcatatggtgggagaagcaacgcagagcaggcttctggtgatcaagaagaaaaatggaagcatgacctctatgatcagacaaacaggagcccgcctccaaagactgaggaagagcagattgccaaagttgaagcgctgttggcactgtagctgtcttatttatgtctggagttgttttttgtgatagattatcatgtacttggtttcagatgtgttgaatactgtcttttttattctatatattctgcatatctatgtggaattgtggattaaaccaccttatgaagctattccatttggactgataatattgtactagataatcatgagtttcataatgtagaaccatcaagcgaagtacaagacaatcatgagtttggtaggtaaacaatttgctcctcg

SEQ ID NO: 33262 - DNA, 1570 bp, Zea Mays
aacatacaatgagccatggtttaagaacaccagatacttttggataggccctggtgaccagatctggcctgatcaaatgataaaactgaagctcaaagctgtctacatgtatgctgctggattttacacatattcaattttcgctcttctgttctgggaaacaaggcgttcggactttggagtatcaatgtcccaccatatagcaactgttgttctgattgttctttcctacattttcagatttgctcgtgttggctctgttgttttagcccttcatgatgcaagtgatatattcctagagattgggaagatggccaagtacagtagctgcgagtggctagcagttgtggcatttcttcttttcgtggcatcgtggatacttctccggcttgttatattccctttctggatcctaagaagcacaagctatgaagtactgctgaccctggacaaggagaaacatcagttttatggccccatatactattatgttttcaactgtcttctgttctcactcctagttcttcacatatattggtgggtactgatatggcggatgctagttaagcagattcaatcgaaagggcatgttggtgatgatgttcgatccgattctgaaggcgaagaggaacatgaagattaactttttaggttgaatgcttaactgaagaactatgttgtgtgatacctacagcaaggcacaccttctgaaaccacctttttccttctaaagaagatttgcagatattagattttattagatcatatcattctttcagcatcaaagatgacaactatcatttgcgagttgccactgaagccgtctgtgctcttggatgtttgcatgaaaacagaagtgaattgtatttttttcccagtcaaccgtcgtttgtaaaagatacagaataatcgcttgttcatccattcttgtaactagacagttgatttgatttcaaatcatgtaatttgctacatcagcttagttgattacttggtgtatcatccattatgatgtaaatgggagtcttgggaagttcacaacaagaatgtgacactatgtactgttatttctcctattattttaataagagcacagagaagtagcccaagtgcaaggatatcatatagctgctttgatgttcagtttgacatttttacatgacaccgtgactccatgagtatcaaagatccacagacattagactgatgtaatatcctgaaagttctacaaaagaatcaatattgagcctatccaaggactgaatgacgtcaagcatgggccaattttacatcatattggctctgtactgtataacaaagaaatgagaggaactccagggtgatctagggcaagtattttgcaatgagcttgtcaacatgaagaaccacatcagaaatgtgagggcgcattacagcttcaggttgaagcatccagataacaaaatggcgaagctcatcaggataaggaggtttgggtcctgctggccatttcaactgcccgtttacaatggcaagttgcagacttcctccagattcaccaagagcatactcaaatggtgaaacattgtac

SEQ ID NO: 33263 - DNA, 4330 bp, Zea Mays
accccccacacccacaggccatccttcaccagcacacactcatctcccacacctagcctagccttgctttgtcctcctccgtctcgctctcgctctccgtctccattcccacccaccaccaaacaccaggcccaaaggaccccccgccttcccaactaagagcaccagcgcagcggggagggggaatcagggcagcaagatccgagcagcaggagtggcaagcagcatttgtagccacagctcgctcactcaattgcagctagccgcggttgcggttggactggatcggcggcagggcagggcagggcagggcgcgcggcggtggtggtagttgcagaagtgacggtcaagttttcctcgctccttgcttcggccgagactccgcctgacgctactaccaacatctccacctgaatccatctctatctacctcgcacgaacgaacagagacaggggaggggagggggggaattgaagtgtaacccaaggaaaggaaccatgatggtgtggcaggcggaggaggaggattgatccatccgtcaacccatcagacccgtccatccatcggtggtggtggtggtggctgctgttactcgctatcaccatctgctgctgcctgctttagtcttttgcttcacttctcttctttctatccttcctccccctgtctgtttgtctgtcttattgccctccctgttcttgttgctgcttgcattgagaaaagagagagagagagacagagagagatagaaagtggttgctagttgtatggtcgtccggtgggcgcgatgaccatggagcacggcgaggattgctgcgtcaaggtggcggtccacgcgcgccccctcatcggcgacgagaagctgcagggctgtaaggactgcgtcgccgtcgtgccgggcaagccgcaggttcagatcggcagccactccttcaccttcgaccatgtctacggcagcacaggcacgccgtcggcggccatgttcgacgagtgcgtggcgccgctggtcgacggcctcttccagggctacaacgctacggtgctggcatacggccagaccggatcagggaagacgtacaccatgggcactgcctgcaaggaggggtcgcatatcgggatcatcccacgagccatggctgcgctgtttgacaaaattgagaacctgaaaacccaagtggagttccagttacgagtatcgttcatcgagattctgaaagaagaggtgagggatctacttgaccccactgctggtaccgtgggcaaagcagagaatggcaatggccacgcaaaactgtctgtgccagggaaaccccctgtgcagatccgagaggcgtcgaatggagtcataacgctagctggatccactgaggtgcatgtcaccactcagaaggaaatggccgcatgcctcgaacaaggttccctcagtcgcgcaactggaagtaccaacatgaacaaccagtcaagatgcgcaaaatagaccccatcatgactgcagatggaatgcctattgaagagatgaatgaagactatctctgtgccaaactacacttagtagatcttgctggatcagaacgggctaagagaactggttcagatggcctgcgcttcaaggaaggtgttcacatcaaccgaggacttctcgctctcggcaatgtcataagtgctcttggagatgagaaaaaaagaaaagaaggtgctcacgttccttatcgggacagcaagctcacccgtcttttgcaggactccctaggtggaaatagtaagactgtcatgatagcttgcataagtccagcagatattaatgctgaagagacattaaacactttgaaatatgctaaccgggcacgtaatatccaaaacaagccgattgtcaatagaaatcctatcgctgatgagatgaaaagaatgcgccagcagattgaatacttgcaggcagagcttgtttcggctcgaggaggagccacatcagatgatgttcagggtctcagagagaggatttcatggcttgaacaaacgaatgaagacctctgcagggaactatatgatagtcgcaaccggtctcaaaatgatccatgtgaacctgaaatacaaaggactttaaacggctttaccaaaagcgaagggctcaaaagaagcttgcaaagtacagatccatttgatgttccaatggctgactcagtaagaggcaaccctaaggatattgaagatgaagtagctaaagaatgggaacacacaatgctgcaggatagcatgggcaaggagttgaatgaattaaatcgacaacttgagcgaaaagagtctgagatgaaaatgtatggatgtgatactgttgcacttaagcagcacttcggaaagaaacttatggagcttgaagaagagaaaaaagcagtacagcaagagagggatagattgttggctgaagttgaaagcctaagtgctgatggccaaacacataaactccgagatgcgcagctgcagaaactaaaatcccttgaagcccagattctagacctaaagaaaaagcacgagaaccaaattcagattttgaaggaaaagcagaagagtgatgaagctgctaagaaactgcaagaagaaattcattttataaaagcgcaaaaggttcaactacaacacaaaattaaacaggaagcagaacagttcaggcaatggaaagctacccgcgagaaggaacttcttcagttacgcaaggagggacggagaaatgagtatgaacgccacaagcttcaggcacttaatcagcggcagaaattggttttgcaaaggaagaccgaagaggctgctatggctacaaaaaggctgaaagagatattagaagctaggaaatcttccgcccgtgacagttccgctggcagcaatggtacatctcaaggctataatatgggtgagagatcgctgcaaaaatggtttgatcaagagcttgaagttatggtgcatgtgcatgaagtccgaaatgagtacgaaaaacaaagccaactgcgtgctgcgcttggtgaggagcttgccattttgaaacaagaagatatacgggctggtggatctagtccccaaagagggaagaatggaaactctaggacaaataccttgtcaccaaatgcaagacaagctaggatagcatcacttgagagcatggtgacaatctcttcaaacactcttgttgcaatggcttctcaactctcagaagctgaagaaagagagcgtgccttctctgggcgtagtcgttggaatcaattgcgatcaatgggggaggcaaagagcttactgcaatatgtctttaatgttgctgctgatgccagatgccaagtaaaggagaaggaagtggagatcaaggaaatgaaggaacaaatgacagagctggtgggcattcttcgacacagtgaatcacgcagaagagaaatggagaagcagctcaagcaaagagaacagacaactccaatggccactacacctccgaaaagtggaaatggcacgacgaagcactctgctgatgaccccaacacaccactgtcccctgtcgccgttcctgcacagaagcagctcaagtattctgctggaattgtaaatagccccagcaaaggagttgctgcgataaaaaaagagcaacttaagatggttccaattgcacagttgtctgcggggaagagagtttcaatagcagggcattcaggaaagctctggaggtggaaaagaagccatcaccagtggctgatgcagttcaagtggaagtggcagaagccgtggaagttgtctgaggtgatacgacacagtgatgaaacaatcacgaggattaggcccagacctccacttcttccacataaacctcataactgatgtgaaacggacttgtttttgtctcaacaagaactgacacggtttgcaaacctacacagctaactgcctgcacaagccttcactgacggtgacatgtcaatagttggtgttcgtcttcacaaaggaatctgtcaaaggaaggcgccttgtaaagtctttcttgtgctgttgtgtgatagttttgtgtgaagggtaactgaaagttgaatgggttttgtgctcgagtgatagtctattttcccctcttcttttgtttgttgatactaaaatgagaaaagacaagtgatattggtttggtttgctaggagtattgtgatgtaatgcagaaacttgttcccctatatcagtacacccttttaatctatgtattgtggagtactgattgctgactactgttgatgtccgaagggatccggattacacaccgcacgtcttcggttgacacacgacattaaatacagcagggaacatagaggatgg

SEQ ID NO: 33264 - DNA, 2874 bp, Zea Mays
ctttctctctcctcctctctgtctcttgctccgagctgtatataaaaatactccctctcctgtatatttcccgtgtgcataggcgcaggggggaaaattccagaaattgatttatagtggggcatattagatgtgggagaggaaagcagcaggagagaagagagagaaggaaaagtatgacaaggaaatgagagaaatgggagaacagccttcttagcctctccctccatgcatcctctctccaccactgctatctctcagtagcaagagcaaagcaagaggagagcgagctagcggtaccagggagagagtgagatcagttccaagcacatacatatgagaagcgaagaaggggaaggacgaagaacactgccgaccctattcctagcaacgggccaaagcgaccagctgcaggaaggagaagcagtgttggcgcgttcgagctggtggtgccaggataaatcgggaggaagtgatggcatcgaattcatcggcggcgttctttggtgttagggatggggaccagcaagaccagattaagccgctgatatcaccgcagcaacagctggcagcggcgctgcccggtgtggcaggcggtgttcctgcggcgtccggccaaggcgcgccgccggcgcagccaccgcccaagaagaagaggactatgcctgaccccgacgctgaggtgatcgcgctgtcgcccaagacgcttatggcgaccaacaggttcgtgtgcgaggtgtgcaacaaggggttccagcgcgagcagaacctgcagctgcaccggcgcgggcacaacctgccgtggaagctgaagcagaagaacccgctacaggcgcagcggcggcgcgtgtacctgtgcccggagccgacgtgcgtgcaccacgacccggcccgcgccctcggcgacctgacggggatcaagaagcacttctgccgcaagcacggcgagaagaagtggaagtgcgacaagtgctccaagcgctacgccgtgcagtcggactggaaggcgcactccaagatctgcggcacccgtgagtaccgatgcgactgcggcacactcttctccaggagggacagcttcatcacacaccgggcgttctgcgatgcgctcgcgcaggaaagcgcgcgcctgccgccgacgagcctcagcagcctcaccagccacctctacggcgccaccagcacgggcaacatggcgctcagcctctcgcaggtgggctcccacctcacctccactctccaggatggccaccaccaccacccgtccgcggagctcctccgactcggcgccacggccggcggcggcagcagcatcgccgcgcgcctcgaccacctcctgtcgcccaacggtgcatccgccttccgcccgccgcagggtccgccgtcgtcggcttccttcttcctcaacgcgggggcttcggtggggccggactttggggacgacgtgggcaatggcccgcactcgttcctgcagggcaacaagcctttccatggactcatgcagctgcccgacctccaaggcaacggtgctggggggcccggcggctcaggccccagcctcttcaacctgagtttctttgctaacaatggcaacagctcggggtccagtcacgagcatgcaagccaggggctcatgaacaataatgaccacttcaacggcggagcaggtggaggcggcgggggttcggaagcttcggaggctgggattttcggcggaaacttcgttggtggtggagatcaagttccaccgcccgggctctacagcgatcaagcctccatgctgccgcagatgtcggcgacagctctgctccagaaggcggcgcagatgggcgcgacctcgagcgcgaacggcggcgctgcatccatgttccgaggcttcgtgggctcatcccctcacgtgcggccggcgacgccgcacatggaacagagcgacgcgaacctaaacgacctgatgaactcgctcgctggaggtggtgtcggcgccggaggaatgttcggcagcagcaacggcgccggaggcccggggatgtttgatccgaggcagctgtgtgacatggagcacgaggtgaagttcggccatggtggcggagacatgacgcgggacttccttggcgtcggcggaggaggcatcgtgcgcgggatatcgacacctagaggagaccaccaaagcagcagcgatatgagctccctggaggccgagatgaagtcggcctcgtccttcaacggaggcaggatgccatgaccgacccatcggtcgagcttataaacaaggcataagctcgcgcacagtaagcaagagacttgatcaagcagatgcagtgagagaagagtaaggtcatcgttatatagcgtagtagcaatcaatgcaagttatcaactgagtcgcatgagtgagttcatgcatggataaagctggctagcttcttagctagctttcatcatccgaagggaccttgggtgagagagaggcgtctttctctgactaatggagtaagctagagtgcgagttggacgcatgtgatgacccctttggtcgtggtgggggttggtgttcctgttggttttcccttgctttgtagttggataatctttgttggattaagtatagtttctggtgatagaaccaataaggatgtttgtagctagcttataatgagggcgtgaattgcagcttaatttgcttcactcccctcctattttttattaccttttctctttttgcaaagcaatattctccttacaatgtcattaatcgtgcaagctgaaattcatgatattttcttgtgtcaggatgcatgcatattgtatagtcaagtgctgtgtctgcactgattaacattttttcttatttattactaaagtccatttactagg

SEQ ID NO: 33265 - DNA, 656 bp, Zea Mays
atgagtgatgagcagatggccctagctcgctcgctactcttcacatccaggagtgtgcaggaggtcccgaggagtggtgggctgatggccacaatcggcacgctagcctctgcagtcgcacagtcagtttcagggccagtggacatctcccttgtttggaccacctagacaacaggcatgcaggcagccaaagtattagaaggaaaaagaatggcaccacagaatgtcttttggggctagtagaaggaaaaagaatggcaccacataatttgtcattttcttgaactgctacgaggctgcatcaggaaccaagaagactactcggactggcaccttacttgcgattttgttaaaatatatactcctacactgggtttctccgtctctattatgaaaactattgggtaatatgaccatattgtatttcataatttgggtcaaactcacaactctggttattaagattcaaatggagtcatctttcttgattgccattacaagatgttgagtctatggactgttgtaatactttgttacaattttttttatggaaattgctatattttaggtgcctggattttcaacctggcaataatcttatacaactaaactagtacaattaaaaagcgaactcaccagtatggaggactggaaac

SEQ ID NO: 33266 - DNA, 3492 bp, Zea Mays
ggaatctactactactctataagggtgtaaggagggcgtccaccatgcccccgcccgacgcccccttgcccccgtccatctcgccgcaaggcacgcggcgcgcctcgcgatgccccctcgcccccgtttgtctcgccgtgatgcgtgcggcgcgcctcgcgatgccctctcgcccatgcccctgctcgcctcttctccgccccatccccctgtgtctagcgcgctacccgcccctcccaacgtcgtcctctccgtcccatcctcccatcgtgcgacaaccgatccacgcctcgaggcccaggccgtgccacgccggtggggaagcgaaactcacttacaggacgcggatctccttccaaactcgaaggcgacgatccggcacaggggcaaccttccatggtaggcgagatccacggcccactcgcgatgcgcccccatgtcagccactcccgttcgtcacctcacgatccgatgaaggcgaagggcgcacctaaagcattgtggcaagccggtatctgccgcagcggcggtagaggtcttcgaggagcacaaaggtgagggcggaggaggcgtaggaaccgagggtaccaaagtcgattcaacagaatgagacagtggtttgcaaggatctgtgcacgaggttggtgttgcggtggagggagcaaacaacacagctgcttgtggggtggggacaatgaggcagcaagactcaaggtccaggatgatgaacaacaacagcggcgtcgacgcaggaggccctggttcaggcatgggtctgggagtgccggatgtgccattgggattaagacaaaaggggtcacaatgacagcgctgttggctaaggcgacagcaacggctctgcttcagcatcctatgctgattgccggagagattgaaatcaaaggggttgagctgcaggagagttgtagtttgtcgttcttttccatggtaggcattttcattgggatcatacaattattctctgtcgatgtttacaagaaaatagtatctaaaaacaagatgcttctgttccatgagggtgtgattgagactgaaacggtgggtaccagagtgaaggagtcggaggcagttttagtagagaaagaggtcgaactgatcgatgagcctcagattcaagagagccctccagttcctgcattgttggatgatgaggtggattttgcttaatcgtcacttgctattagagaatccgacattcccgtgaaaaaggtgctgataatcgtgacaatcacttctgttcggccacagcaaccatattacttgaatcagctagcccatgttttgaaagttgtattggtacctcttctatggttagtggtggaatggcctgaacagtcctatgaaacagcaaaaactctgttacagtccactcaggtggaagaggttgtttgtagatgttttttgttttcatatctgaactgtaatagtaaggttacaataatttttcacatagctgatggaacttctgtttgtgtgaagccaacagatggtccctcctgctaattagaaaccaatttttttagactttttcagcctcctctactgctcatgttgctggcttgtaataggtgggctaggggttatctagagatgacaaggccctcaagttggctttccagcactggatcgaagcgatgagtacaaacgggcagtggggattggtgggttttactgcccattcttgctcttttcatggtacaattatcctgtttttttcctacagtgatgttttattttgtggcaccatctttcgaccataaacaaatacactcactttgatgaatgttgatatactttcagcattcaattgtagatagaattcttgctttcgtgtagatctaggtcatcgtgtcgccgtctttgtttggctggttgtagagcccccgctctaggtttgtttagctcctcggttcttctagctccggtatggtttcctttttgcgcatagtggcggcatctgatgcatagttcgacggtccctcgcgttgctccggtatgtcgtgttcctctcatatttcttcgtctattttttggcctattgtagaattgttttgtttgtttcccgttttctttatagagcacgtgggagagcgccgcagctgctgcggctgtggcggatgtggcggccatggcgtggcgacctgtggcaaatggcggcatgaagaagaagctgatttgaggagtcgtcgctggactgggagaagtacatgaaggacaataacaaaattctcggagaatttgagtgccttgacaaatcaccatttagatactttcttggggaactatatggtggcaattcactgggaagcacaattgcagtgggcaatgagaagaagcggcagcgggtgtacaacactatgtttcatgtcccatggagatgtgaacggggaaattcagagtcgtgttcgcctcaattcctgcacccatctttgcagctctatattgttcaacaaaagatttgggaactgggatagctgaagatgcctctactgaagatgatgatttcagtggcgacctaccaccagagtttgaaaatatcatgatattcaatggtgttgaaaccgagagtgacattgctcctccagtgctcgaggaaaacaaggatgctgttgtatctgcaacaaaaactgcaaagtccctggatgggtttgccttaaaaacagggcaggaggaggagggtccggaagaggttgatgctactgaaaaagcaatggaagtggttgataatgttgtgaagtccctggatgaagaggtagaatcaaaggagatgcagaagcagcaaccgcatgattataatagcatgagcctaggggtggtaacgggtcatttaatttagcctagcaaatttacggatcgaatcaagttagggccggatcataaaataatacaattttgaactaataaaattaagggctttgttggttcgtgaagcaagtattagggccatgatccattaccactcctacatgagcctcaggaatcttaaagccacacacaagaaatatctcattgctgcaaaggaagaggaggtcaccgaagggaagaggcttcctctcgaggaggtggaagagaacgcatgcatcagccactgaacagaacaagcaggcgatttttttgtgtggatggcgtctgccacaaaaggattgaatcgaggagtgtgctctggttgtgaagtgataactaggctaccacatgttcattttcaaaagttttcgtgtgtgatcgtgatcaggggtgaaactgtggtttcagccaacaaacttgcagttcctattgcttctccccacttttttcctttatatatattttgtatcggttacagaacatggtttatccagtggtatgctgatgaaagatgctaagtttcgcttaatataatgtatatgaaggtcctgggtacctcaaattttgtccacattgaaccagtacgaatgacatcttccttgaaagttatagaaatgcttcaaagtt

SEQ ID NO: 33267 - DNA, 1905 bp, Zea Mays
ggtcgctatagagcaaggatcactatcaaatcttatagcctgaacgtacctgtagatgttagtgactaaaaattaattaaaacaagtaaacattaatcgctaaattgcatggtgatttatttctttttaatattgcttgtatatttatttcatggtttgtttatgtatggacatgactataatatgcaattgtgttctttgtgcttatatgatattagattcgagttgaaagtcgtttcaaatgtttgttatttatttgcattcgtaataatttattcaaatgtctattatttatttggtaatttttttaatcaatttttgattaatttaaaaatgcatttcgaaataaaaaaagaaaagaaaaccctccctaaccctaaggcccactagggcccatctacctaactctccctcccacgccgtccctatctcctcccgacatcgccgtcgtcgcccattcgcccccgtccctgcagtcgcccgtgctccgcctgctccaccagggcgcctcgccctaggggatggtctccgaccacctcccttcaccgccaccacgtgctcagtgacgcctaggtcatcggcgctgaagtttggaggccctgtacgtgcttcacagagatcgccgaccatgggctacgcagagatcgccatccgcccctctgggagcggcaagaggttcctggagaccatgaaggccatacagggggcactgataatgtcctccagcattcagatcattctaggctacaaccagctatggggtattttctccagaaaatacagaggcagggtggcctatctcgaagattttcaaatgtgtcctattacggtctcacaaccccgccatataaactggatgctctggaaccttatatgagcaagaggacagttgaacttcactggggtaagcaccatcaagattacatggatggcttgaataatcagctggctaccagccctctgtatggatacactctggaggatctgataaaaaaagcttataacaatgacaatccattaccagagtataacaacacagcacaggatgataagctaacatatgtcacaaacttcatggaccatcttgtctcttggcatactgtcactctacgcatgatgcgtgcagagtcttttgtgaaccttggtgagccaaatatcctagaggcttgagctacagatacaccctagttatcatcatgaggcattcttcggatacatcggatcaaatcctgctggaggagccagagagttggaaaatctcatgtctcacaagaaatgcttatcaccccaatgtcatatacgccaagataagctgctgggatttcaccattgcccttggatattcctacaaggaaatcactagtcagcatccagtttgaagacatgcaacaaaacaactctagaagctatggagctggtagattctggagttggcagtaaggcagtgatccaacttgggctttgaagccatggtgctttctctagacagctattatgtctgtagtgttgttagaataatcctggttctgtgttttcataacttcatcatgctagtgttctgctgtagcggaacacagaatggaacggaacgatattcttgttttactggttgagcactacacgacgattgtttttctagggtgttctggacaaagaaagcttgtaccttaaaacaggaggatacaagaagctggagtggttgtctgaaggcttttgaactgcttgaagcattaggttagctctggagattttgtgaatgatctagctagctatctgtaaatgatctagttgtgaatgatattataattctgatgcttttgtgaatatataattgtgtttgtgtatattgattaactgtgtatgtctttatgatttgtgtataaaaatctgtgatttgtggtgctt

SEQ ID NO: 33268 - DNA, 981 bp, Zea Mays
ccgctgccgttgccgctgccgctgccggctgccgctacctatgctcaagtgctcagtgctcaccgctctgcccctgcctcatcacacgcgcgcacggcgcacagataccttttctctcctctcccgtcccactctcctgggcaatcccggcccggcatggcgagcccgtcctcgtccccctcgcggaaggctctgagcaagatcgcctgcagccgcctgcagaaggagctcgcggagtggcaggtcaacccgcccgcgggcttcaagcacagggtcaccgacgacctccagaggtgggtcatcgatgtagcgggggcagcaggcacgctctacactggcgaaacctacaagttgcaggtggatttccccgagcattatccgatggaggcacctcaggttatatttctgcatccagcaccgatgcatccacacatttacagcaatggacacatctgtttagattggtccactggctatgccaagaaattcctagaaatattactaactaaccatgattccatgagatggcaactatcactggccccttaagatatactgtatgactcgtggtccccagcgatgactgtcagttctatctgtatcagcatattatctatgctgtccagctcgccagaaaagcaacgcccagctgataatgatcgctatgtcaagaactgtcgcaatgggaggtctccgaaagagaccaggtggtggttccatgatgacaccgtgtgatcggtgttccgattattgttgtcctgtatgcatttagttgccagactatgggagatggacttatttcgaacgacccatttgaccagaaattaacatgctcttgtggtttgtagatgaatgtgcatcagcgtcaggcctgtactttctgattcttacaccgtcgatgatatatagaataatgtttgtatcttgtcaatttacggaacagacatgaaattcaatgcaggtcactggtttctgaatcct

SEQ ID NO: 33269 - DNA, 389 bp, Zea Mays
gttaaattcatctgtatatctgtatacagtttaaaagaaaaaaagtaatggcaaaatttggttctccttttaccatcttaaggactactttaggaatctcaaatcctcttcgggatcgaagagattgaggtggaaataaactaatttcctctctaatacattcaatcctgaaaagaatttgagtttccaaactagctctaagatacaaaacaaaaggtgaggtggaggtggaggttgactaatgactgccttttttgtcttggctggggattggtctatctctggatcatccctgcaataccatttgttttgtaagctagcttttagagcaactctaataaactagataaatagaccattctcagtaaaaaagaaaagctcgatcaaag

SEQ ID NO: 33270 - DNA, 156 bp, Zea Mays
tgacattaattaggaacttcgggtcaatgatgttggcctcttttaataagtgtgtgcaagtggtttaatctattctggtcattatggtggtcgttcctttgctagctgaattaataatgttttgtaggtttattcttatcatgcattatgtttata

SEQ ID NO: 33271 - DNA, 1165 bp, Zea Mays
gtgccctccgtcctcacagcttctcctccagtcatcccggtcccggccgcggccattttctatcccgtcaaccacatcagggcaacctgccaaacaccgcgattgcgcaatccgtccaaaccccgtcaacttcctgattccctctcccggagccatcgagatgctctcttcctccgttagttcagctaccgccgcgctgtctcgcgggtcgccgccgctccaagaagcatgccccgcctattgcttccatctccatcgcctcgcccctgtctgaacgactcggtgcgccgtccaccactctccaaatatcggttcttcctgcccaggactcggaggcggccaagtccgcggcttggcgtgcgaatggcagagatgaccaaggttgggagcgccggggaaccggccgaggttggggtttccatggagagtgacccgattgtgggaggggaggcgccgtcccgcccggggtgggaagcgagccggtgggcgcccgtggaggctgcgctgaatcggatgtgtactactggcttgggacaaattatctgaccatgattcttgggcctgcaactctgtcggtggctgcctatctgtcttggctacgggtgtctcggcgccttcatacactaaaccaggtcatggcgggagctgttgtaggatctgtcgtcggtgctctatggtttgtgctctggcattcgcttgtgcaggaggcttttgcttcttctctgctggtcaggattgcagtcgttcttggatcatcagcattttgtgttggctttgtcatctacatgattcgtcactggctcaaggatgagtaatgtacttcttagccgcaatgggagatcgactgataggcacggtgcgtttggatgagtgaatccgttccaattgttatcagaatcgcttgaaatggtgtcaaatgggttgtgagtggagcgattcacgagtgaaaccatttttaattaaaattcaatctagtagttaaatgatttcacgaagtgattctagttcgtgatcagaaacatttcaagaatttagatccaaaatgtttctatacccatcatggtgcaaagacctctaaacgcacatttgatttctgttgtgaattagacctttttatttaacactgaaggaaagttaaagcatggattcttgtggtaccgaataa

SEQ ID NO: 33272 - DNA, 719 bp, Zea Mays
ccgaatgcattttttatttacacaatttctagcttggtacatgtcatatataaatggacatgggcaggcactcccgctgagggtgcttcttggcttcgtctgtagaggcttgctgatatttggcataggatattgttaatttgtgggtatgatgcatggattatttgagatctttgaacagataaagcaatcattatcatctcaaagggagggtattgatttcatggccgtgattccccctctcccagtcaaagccatccaagccgcaattacttcagggacagggtgttcactggggctagaaggattctgtttttattgcacgacacatgacaacatatccaagtagtccttgattgatttagcagcagggagtaagcgtcttgctaaaagtggctccacaggtgaacttagcgatcgtcttgctaaaagtggttgtacaggtgatcgcttgaaggaaactcaggttcaagaaggacacatgagtatccgagaaaaaactcccaagaaatcttcccaaaactgaatgttgccttctaccatcaacaacctttgaagttctagggtgtttatttttgtatgttctctacaattatgtgtatatatatatatattcatccttttcaagacaatttttataaatataacaacttgatttcaaatgttgaaacacgataatttacctaactctatttagatgagtatatgtatatcttgct

SEQ ID NO: 33273 - DNA, 1888 bp, Zea Mays
actagcgctagcctaccactgatacggaggtcgtcctaccacgacgtgatccgggtgtcggagatccagaaggtgctggacatctccggcgtgcagacgtacatcatcaacagcgcgcgcgtggtgttcctgaacgagcgcccgcagcagaggccaggcaagggcgtcaccaacacctgcgaggtctgccagcgcagcctcctcgacaccttccgcttctgctccctcgggtgcaagatcgtggggacctccggtgacttgcgcatccggaagaagcaggccgttgtcaagaagcatcagaagaagaagaagcagcaggcgcagcagcacaggggcgccgcgttggactcggaggacgactcttcgtccaccagcaccagccgcggcagcgacaggagcagcgtggtgcagagcttcaccccgtcgaccccgccggcgacggccaacagcttccgaaccgggaagcggcgcaagggcgtgccgcaccggtcgccgttcggcagcctcatggtggaggagttctagtcaaaggcgtggtccgaacccgatgccggcccacgcggttgccccctcgccaaaagcagcggtacaccccactgtagcatacgcacttctataccatctactataggtgttgccggatcggccggtctacatagttcatagccacccaagaaaaaaaaaaggagctagtagtagcaagcaataaccaaggccccactgcacgcccgcgcttctggacgacgaggccggtgcaatgtggcacgtacgtcgtacggtacggttacttccattccatagtactgtgctactactactgtagtttacatgcagtcgcagagctgtgctggtagtgagacaacggtttgggttttggtgcctgtaaaaggaaacgaggtagttgtagcagttaccctagtcgtcaccactcatcagcagccagacactactaaattacatagtataataggtgtttcctagtttttaccggcgcttgatatagatgtggatgtacatatatacatatactgtcacagatggggaacggtaggagtgttgttggtactggtgtttgcgtttgttgcctgtaataataaagaggataagaatgctgcatgctcctggcttgtgtgttgcttgtctgattgatggtgggtttatcttctcctgccccctctttttctctgcagtctgtactgtaccatccaccgccagatgctagaaaccgaccatgcaaatgcgtgcatctgcagctgcagctgcagggcggcgggggacgccgggacggtgctaccagcggaacctgattcgtcgctgtgtacggcgagctgagccgtgcccgctgcctaacttggttgacccggcgttcggcatggacagcggcggccggtcgatgccgacgttctcgtcttgctgtgccgaaataactggctccgtcttgctctgccgggtcccatcgtgcccatagtggtcttcgggcgaggcgtggaggcgcgcgcggccgccggcgcatggccgtgtggagaggcgcaagggcgacggagcttcagacgacttcacgcatggccgtgtggtgtggagatgccagccgtgccttgtgcggcgtccgtcccagtcgcgcgcgccggcgcagcgcgggcaagtgtctggaaaatgctcccgcgcccaccaggcaccaggccgccgccgccaccgccaccaccaccgtgccccccgcgcgtgacgcacacgcacacctgtccgatccccatccgtcgcaactggttttccacggcgaaagcaacggggaggggccaccaccaccgtacttgctcggtccctttcccgcgaaacgttcggcgtacaaacaagctttggagcttcctttcagtactggatttcgccaaac

SEQ ID NO: 33274 - DNA, 2892 bp, Zea Mays
ccgccactaccctgctccctcccccaagccgccgccactccttctccctccccctttctctctcttctctctctaccgcccacctctctccacctcctctccccaagccgcgccaccaggagtgcagcagccgctagaagctgccatccgcccgccaggagttcagtcaatctcctgtctcctgagagccgccgcccgccgagtcccgctcgccgctcggtcgctcccgtgaggcgctcgatctcctcagcgccgcgcccacccagccacggtggagccacccttcgtcccgtcgtccggcggccggccctcaatccctcacgccctagcttctctgccatttccggtcagcccctcacgccctagctttcctatcaggcgctcggtcgctccctttgccacgcgctcctagcttctctggtcggctcttcctccgccatttccggttggatcctcctatgtgctcgacaaacggcaccagcgccgctgggtactgtcaccgcttcggtcgccggagcccggagatgtaaatgcgctggagttttcatgctgtcgctggaggaattgaggaagaaagtttggtaaccgtatactgctctaagaagttttgccagttttgatcatagccaagcttttgattcatcataatctgatcctgtaaccaatttctctccctatgtctagagcagcctcgtggccaatgcaattgatgccctggaactgccgaagggatctgcaattgctattgacatgcctatggatgttacctaatttcaggatgctaaggtaataatgcttggactggtacccagcatcgttcgtacttggaagaatacggactgtacagctggactagactggtcctccatccggtaattttttaattgctcaactatccagaccttttgtcttaactttgcaagttacacatatagtatggtatgcagtttctattgaccatattcattatatacagatgctttagctcctctagggaggcatccagtgtggattttgtgttaaaggataggttggaaaccacacgacagcaatatctgaatttcttatttgatgatgctcagatacataattttttgactgagccttgatattctcagaaggtgatgtcagtcttttcctaagagaagtaagtagtgttactccatccttactgctcggatgtcggatcattgactaccactgaggtcagcactggcattttttttaacgtagagctctgcagttcttacgctgacaccttataagtgaaagtgcaatatagaggccttgtgactatcttttcgtcagcaagagaacaacatcgatcttggtagttcttagttgcccctgtgtttcggaagtgttgtgtcagattattatatacccatttctagaaataaccaattgctcatattgcttacttagacaaataagcaatcttgaatctggaattttacagtgtacctgaactatcaactcccttcaacaaacttttttgtatggaacaggagcagcagcaccccccccccccccccgcctagtgaaaatattatgaacagaaaaagaacatcaaacagcaaagaaagaaaccaaaaagttcaacaaacattgcttatcatcaccagcaattattatccttattcctcctaatcagaaatcagctttaacgacctgtttggttgattgtctggtacttctctcaaaatatttatttgatttagctttaggagctatcttgtttccctatgcagggtcttcatttaaacttcctcaggattttatcagtatatattttacttttgcagtttaaacaatggaatgtagcatttatcggttccagctttcaatcttgcaaaatagaagcactgacagcgtgcttgttgcatgcattacctgtaataatgctccatttgtgttctttatttgtttagccactctaatcgacactgcccgtttatttacataggaacgtcaatcatatggatgcttcttcagtggaattatcatgtgaatccccatagtgcccaagctgtgaagcagtcatgattgatgcttgggctgttagctttatgtggtccagggggaggaaggataccttagaaactgtcagaaaagctcatttcatacttcatttttcatcatgttattttgttgcatgagacatttgtccaactgcgtagggaatgaaaattcaaattatttctgccactgattgggggatgtaattccaaacgttgtaaaaggcgactgtatctagtgattatttatggctgatgggaagagctggttgtggtatagtgtcagcagcgtatgatcggttggttcatcaaatctgtccttcgttgattagtttttttgttttgttttgcagatgcagttgaagacccaagatttgaacgacactattgtcacaccgaaagtgtgttcgatgaaatgcctccaacatccggaggtttctatttgtgaaagtttgcaggctaagacaaatgatagctattcaaggagctagaggctgctcaacataaagcatcaacagcaacctctggaacagctgaaaatgctctactggaagctaagtcagtgactgatcttaaatctaaagatttggagaagaagaaaagtgagctttgttcactgatacaagaagttggagtgcttttgtgaaggcttttgcgaatcacttgaagtgttagtacttttgtgaatgattttgtaaagtgtttgcaaatatgtgcaaaacataataacatgtgtaggttttgtgaatgattttgttgtggtgcttgttgatggtttatgtgatgtggatctatcattgtgcaatactaattaaatttgtatatctatgtgattatctgtataaaaattggtgatttgtgatgcttttgtata

SEQ ID NO: 33275 - DNA, 1918 bp, Zea Mays
aacagttatttcttgtactggtctgccgtattagggatctgaaagctgaaaatgttcttcttggatcggatggtgcatggaaaatatgtgattttggaagcacatcaactaatcataaatgctttaacaaaccagaagagatgggcattgaggaagatgtcatcaggaagcatacaaccccagactacagggccccagagatgtgggatctctacagaagagaagttatcagtgaaaaagttgacatttgggctttggggtgccttctatatagaatatgctacttcaagtctgcatttgacggagaatccaagttgcaggtactcaatggcaattatcatatccctgagcaacccaaatatagcattgctgtcacagggctgatcaaagatatgctggaagcctcaccaaatgccagaccagacatcacacaggcaagagctttgattgattgatcattcatcttcacgatactctaggtctggtttcgtgttaatgagctactgtcgcttgagttacagaaaaggttacctgatggaccttcaccagccgtttccttgagctcgcaagatgaaggtgctcataaaagaacacctgtgatgcctagaaggaaccctccacctccaagagagcaatctaatagttttttaccgcatggaagctcaaaggcaggagatgcacctttaggtgcattttgggcgacacagcatgcacaaggtgctcaagctgtagttaataggaaccctttgtttgatggggagtcaattaaggcaccactgtcatcaaagcagaaccaaagctgggtggacaccagcatcagtattcctggcaataggcatgatcattctggtcagatgtcactgacaagtaaagcacaaaataactctttgtccaataatggtttcagaggtctctctgacacggagatacaaaattctgggaaaagtagagcacaacaacctcaacccgagccaaaatgtgagaaagacccatttaatagctttgttgcagattttgacactcacaatctcaacattgccgttggtaaggcatccgaacttgaacttgaagtgtccaatctgaaggagcagttgaagaaaaccacattagaaaaggctgagatgacagccaagcatctcctcatcgtcaggagatccaagagctgaagctcactcttgccgagccaacacctccctcaaacaaagtcagctcaaggacacaagattctggatctcagcgaaaggaaaagatccaaggtactgtgtgggagcttgaacaagggatgcttgctagcaactcctcatcagccagttctgatgccaaaacatggcaggctttccctgacacaaagactcaggcccgaccaaaggtcgatcatgcaactaatgggagccaaaacataaccaagaacacaacgtcaggtgcttcccccgatgcgtggggttttggtactgataatttcagaacaccagcaacagcattaagcgctaccacacagatcaacagggcagctgcccaacggagctcatcccaaagatttaacgctggtgtggccaaggtagagcagccatctggatgggctggtttttaacttcaatcgacatgcgttaaccatcattctggtcaacatttgcaatccgcgctacacagctgctgttgccgatggagttgtgatctttgacatccacagggcatcaaaatcggttatttttagtgtgttcatcaattttggttgtgccaactttgatattgattcatgagatcacttgaaattacccgttgttaataagtaaatatatattgacagtattgtgcgtatttctttgtatgattatgaatatgcaacgggagaattcgggcggtatgacggtcccgctcccgccctctggccttccccatcccgacgcctcgtatccac

SEQ ID NO: 33276 - DNA, 327 bp, Zea Mays
ccgaataccagccgggcgcatgctcacaagtccgtaaaggtgatggcaccgcaaccctctttcctccccgtttgaggatttctaagctaccgcgagagaaatagagagaatggggagtgaaagtcggagcaccgccgttgtagccgcatactggtgtttgccgcaaacgggtccgatcgggagtcttcatcagagagcggtgaaggttgcagcggttccggtgctgggagaagaccactgggggccatgagatttctcaccagagccagggaagggccaccggccgcaccacgccgtggccaaacatcgtcgcgtcatcatcgtcgg

SEQ ID NO: 33277 - DNA, 537 bp, Zea Mays
atccctgcatcgcaccctcccgggccgccttctcttctccagcgtccgatctcccactcccctccctcaccgcagctctcccacctccgccctccccccgcacgcgctcgccacctcgccctcccctccacgttgctcgcacccgcgcttatataagtgcaggaggagctcatggcggaagctccggcgagccctggcggcggcggcgggagccacgagagcgggagccccaggggaggcggaggcggtggcagcgtcagggagcaggacaggttcctgcccatcgccaacatcagtcgcatcatgaagaaggccatcccggctaacgggaagatcgccaaggacgctaaggagaccgtgcaggagtgcgtctccgagttcatctccttcatcactagcgaagcgagtgacaagtgccagagggagaagcggaagaccatcaatggcgacgatctgctgtgggccatggccacgctggggtttgaagactacattgaacccctcaaggtgtacctgcagaagtacagagagatggag

SEQ ID NO: 33278 - DNA, 1211 bp, Zea Mays
gctgttgaactcatgcttgtcgatgcactcattgaggctaatgactacttggggatatcattgcatgcacacgacccagaagatttttggaagttggatgacacaatcatcaaaaccattgagactgctcccaacaatgaactgaaaaaagcaaaagaaatcattcaacgtattcgccgaagagaactttacaagatccatcatcacctcattccttatagttatttagttagtactaatatgaggaatggagtcaacctaccaaatttgaggaatggacccatgatgcatcaccacattttggatgggttttgcaaccagtattctgttccaaaggacaaactggagcatttcaaaaatattactgcacaggacatagtttgttcgcagaaatcttctgaggtgctgctgaaggaagaggatgttgcagtaagcaatgttaagatagatcttactcgtggaaaagataacccccttgaaagcatcaagttctttaaggattttgggtgcgacgagaagttccccatcacagatgatagggttagccacttgctacctgcatacaacgaggatagaattgtgagggtctatgccaagaagcctgagttggttgatgtggtgtcagaagcctttgagaatctccagatgagaatgtatggtgagaaaactcaagtgcatgagacgcccaagagaaagaggattagatccaactaggcagttggattttgtctaatcgcactttagataacatacaaatacaacacaggaaaatagcttcacaaacaagaagctatatagataacaggtttcagatggtagtctgaactggtaaggtgtaggtattttgtgtacaggagaaaatacaaacaacattgcatgaagtctaaaaactcacgttgacgtacgagatgctgcatgtgcgtagattggatagctagtcaaatactttatgatgtggatggattttaattactttatgatgtgtctggatttgtaagtacttgtcattttaatcttaatttatatggatctaagagaattaagtgggtttaaatccctattaagtcaaaatctctcctagtttcttttctccgatctttgtgggatgggaatagctaaacaagatctcagtacacatggttgactctatggaccatatctcattttgttttggtgtgatcaactatttatctctttgattttgttttgtt

SEQ ID NO: 33279 - DNA, 623 bp, Zea Mays
ggcaaagaatttgacactcggcaaagagccaaattccagtagtgcaggtcaacgaatccgatatcataaatcccttatttatggtatcgttgggtctccatgtttcaagaaacatagcaggtgttagaaaacttcagttggcattgaatatatattatttagtagtggacaagagagaaggtaaaaacttaaagaacacatgtgctgataagagagaggcctagcgcatttcgctagtttatctcaaatatatccacaaaatcaagacatgtcacttcatcgtcgttgaagtattgttgttgtacaaacacaccaatggtggtcctaccagcggtttattccttcatatgccagtccttgaatctgctcaagtgtgttgtactagtacaatgtcagtacgttgtgatggtacaccaatcatatttgatggtatagtgcaatagctgtatgacacgtgagggcctagtggcaagctattgtgatggaccgtccctacaaaaattaaatctgaaattaatgtgggccctccccataaaaaaattaaaattaaagtggatatatgacccacataccatatattaaaatgtagatattgaaatctatcttataatcaaaaggccgag

SEQ ID NO: 33280 - DNA, 1041 bp, Zea Mays
gacgacaaggtaagatatatattttttggtgtcagcagtcagcaagtgtggcacatccggggccatgttcgtttaggctgttcccggccgggaacagcgaccaaacctcgtggatcccttcccatggaaataaacccggcccacagaaaaacaagcgttcggttaagtccgatgtgggctgtatccagatcgttcctcgtcgttccagcccgggaaacacgcccggtcgaccgggggtggaaaatatcccagcctggactgcacgcgaacgcgaagggcacgcgacttctcgtcggtgtcgatctgctccggcgaccgcttgtcatcggtatgtttcttcctccctgggctttcccttcccaccatctcagcggacggcttgaagtttcctctaagtggtgggcgctcgctacccgcagctcccatggtctgcttgaagtttcctcgccctaaaccctaaccctaaatgtggctcccatgtctgcttgatctccttttagctgctgtagtgatggcgccatggccatggtctgcttagtttcctcgccctatccaacacgaaagctgccgccgaagcacggtcggtcacgtcgttcctgctgacatggtcttcttgagtttggggacaaagaaacaagaagaattagactagaagattatccctacatcggtttgacttggagaagacgagcttccaccatcttgggaccctataccctctcctttagagagctgcacctgaagaaaccaatgaacattaggtattacaaataagggctgtattgtattaatgtggttcttgtaaactaatttttcctttgaattttgtaattgaatcatccacaggtgtgcgacttgcttttgtttatgtggatctattaattatgttcaaacagttgcttcataattggcattggcattggctgctcaattgtgtgcccctcgaacctcccctgcaccatctagagatattttgtgatgccattctagtattgcttttagcatttttatccataggcttaaccgaacaggattttggca

SEQ ID NO: 33281 - DNA, 4527 bp, Zea Mays
cctgcattgtcaatggaagacattatcagagcttcaaagtgttagtggattcaagaaggtaataaattacacgaaaagagttgctgaggaacagaggtacaagagggcactatcacgtgaagaggttgaggtgcatgatgtgggcaaggagatggagctggatcttattaaacaatatagtcaggttgaacggatatttgctgatagggtcagcaaagctgatggagatgatctggttcctgaatatttagtcaaatggcaaggacttccttatgcagaatctacctgggaaaaagatacagatatcgattttgctcaagatgcaattgatgaatataaggctcgtgaagctgccacatctatacttgggaaaacagtagatttccaacgaaagaaaagcaaagctagtttgaggaggcttgatgatcagccagaatggctaaaagctggtaagcttcgtgattatcagctggaaggactaaactttctcgtgaatgggtggagaaatgatactaatgttatacttgctgatgaaatgggtctggggaaaactatccaatctgtttccatgcttggcttccttcataatgctcaagaaatcaatggtccatttcttgtagttgtgccactgtcaacattgtcgaactgggcaaaagaatttcggaagtggctgcccaacatgaatgttgtcatttatgttggcaaccgtgccagcagagagatgtgccagaagcatgagtttttttcagacaagaagggtgggcgtcatgtaaaattccatacgttgataactacatatgaggtgattctcaaggacaaagcggttctttccaagatcaaatggaactatcttatggttgatgaagcccaccggttgaaaaattgtgaagcatcactatatactacccttttggaattcagcactaagaataagctgcttatcactggaacacctttgcagaacagtgtggaagagctttgggcattacttcatttccttgatccagttaaattcaacagcaaggatagttttgttgaaagatacaaaaatttgagttccttcaatgaaaccgagcttgcgaatctgcataaggaattgaggcctcatattctaaggcgggttataaaagatgtcgagaagtctttacctcctaaaattgaacggattctacgtgtcgagatgtcaccccttcagaaacaatactacaagtggattttagagcggaatttccagaatctaaataaaggagtccgtgggaatcaggtatcacttttgaacattgttgttgaattgaagaaatgctgcaaccatccatttttgtttgaaagtgccgatcacggttatggtggagatagcattggcgatcggaataaagttgaacggattgttatgagtagtggtaaacttgtcttgttggacaaactattggtgagactacgggagactaaccatcgtgtgcttatattctcacagatggttaagatgttggacatccttgcagaatatctctcccttcggggatttcagtttcagaggcttgatggtagtacaagagcagatcttcgtcatcaagccatggaacattttaatgctcctggaagtgatgacttctgttttcttttatccacacgtgccggaggacttggtattaatcttgcaactgcagatacagtgataatttttgattcagattggaatccacaaaatgatctgcaggccatgagtagggcacataggattggccaacaggaaactgttaatatctaccgcttcgtcacatgcaaaagtgttgaagaggatattttggaacgcgcaaagaaaaagatggttcttgatcacttggttattcagaagctaaatgctgagggcaggcttgagaagaaagaatccaaaaagggtggctccatatttgacaagaatgaactttcggctatcttgaggtttggagcagaggaattgttcaaagaagacaagactgatgaagaggccaagagaaaccttgaaagtttggacattgatgaaattcttgagagagcagagaaagtcgagacaaagggtggtgaaggggaggaaggaaatgagcttcttagtgctttcaaggtcgcaaacttttccagtggcgaggatgatgcaacattctggagtaggctaatacagccagatcctgcagatattattcaggaaactttggcgcctcgtgctgcacgtaataaaaagagttatgttgaagatccccagtttgacaaaaataataacaggaaaagacgtgcagttgaagcacaagaaaagccaaggaggcgttctggcagaacagtggaaacagttaattcagtaccattggttgatggagcagtagctcaagtacgagagtggtcttttggtaatattccaaagaaggatgcttctcgttttgtacgagcgggcacagttttggattttttcggtgtagctgtgaaggcctatgaattgctagctcgtgttgaagagcttcagttgttgtcaaagcgcattgcacgatacaaagatccaatcaagcaataccgcatccaactaccttataaaaagcctcagtggtcagcaagctgtggatggactgaaactgatgatgctagattgatggttggaattcattggtatggctacgggaattgggagaaaatacgtttggatccaaagcttggcctgacaacaaaaattgcaccagcaacacttggtgagagagagacatttttaccacgtgctccaaacttggataaccgtgctagcgctctcctgcaaaaggaatatgctaagtttagcggtaatagctcaaaagtcaaaggaaatgcccgccagacagtcaataacgacagtaatagtggagctcgatcaatgagaggccgacaaaaggatgcaccagataaagaggataataagccgaacaaagatgacattcagaagcgcaaggtaatgatggaagctgaagcaagagaagaaggtgaaatttctgaatcagaggcagagacaaagtatcgtctggacaaagaggagaagtggctcgaatggtgctctgaagttttaaatgaggaacaggaaactttgaagcgcctggacaggctgcagaatacaagtgtaaacctcccaaaggaaaaggttctttcaagaatccgcaagtatctcctgataattggggacaaaattggtgaagttgtccggcaacacagtgaatcttataggcaatcccgtaagtgtagccgcacctcccgcatgaccatgaggttatggaattatgttgccaccttttcaaacatgtctggggagcaattgcatgatctctatttgaaacttagtcaagaccaactggaaggtggagttggcccatctcatggtgccaatttcacatccattccttccagcaagggaggtaactcaaatcaacttcatcctacaagaaaccataggccaaccaggtctctccagtacaattctgagtctttgcacaataatgagagctctggaagttctgaagcctggaagcgtcgacggagagcagaccctgataatcagtttgacacccagcctttgtatcaacctccaattatgacaaatggaaataggttgcaggaatctagtagttctgcaggaattcttggttggggtccagttgaaatgagacggtatggtaatgaaaggccaaagcgtggtgttcatcctagtcattttcctactgggcatggacctttgttgtagctgaaggaattagatgactcgaacaaccttgtccactttggcataactgttcccagtgaatttcagcttccatatagttacaaatggtggaactctgtcggaattgaaattcttttttccataacaagaaggaataaaaagcaagacctgacctggagcgcagtttgaatactgtccctcaaaggtaatgccaggactccagaggcgacgcagggatttgttaacagctacactgaatatccttctgacaacatcacagtaaaacgaatacatggtggcttgtcaactgccaagaggattaatcgaggaaattttgtcgattcagttttgtgatccaatagaaaagttgggggtcattaggaaaaagttcatctcaacaatgatctatagttcactctatacatgtattatgttttacattgcaatataatgaaatatggttcagttattcccactcagtgtgttttgtgcccttctgtattgatgtaatagatcaaagaaatgcatgttctcgttttttttttttttttttagaaaaccgcaggagaactgcgcatcttatatattagagaggaaaaaagacattacaaaagaggagaagttgcagagcaactctcccacctaataaagaagttgcagctgggggggcatagtatgtgttagtttcaatttctctaaatagaggaaatatatattttgttcacgcgatggaatcggtagatacttgaattgattccatagtatttttttcctgaggtgatgtgagaatgaggtgtgtggttatatgtatttcaaat

SEQ ID NO: 33282 - DNA, 2427 bp, Zea Mays
gcttctttcaagaactgcagcgtcttgattactgctttacctctttgcggatggatggatgcgattgtattgagccactttggcaggccgatgatctcttaatgaagtaccagtacatatctgacttctttatcgcacttgcatacttctcgatccctttggagctgatatactttgttcagaagtcagctttcttcccctaccgatgggtactcatacagtttggtgcgttcatcgttctgtgtggggcaacccaccttataaacatgtggactttcactacgcataccaagaccatagctgtggtgctgacagtggcaaaagtggcgacagccgttgtgtcatgcataacagctctgatgcttgttcatataatccctgatctgctgagcgtgaaattgagggagaggttcctgaaagcgaaggccgaggagcttgatagggagatggggataataaggacacaagaggagacgggaagacatgtgcacatgctcacgcacgagataagaagcacacttgacaggcatactattctgagaactacacttgttgaaatgagaagaactcttggtttagcagagtgtgctgtgtggatgccatcacgctctggaacaacccttcagctctcacatgcactccataccaatgctccgcttggatcagttgttcctatcaatcttccgattgtagctaccatttttaatagtaatcgtgctgagagaataccacatacttccccattagcttcagtaaaggctcagaaaagcaagtacgtcccaccagaggttgttgctgtccgtgttccgctgctgcagcttacaaattttcaaataaatggttggcccgagctatctgcaaaagcctttgcagtgttggttttgatgcttcctccagacagtgcacgaaaatggcgaccccatgaactggagcttgttgaagttgttgctgaccagttgcactgtcccatgctgccattttggaagagtccatgcaagcccgtgatctgctattggagcagaatattgctctggacgcagcacgccgagaggcagaaatggctatatgtgctcggaatgattttcttgctgtcatgaatcatgaaatgcggactcctatgcgggcaatcatttctttatcatccctcctgttagaaacaaaacttactgcagaacagcgggtgatgattgagactatactgaagagtagcgatcttctagaaactctttcaaatgatgttttggatatatccaagcttggagacggcagccttgagctggaaattgcaccttttaatctacatgccacctttacagatgtggttgatttaattaaaccagtagctgcattaaaaaggctatcggtaatggttcatttggctccagaattgcccacctgcgcaattggtgatcggaagaggttgatgcagataatactaaatgttgctgggaactccgttaagtttacaaaggagggtcatatttcagtttcagcatctatcgctaggccggattctctgagggacccatacgctcttgacttgcatccagttctctccgatgggtctttttacttggctgtgcaggtaaaagacaccggctgtggaatcagcccacaagatatgcctcacaccttcacaagatttgcacaccagcaaaatgctacaaacaaattgcgtagtggcaacggattgggtctggccctttccagaagatttgttgcccttatgcaagggaacatctggctggaaagcgaaggcgtagggaagggctgtaccgcaacgttctttgtgaagctaggactatctgatgcaaatctccggaggatggtgcctcctgtccagccaaaacatggaaatgcagatccagatgtatcatcaataatcaacggcgacatggcgattcttccgcgttgttaccagtcgatgatatgacaaggaactgcaggaggagcctgatcttgtgatatcatgatttgaaggtggattcacggggttaaggatgctgtgtgtagagattgctctccccgttttttttttttttttttttttgcagagccgtcgcgctctaggcaagcaggtgcgagtgcgatcgggcgaatccaaaatagcgggacgcctctactagggaattaacagcgcagggagagcggtgcggtgttttaagaaattataagttgtgagatgagtggcgtgtttgttagacgtcatttagggttttctagtgttgtactagtatagtcttggtagagagaagcagaaagaagctgatctgtacacgaggcaaatgaaatgctgatgactacttataaggcttctactgtttgtacagtattttttttgtctacataaattgcaacagtatagtatttttgtctctatgaattgaattgcaggtgtaacagttctttaatttaattcgaaacgaa

SEQ ID NO: 33283 - DNA, 1300 bp, Zea Mays
ttcggccgagcagacccgtggcctcactcccccgcgcgttagggttccgctctcatccttcgtgcctgctcaccgccgccacttccagctaggccgtcgtcgccgcgccccaccagcttcttaactacactacctgtcatccagtagccctgttcgtcgtcgacactccagttcgaataaggtacatctgcagcgggaaggcccagacgaaggagaagagcacggggatgtaccagagcgccacggtccccgccaccgccgagatgtccgggtcctgccccagcgccaccagcagcggctccgtgaacaggtacacggggagctgcaccacggcgcacgccgacaggatgatccacgaccgctgcaggtagatgcccagcatgtggtactgcttcgccccgtacgactgcccgcacagcgtctccagcgcgctcgccatgcccagctgcatgcagatgcatatcgcgcccggccggacgccgacgacgcggacttgttggaacagagccgtcgtcgaccagtcgacgcctgggtgcctggccattttcttcgccgaagaagggaaaaagaagccgccgccaagaccaagagggaagaagaggaagcagcagccaagagagcaattggaacatgactgttgggatcggcacgagatgtcgtcgaggcggcggcaagctttattgattccaatgttttttttttctatctagcttgtccggcacgagttggtggctgactttattcgggctctgaaccgagagcacggatcgatcttttgaatcgaatgctgctggcgggggcgggccgcctggagctcgacgaacgaagggcaagacgacatcgactacaaaatggtccccgatcgtgttgtgcagcgtgttgctcgtgatcactatacttgcatgcatctttgaatttgaatcatgcatgcgtgcatgtccgtatatagatccacaacatgggctgtactttttttgaaaaaaattgtttcgtctttctcttttttgcgaacgataattgtcggcacgtttttttttcgttcggaggccggtgttagagagtacacatgtgaactgtctgtccacttctctctccgttagcttaatcttgtgttctaacgagagagagagtacgtgtgtgtgcgtgtatggagggagttatgcgaacaagaatcaagaacgaatggattgatagaaagacacgtacgtaccaggatgccgttgctgaacctcatgaggacggtggagacgagcgcgtaggcggcgagctcggtggcgccgatgtggccgatgaaggcctg

SEQ ID NO: 33284 - DNA, 5289 bp, Zea Mays
tctcgaccaacgggcaaggcacaatacactgcgccgttcgccactgttcctcccagtcccagtctcagtccttcttcaagcagcagacagggcgcggagaggagggactagggagggttctagaaccttctagaagtgaacactccttgccgggggcagctcctgttgctctgcgccttctgcagcgtctttgttccgccactcctgttcctgagctcctccactccactcaagtgctctcagaaggcggccgcggcggcagacgatagagagcaccattcgccgcctcaccatcctcctgctcgccgcctccgcctcctccgccccgctcagaatggtgagggatcacgccgcgctccgccgaactccggcgaaggcttccgcctcggaagccggcaacgacgagaactcgccgggcgtcgtcccagatgtcgcggccgttggcgtcgccgtcgccgccacggaccccggccgccctccgctgctcgctatccagccgccggcgtccggtctgaagcggaagcccgagtcgccggcgccgacgccgtccaagctcccgttccggacccccgagaaggccgccacgcggagccggttcggctgggtcccgccccgcgccgacgaggccccaccgcgggtcggcgtgggggcaaccccgcactgcgcgatgaccacgccccgtgcgcatcggggcaaggcggtgacggtggcgccggcggcctccgagggcgggtccacgcacagcacgcccaccaagagcgtcaccaagccggcgcacagcattggggcgagcgggtcgaggccgcccatgagcggtggcgggcccaggggggcagggtttggcctggggttcaccatggcggggaggggaccgccgacgtcacttgggccgccgacggtggtgaattccgtggaggtgcctcatttcgagctccgagaggacccctccttttggatggacaacaatgtgcaggtcgtcatccgtgtgcgcccgctaaataataacgaaaagaacctgcacagttattaccgatgcttgaaacaagaaagtgcgcagactatcacttggattgggcagcccgaaactcgttttacatttgaccatgttgcttgtgaagcagtggatcaggaggtgctcttcagagttgctggtttaccaatggttgagaactgtatggctggatacaacagctgtgtgtttgcttatggacagaccggaagcggaaaaacatatacaatgcttggtgaaataagcgatctggaagtaaggcctagtccagaccgagggatgacaccacgcatttttgagttcttatttgccagaattaaagcggaagaagagagcaggagagatgagaagctcaaatacagttgcaagtgttctttcctggagatatataatgaacaaattacagatcttcttgatccttctgccacaaatctcccactccgagaagatataaggaatggagtgtacgtcgaaaatttgactgaattcgaagttggctgtgccagtgacataataaaactcctgatgcagggttctgcaaatagaagagtggctgctacaaatatgaaccgtgagagtagccgctcccacagtgttttcacctgtatcattgagagtaggtgggagaaggattcagcatccaacttacggtttgcaagattaaatctggttgatcttgctgggtctgaaaggcagaggacatctggagcagaaggtgagcggctgaaggaagctgttaatattaacaaatcgttatcaacacttggccttgtgataatgagtttagttgatctagcgcatggcaaacaaagacacattccatatagggactcaagattgacattccttctccaagattcacttggagggaactcaaaaactatgatcattgcaaatgtcagcccttcagtatgttctgctaacgaaacactcagcaccctgaagtttgctcagcgtgcaaggctcattcagaacaatgcggttgttaatgaagacgcttcaggagatgtgctagctttacaacatcagatacgtctcctaaaggaggagcttgctgtcctcaagcgtcaacatgtcactagatctttatccttctcagctgatgtttttggaggtgatgttgatgatggtagtgaaaacatgagtgtggatgacaagaatgataataaagcccataacggacactttttgaaagatatacgattttcaaataagcaggtgaggtcactggaagaagcacttgccggagcattacggagagaatcaactgcagaaaatactataaaggaacttgaacttcaaattgagcagttgaatgaattggttcgacaaagagaggatgacacaagatcggctaagatgatgcttaagtttcgggatgataagattcatagaatggaggttcttgtgaacagtaaattgccagcacaatcatatctactggaggaaaacaaaaccttatcacaagaagttgaacttcttagggaaagagttgataaaaatccagaagtaactcgttttgcactagaaaatattcgtctctcaagccaactgaagaggtcccagctcttcttcaacgaaggggagagggagcttctattgaatgaaatttctgagcttcgaaatcaggtttcacaaatacttgaacagaggacagaaaccgagcaacaaaataccttttctgacaaaactaagttgaaaaggaccagccaagaagtagaaacatgtagaagcaaccgtcaagtttgcttagaatcgaacatagcactaacaagggaaatagctgatcttgtggaagagaaaacagcccatgcggaagctgaggaaaaaccagctggtttaggtgacaaactgcaagaagcaaacatacatatcctccaatcgtgtaagcattgtgaggcaatggaaagagaattgaacgagtcaagatctcttattgaagctcttgaatcacagcagattatattgataaacgaaatagctgaacttaagaaggggtgtgtcgaaatctcaaggttgaacagtgaacttgacctccaccataggcaggattacttgaccaaagaggagcccaaagcggaacttcttaagtgtttcggtaaagaagattcacctttgcagaggaagtttaaaagaatgcaagcttcacttgaaaaggcacggaacctaaatacaaggtaccaaatagatcaggcatcacactgttttgctgagaaagaaatggatgaagttcgtaaacaggttgaggttgaaacagctaaggtgattcaatgcttagaagaagatctgatatcagtccaacagcaactaaatgcaagcaacaaaaatgacttgttagccaaacaaagcataaatgaacttcaactagaaatcaagcagttgaatgataagttacttgaggtgttgaaagagaacgaaatattttcttctgtgaccaaggaaaaagaaaaggaaattgaactattgtccaatgactggaacagattagctgccgacattggaaaatgtcttgtggatggaaatgcagctttaggtgaagcttctgatcaggttgcctttatttccaaatctttatctcaaagaaaatggatcgagaaacaagttcgaaagctgtgtagtggtatatctgaaagagatgagctactcgaagagcttcagaacaggttgaaagaggcagatgatataagacgtgacttagacttgaaattaaggtccttaagaggagcaatgcaggttgtaaatgaagagcatcagcaggaaaaatgtgatcaagaaaaagaaatatattttctaagatcacaaatatctgaacaaggacatgtaaacaatcaccaactagaagaaattcacagaataaacctattgttggatgaatcaattgagacttttgtacagaaggaggttctgcaacagacctgtgtttctttacaaaaggcaatgggagaagagattcatcgtctggagtcacaattagaccagtcaaagatacattttgctcatttattgaatcagactcaggaaaaggaacagcttattgggaagcttaaaaatgaagagttaaatgttttgttaagactgatgtcagaagttctaaagacaaacagtactgtacgtgagcttcgaattggattcaatacattgcagtcaagcctttatatgagccctgaagtgatcgcctgtcaaaattcagatttgaacttagaggatcgggtaagctaatgctcttgttatttggtatcaaggtgaacaatacaatccactgttatatgtcagtcgaccttagggccaatgaagcgttccaatctgtggagcggcaaaatgctgaggttctttgccaacatagcaaagaaatggagcttgcagttcaaggaatgcagataatgcagtctcaaatgactaaacttcttcaagaaaaagaaaatgcgaaggagtttaatttggagagtcaaagaacaattaaagatctaagtgatgaggtccttagattgaattcacatataattgaaaaagaaagatcctatgaagctaaattggaagagctgaatacaaaaatccacgaacacgatgcatcatttatttcatggaatgaagagaacgaggcacttcgaattgaggtttcggaggcaaaacttgttgtggcccagaaatcttttgagtctgcaactcttacagccaaatttgaagaagcgcaggcaactataagagatgcagactctacggtcaaggcattggtcgaagcaaacgaaaaggcaaaattcgaagcagataagtatgaagagaaggaggctttgtttagtgctgaaacagaaagcatgctaagtgaaattagtagtctgaaaatgctgctggatatgaaggaacaaagttacaagcttatggaaaagcaattccagtcaggcttgcttgaagcaaatgagctagctcttgagctggaagatggcattagacttacgcagaatttattacagcagaagcttgagtttgtttcttctgatgttgagtggatgaaggaaagggtccagcagtttgcagggttgactagaaaatggttagaggagaattggctggagataattggcaaagattgtgctatctctgtgttgcacctctgtcacatggagattcttttggagagaatcactgggttgaatgcagaaaatggtttcccttcagcacgggctgtgtgaatctaattctttgatatctaaactgcgagagcacaatgaaaaagccaagaatgaactggagaatgtgcagtgttctcaaagggaaattattaa

SEQ ID NO: 33285 - DNA, 1245 bp, Zea Mays
tagacttgataagatcatagattatctgtcaagctgcaacaaagcattacgaatgctacattctggtgtttgaaataggaaaagaaaatcttaaaatcacaacaaagttctaaagcttatccaagatctgattagattaaaatgtaaagggaactattttatactctgaaaaataactgatgaggcgtgattgttggcaccaagatgacttacattctcattgtcacaagcaatcatgtcactgaatgtggtgtaaaaggttgatgtattgattgggggaaaatgtgatcattgatctgaaacattggtttttttacttgttacagtagttcgcctattgctcattgcagatcttcaaggacaagggtccgttgtggtgtttagaggcggaggcggtgcccggccagcatacactctggtttcacagaatgaggcacactttgctggtgactggttcgaaatttgatttctactggccaggatgtacccaatgaactcatggatctggctatgaagggttctttaaatgatgttggaagtgtagatgtcttctcttggataagctgtttggatcttcgcagtctcgctgtgctgacaaattccaccctgtccagctcaagtgatccacataatatatctttccattacttaatacctgaaggaggcaacgataagttgtcctacttcaagctaaaagtcttgctacctgattcagatctcactgttactagtcaaaagcaaatcaaggacaagctaaatgttgccactccagaaggaaattttctttggttattccacacagaattgtcaccctttcttatcgcaaaatctcagttgtcgaaaaagagattttttatatcgctgcagattccatcataaagggcaaagtcgaagatcttggtcgcatggaactaggcggttacgccattggcgctattgaagattgcagcaagcgtctcagcgattatatcagtatggatgttcttagtgccatacaaagagcgggagctgcattcagttgggtgcctaaagaaccttataacgaggatgcatgcctacttgattttgacgtgctattgatggagcctcgcaagctggagaaaaccctgattacttccatcatgtggtgggctactggatgtttgcagcaatgtaggtactagctcataagtttaagttatttttcgattaaaagaaccacattcttttttctgaaactattgtgttgcaggatgcaagatcccc

SEQ ID NO: 33286 - DNA, 1050 bp, Zea Mays
ataaatataaatggagttctttgtgtcaaatgaacgctagctgaaccctagccggcggatctccgcgggcggcagtcaggagtggaggcgtggtcgcacgggcgaggtcgcaataggagaggctcagagagatggggcggccttacgcggtgaaggggcggaagaagaagcgcaagctcgaggaggcggcggcggcctcggacgctgccccgcccgtcgaagaagcggaggagctgccaccgccagagactatgcaaattttgaactctgatgatcatgcgaattatttgaggaagcagaatcgcaatcctgcagattataggcctgatatcattcatcaggctctactagcaatatttgatagccctctaactaaggctggaaggttacaggctgtttatgtgagaactgaaaagggcgtattgtttgaaatcaaacctcatgtccgcatgccaagaacctttaaacgtttctgtggtttaatgtcacaattgttgcaaaaactgagcattacggcagttggaaagcgtgagaagcttctcaacgttgttaaaaatcctgtcactcgttatctacctgttggtgcacgtaagattggcctttcatttagtgctgagaagtcagtcaacttgtttgactatgttgccaaatccaatgacgacgaacctcttgtgtttgtggttggtgccatggcccatggaaagatcgacaaggaatatacagatgattacatacaaatttgcaactaccctctcagtgctgcctgctgtttaaatcggatatgcagtgccctggagcagaagtggaacatccaatgaggaacttttgacaagcatgggaatcttgttttattatatacatcttacatgtacttccctctgcttatgtacaatgtttgaaagttaaaaccaaatgtttcagtgtggcattatgacgtgttttagacatcaattcatggctttaaactggtttgttcagagtcattttagcaaaaactgagtgttctgcatgccaaacttcggttaactcaaacattggtgtcagatctta

SEQ ID NO: 33287 - DNA, 3043 bp, Zea Mays
aaaatcctaaaaattccaccaccaccgaaccgagcactttcgctacgcaaacacgcgcgtggaaaacaaaacggcacacaaattatttattttttttcctttttcgatcccagacacaacacaagactgaaaaagtcagcgaggaaggaaaaaaaaatctgcgaggcagcgcagccggacgaggaggaggaggtcaggactcaggaggagaggcgtcgcggactcgcggtggcagtgccgcgcacggcaacccaacccagctcagctccggcgaggacgcaaccgttgacgtcgctcttggcctcgcctcgttatttgaggtcgcgcggccgcgagccggggtccagatcgagtctcgcgcgaggtgtttcggcaccgcgaaatgccgcctccggctgcgatgctgctccttacggcggcctcggggcctcccacgctgtcgctgaccctggccgcgaggcgggcgccgctccgggccccaagccggcggaggctgcgggcgctgcggccggcgaggatccgcgccgccgcggcgatcggtggcgagttcggcggcctcggccggcgccgcgtcgtcgtgggagagttcatcgagcgcctgcgcaacgttctgcccgggggcagttggtggcgcctcgaggacggcgatgaggccggggacggggccggccgcgcagaggggagcggtaccaccgccgtgtccgcgctcaggcggatgtgggccctcgttgccggcgacagattggtcatctatgtcggcttcgcgtccctcgtcggcgctgcgctttcggagatcgccataccacatctccttgcagcgtccattttctctgcgcagaatggaggcgcggtgttctaccgaaatgccaagcttctggttgtcctatgtctggtttccggggtgtttagtggcatacgaagttgctgttttggtgttgcaaacatgatattggttaaacggatgagagaggagttatttgattccattctttcacaggatatttccttttttgatgaagaaacagtaggagatctgacaagtagacttggttcggactgccaacaagtgtctcgtgttataggcaatgaccttaacctgatttcacgcaatttacttcagggtgcaggtgcattaatttatctgctagtcttatcttggcctctcggattgtgtacaatgtttgtttgtgcaactctatcagcaattatgctagttcatggacggtttcagaaaagggcagctaaatttgcacaggagttcaccgcaaacgccaataatgttgctcaagaggtgataactttggttaggacagtgcgagtatatggaacagaaaagcaggagtttaaaagacagtggcttatggaggctggagcctgagcttgaactatctataccattctactcaggtcattggagtggtgattggaggcctagcaatcatgtctgggaagttaactgctgagcagttgacaaaattcacactctatgctgaatggctaattttgtccacatggtggattggggacaactggtcctccctgatgcagtctgtcggagcaagtgaaaaagtttttcgtttaatggatctccttcctagcaagcagcttagctctgaaggcctcaagttagagaagttgaaagggcaaattcagtatgctgatgtatcattttcatatccatcaagacctacggtaccaattttgggaggcttgaatttaacactgaatccaaacgaagtagttgcaattgttggtcttagtggaagtggcaagagcactataatcaatttactacttagattatacgaacctacaaatgggcaaatactaattgatggtgtcccgctcactgagcttgatatcagatggttcagggaaagaattggtttcgtcggacaggaaccacgcttattccgaatggatatcagctctaatattaaatatggttgcccaagagatgtcagtcatgaagaagtgatatgggctgcaaagcaggcctatgctcatgacttcataatggctttgcctgatggttataacaccatcgttgatgatgctcttctcagtggaggtcagaaacaacgtgttgctattgccagggcccttctgagggacccatctatcttactgcttgatgaagccactagtgcgcttgatgctgagagtgaacattatgtcaagagcgtcatcacaaaagttagtcgagattcaaaggctaaaagaactgtggtaatcatagcacacaggctatctacaattcaaacagctgatagaattattgtgatggaaaatggtaatattgtggaggatggtaaacacattgatcttattgagaagggtggtctatattcaagattagccaggcgacaaaatgacgatctcaagtagccctggatcacagaatgtggtttagtgcacgccttctttttaaatggaatggcagaagggagagtcgtctgtcattagtgtattctttgcaagaactgacctggacccaggagctcgaataagctggcattgtttttcccatgaaccagaaacggtttgtgactgatcaaaataaaccaaaacggtttcccccacgaggacgagcacattaagcatcgagagcggcagtatggagaacagacttctaagaggtccagtattgtaaaagtagcttccataacaaagtgtatatgcgtttttatcttgttatcgggaactctgaaacttatcttacactacacacggaggaaacgctccaattttgttacgagcactgtgtgccttatttcctgaattttcgtgtaaaaatgtactccctgcgtcccaaaacagttgacgttataatatttatagttaaacttgtaacttaaattattagcaacataaattattataaaaatatatttaaagatctattgaaatattttttttggttgttttaggatcgggggactatgccattcacgtagaatcgtgtttgtattttacgaagaaattggtctccttgttacgatgcactatgctttgccctggcagccccttcatccatgataac

SEQ ID NO: 33288 - DNA, 380 bp, Zea Mays
attaccatccacgaagccgagaagtgagagagggagagctgccgcatccgctctccgttggtgtagcagagtgaagcgcgaggataggccacagaccgttgcagtgttctcaggggtgaaatcaacgccgccccagtgcggattggcgctcgagacgagcgagaattcctcaccagagatttgcggccgccgtggcccgagatccaccatggacgaagcccggcacgacggaatccacgacgagcaagtgaccgaggagcccgaaacataacaggtggaaaatactgagcagcagctcgttgaaggcaagttgtgtccttgatctctcttctttacccaataatgttactattaatcactgtggcatgcttagattaatc

SEQ ID NO: 33289 - DNA, 3006 bp, Zea Mays
ctagcaggagtcaggagctgcacctgcacaaagataaacacaggcagcacaaaaccaggctactcgcatataaagcaggagcaggcgagcagcagttgctcagacaggcccactaccattcagcgagagcgagagagaccacccatcgtctcatcgtcttcgccttcgcttaatcggatttattagggatcatcatcagggatgagagccgggggctgcacggtgcagcaggcgctgtcgccggaggccgcggtggtggtgaagcaggccgtgagcctggcgcggcgccgcgggaacgcgcaggtgacgccgctgcacgtggccagcgccatgctgcagcagcaggcgccgacggggctgctgcgcgccgcgtgcctgcagtcgcactcgcacccgctgcagtgcaaggccctggagctctgcttcaacgtcgcgctcaaccgcctgccggcctcggcctcgccgctcctcggcggccacggccacgtctactacccgccgtcgctctccaacgcgctcgtcgccgcattcaagcgcgcgcaggcgcaccagcgccggggctccgtcgacacgcagcagcagcagcagccgcccgtgctcgccgtcaagatcgagctggagcagctcgtcatctccatcctcgatgaccccagcatcagccgcgtcatgcgcgaggccggcttctccagcacccatgtcaaggccaacgtcgagcaggcagtctcttccatcgaggcaaacaactcggcctccgccgccgcaaccaaaaaccctaaccctagcgcatctccacccgaagagaccaagcctgcaggcaagctgctgctacccctcgatcaagcgcgcgacgaggacgtcgccgtcgtcctggactgcctggcgtcccgaagcaagaagcgcgtcatggtcgtcgccgagtgcgcggcctcggccgaggcgccggtgctggcggcggtcgagaggatcaagcgcggcgaggccctgcgcggcgcgcaggtggtcagcgtcagcgtgtccaggttccgcgacctgccgagggacgaggcggagagggtgctcgtggagctccggtgcgcggtgaaggcgggcggcagggcgggcggcgtggtgctggtcgtggaggacctcgggtgggcggccgagttctgggccgggcgcggagagtccgggagggccaggtggccgtctgcctgctgctactactgcgccgtcgagcacgccgtcgccgaggtgcgcgccctggcgtgccgcggcggcgacggcgtctggctcgttggatacgggtcgtaccagagctacatgaggtgcagggccgggcagccctcgctggagactctctggggcctccagacgctcgccgtccccgctggcagcctcgccttcagcctcaacttcgtcggcgacagtgcaactgcaatgacaatcaatcaccagtcgatcagctgcaagatggcaaagtgcgacgacgacagaagtgggaacgggtcggcggcgccacgttgcctgtcgcttttggacgccggcggttccggccgcttgacggccgtttcgagcttctgcgccgccgactgctccgcaaccaagtgcgacgcgacggtgaagtcgagtatccccccttggcttcagcattgccgggatcatcaggagccttcccgttgtaagaaaagctcgacatgcggcggctcgccgtctcatcatcaccggacggccctaaacttctccacggtggtgtcgccgtcctcctcggtctcgtcgtacgagcagcactaccacctgcggcaccagtcgtaccagccatggcttctcgtggctgacggcgcccgcgaggccgagcacccgtgtaacaaggccaggtgctctgccgccgtccagctacacgtcgtggacgacgaggacgggaagcctctaagcgcgataaaggtcaagtcccacgactcgagcgcgtccaatggctccgtggagtgccgctcgcggttcaaggagctgagcgccgagaaccttaaggtcctctgctccgcgctcgagaaagaggtgccgtggcaggcggagatcgtgcctgagatcgcgagcacggtcctgcagtgccgttccggcatggcgaggaggcgcgaagccgctgtttcgagctcgagaccgtcgtcaacacaggcgtgtgccaaggaggacacgtggatgctcttccacggtggcgacgccgagggcaaggcgagggtggccagggagctggcccgcctcgtcttcggctcgcgcaagagcttcgtatccatcggcggcagccgcaccaccgcgtcgtctccggcttgttggtccgacggctcttccgagcagcagcgcaagcggcctcggttgacggaggcgagcaaccacggctgtcgtcacgagagcctctacgaggccgtacgcgacaacccgcaccgcgtcatcctggtacaggacgtcgagcagggtggctgctggcggtgccagagggacattttggaggccatccaaagcggcttggtccggagccgtgccggcgacgacgacgcagcactcggcgacgccatcgtcgttctgagctgccagagccttgacgcgtggtcgacaaccacctcgccactaacgaccaagaaggcgaaggcggagagcaaggaggagccggaagaggaagagagcgcaggtgaccaccgccgcaaagaagccataactgctgccgctgcgtcgccgtcatcttcactttgctttgatctgaacatggacgttgagaaccacgacacggagagttgcttcacagatgctagtctgctcaaggcagtggatcgaacgttcttcttcagacgacctgatgagagtagcgattagcttagtgacaaatgacctatctctcttttgttcttctctgtaacattggtcagtttcttgtagtttgttcctaagatgtttgtgttggaagaatggagcgtgcatgtggtactcttctggattgaacctgcgtggaaattaattaaaggcaagtttggatgagct

SEQ ID NO: 33290 - DNA, 3624 bp, Zea Mays
gccaaatccaatcgctaaccaccgccggcgtcctcgtctacgtctactacctgctctgctctctctcccccacaggccccgcagcatccacacgaggacttcagaatcagcagcagccagcaggcagcagctcagcgagacagacgcgtccggggctcccctccgcgcgcccgccgatcaaggatcaacaacacacggggacgcctcccgtctccttcattcccagcctgcactgcgccgccccagacgcccgcgaccctctccacctcctccggcgaataccgttcctccccggcaagctaccctccgatcctttgttccgggtgagtctacgcgcagcgcttcctcccgcggccggatccccatcggcgcgacgcgattcgtggatccggcggccggggtcttcgccgtccacagcagtctgcgaggtagtaccgtcgacgaggcctccctcccctccggcgagccccccttccgaagtcgtgagtcctcccagggtttatgcatgacagcccctgtgtctcttccaaatgagctagaagcggtctcccattctgcaagggttgagttattccgagacgctagttgcaacatagaaaatgaggtgttggccagtttgggaaatggccaagattcaactgctgttggagcaactcctggtttcagagttggagagatcaggtttgctaatggagatatttattctggcacattgttggggaacacaccagagggttcaggccagtatcgctggtcagatggttgcacctatgatggtgagtggaataaagggatgaggcatgggcaaggaaagacggaatggccatctggagccacctatgagggtgagtattctggtggctatgtatatggtgaaggtacctataagggtccagataaaatcatttacaagggacgatggaagttgaatcacaagcatggacttggacatcagacatatccaaatggagacatgtttgaaggttcgtggattcagggagaaatagtaggtcatgggaagtacacgtgggcaaacggggacacttacgttggcaacatgaaaagtggcaagatgtcagggaaaggaactcttacatggaaaaatggggactcgtatgagggtaactggatagatggcatgatgcatgggtatggaatctatacatggaatgaatgtgggtattatattggaacatggacaaggggactgaaggatgggaaaggtaaattctttccgaaaggttgtagagtacctgttaacgacgagatgtatatcaataatctaagaaatcgtggtgtactgcctgatattagaaggcagaatcatggttcacgcatacttcactcttcctcggttgacatggggaacatgaaggttggtatggctaggcaatcttcagatgttttgttcaaaaggaattcagctgagcaatcttctttgaagaatgtgtctttggaaagacggtggagtcttgaggtggctattgaaaaatttattggccatgaatccagcgaaagttctggtctagaaagcttggaaaacttgagtgattctcgtttgcccatactggaaagagaatacatgcaaggtgttctaatcagtgaggtggttcttgacaggagtttttcagactcctcaaagaagacaaaacgccgccagaagaaaacggtgagggacacaaaaaagcctggagagacaataattaagggacacagaagctatgatttaatgctcagcctgcagcttggaatcaggtacacagttggaaagatcacaccaattcaaaaacgtgaagttcgtgcttcagattttggaccaagagcaagtttctggatgaacttcccaaaagaaggatctcggcttactccttcacattcagcggaagattttaaatggaaagactactgtcccatggttttcaggaatttgagagagatgttcaagattgatgctgcagactatatgatctccatatgtggaaattctgctcttaggcaactatcttcccctggaaagagtggaagtgtctttttcctgtcacaagatgatagattcatgattaagactctccgaaaatctgaagtgcaggttcttttacgaatgcttccaaactattatgatcatgtccgtacctatgagaacaccctcataactaagttttttggcctccacagggtgaaaccttctagtggtcaaaagtttcggtttgttgtaatgggaaacatgttttgcactgaattgagaatccaccggaggtttgatttgaaaggatcatctttaggccgttctactgataaaattgaaattgacgagaacacaactctgaaggatttggatcttaactattccttttatcttgaaccttcctggcgtgaggctcttcttaaacagattgaaacagacagtgattttttgagaacacagcggataatggattacagcctactgcttggtgtccattatagagctccacagcacttgcggacacgtgcatcttatcaccggagcatggcagcagatagattgactgttgtttcagaagaagatgctcaggaagatgatgcccttagccatccagaaggactagtcttggttcaaagcagtggtgagaacagtgttattgttggccctcacataagaggcagccgcttgcgtgcatcggctgctggatttggcgaagtagacctactgctgcctggaacagccaggcttcagatccagctaggagttaacatgcctgcaagggcagagcagacccctaaggaagatgaaagcaaaccgttccgtgaggtgtacgatgtggtcctctacctgggcatcattgacatactgcaagagtacaacatgacaaagaaaatcgagcacgctgtcaagtccatgcagtatgactcggtctcgatctcggctgtggacccccagttctactcggagcgtttcttgaacttcatccagaccgtcttccctgagaattcgtagctccatccaccaatacttttcttggaagatgcccgcccactaccacttgctgagaacttcatccagacgacagtccatgtcttcgaatttggagcttgcgagcatcataagaacattgcactctcttcagtgcgtgcctgttccttcctggatgaactggcaggaagagtggccaacaaaatgagattcgttagtgaaattgtgcagaagcaaatcgatcttctctaggctattttgccccgatccctggggtcaccggatcagccgtctggcttcctggagtaggcttggcgtattgggactcgagcaggaagtagatgtgagttgcgaggattctagtgacagcggcgccatagagctctgggattcactgttatgtctcggcagttgcagaaagctgaagcgcctgttgcctctggctcgtgtttcatctgttaaggtgctatggaggatatgtttaataagtccctgaaaacacgcatcaagctccgatacatttttttgtaggacaaacaaaagagtactatgtattttatcgcaaaaacgaaaagaaatggaagcaacagatgaaaatcgcgcgtggtgacggaggaattacgagtgcggcctagttagcatatgtttcctcgtttccatggtgtgagtat

SEQ ID NO: 33291 - DNA, 2467 bp, Zea Mays
atatatatatggctggagcttaaaagtccaatctgtgttcttttctacctctttcggtctccgctgagacttgaaacagcctttcatggatgtactgaagagaaaaagaaccttttgtaccataagatagtagaacagaattggtgtctcagatttcttcaaagttctgagtctccaaattggcaaaaagttgaagttaatgggggccatgtgcatgtgtccgggtccggcatctggaaatggaatggtactccaatatatattcggctcgcccctcaccaaccggtggaggacgacgaccggtcccattccccccgccccaacttgtcaggactcaagaggctcccctcctccctcgccgcggaacacgcgcgccgtcgtcgccagcccgggttcatttctccgttccttggtaagcaagtctaggcctaatgttcgttttattcgctgggattgggatctcttccccatcgcgagccctcgaatccagcctcatcttcgtctccgatctgccccccgctcagccgcggattctttcgctgcgtggtgggacggagccgagtagtgcggtggtagccgagcgctccggccatggcgttctatcggggcctcaccgcagtctcgagactgcgatcacgcatggcgcaggaggccaccacgctggggggtgtgaggtggctgcagatgcagagcgcgtccgatctcgatcttaagtcccagttgcaggaattgattccggaacaacaggatcgcttaaagaagctcaagtcagagcatggaaagacccagcttggaaacataactgtggatatggtccttggtggaatgagagggatgactggaatgctttgggaaacatccctacttgatccagaggagggtattcgttttaggggcctctcaattccagaatgccaaaaagtgctgccaacagcagttaagggcggtgaacctttgcctgagggtctcctttggcttcttttgacggggaaggtcccaaccaaagagcaagttgatgcactatcaaaggaattgcttgcgcgctcaactgttccagctcatgtctataagacaatagatgctctcccagtagatgcacatcctatgacacagtttaccacaggagtaatggctcttcaggttgagagtgaatttcaaaaggcttatgacaatggattgccaaagtcaaagttttgggagcctacttatgaagactgcttaaatttgattgctcggcttccaccagtggcttcttatgtttaccggagaattttcaagagtgggaaatcaatagaagccgataattctttggactatgcggcaaatttctcacacatgcttggttttgacgacccaaaaatgctggagctgatgcggctctatgtaacaattcacactgatcatgaaggcgggaatgtcagtgctcatactggtcatctggttgggagtgctctgtcagatccttatctttctttcgcagcggctctaaatgggctagctgggccactgcatggccttgcaaatcaggaagtgcttttatggatcaaatctgtaattgaggaaactgggagtggtgttaccacagatcaactcaaagactatgtctggaagacactaaagagtggaaaggttgttcctgggtttggtcatggagttctgcgtaagaccgacccacggtattcatgtcaaagggagtttgccctgaagcatttgcccaaggatccacttttccaattggtgtccaagttgtatgaagttgtacctcctatcctcactgagctgggcaaggtcaagaacccatggccaaatgttgatgctcacagtggagttttgctgaaccactttggactatctgaagcacggtattacactgtcttgttcggtgtttcaagaagcatggggataggatctcagctcatctgggaccgtgcccttggcctgccacttgagaggccgaagagtgttaccatggagtggctggagaactactgcaagaacaaggctgcttgaagcttttcacaaatgctgctttttcccaaccttggctgttaataatttaaacgcgagttatagaaatagtcattttccctttggccgttgaataacgcaagagcaatatgctcaggcggaagaattttgtatcttccgtaacttggtgaacatccagatacttgatctgcggcaacaatgggcagaagagattaggacatgctgattgatctttatacgccaacacttgtttttctttaacattacttgttcgctgcagctttaagccagctgtttgtaactgcaatttatagcaatttatagagatttgggctatgacatgtatcatcatgtatgccagttatctcgtgttgcggcatttatgttttagttgatcagcgacatggctgaattgctgataatcgttgtacctgatccctgtccctggtgattttaaaccgtttttacggctacttat

SEQ ID NO: 33292 - DNA, 1329 bp, Zea Mays
aaccccttttctcctatccctgcactccccccccccccccccctgctgccccgcgccgaagcaggtgtggcggcgctgcgagcctgcaaccatctccgcagactccgctgcgactcatctgggctacgacccacgtcaaggctgctagttgcgttcgttggagttgcggcttccgcgaatcccccaatccatcccagtcatggcgttctggggggtggaagtgaagcccgggaagccctacacccacatccatcacgctgaccatggccgcctccgcatttgccaggctacactgggcaactgtgatgctgctgcaaggacggtgctgcaatgcaatgttggcaacaagattcccatcaaactttgtagtctaaatccgaaattggccgagacatgccatctagaggttgagtttgaggaggttgatgatgttatcttctcagtaattggtcatagttcgatacatctctctggatactatgtctgtgcaagcaacaggtctaatgtgggggatgatgaatcagaatcttatggggaagatattgggcactccagcaccgatgaggagcatgataccagtgaggacagctatgaatctgacttcattgatgatcgtgaagttccattatctgagaagtatgggtctggttctatagatgacagtgatgatgagtgcacccaacgatgccacagacaaaaagctgaaaaaacgactcaaaatgctgaaagacggcggcgcttgaagaagcaccaagtaggtagcactgattacgatgatgatgatactccagtcatgaaacatgttgcgaagcgctgtgctcctaaaatatctgatagtggtgatgatgacactcctgtcacaaaacctgttgtcaaacgtagagcttcaatatttgatagtgacagtgatgaagatgataatgtacctatttctcttgcattgggtaagaaagacaatgctaaggttgctgaggaaactgaacatcaaaatggacaggcaaatggcatcaccaaaaaaaggattattgatgtcaagaaaagaaaacagtcttccatcagcgaggatcctgcatcgtcaatggatatgacagatgctaatgcaccatctgtttcaaaacaagttgatgaaataaaaaagaaatcaaagaaaaagatgagaaatcaatcaggggaaaataatgagaagcagtccaatataagaacattggatgacgggttggtggttgaatatttgtcaatgggaaacaatgatgcaaaagtggcttctgatggctgcaagatttctactgataatgtattgttatcagttatttgatcatgtgtggcttt

SEQ ID NO: 33293 - DNA, 1936 bp, Zea Mays
atggccgaacacacaagctcgatttcagggcagattcgttgtatatgcacgtacgcgtgtgcgattccaggatggacgtttgtccattgggcccgcaatttcggcggcgacagaaatggacgggataaagattccgtcacgtccccgtcgtccggcaccacccagagcttgtccctctcgcgtgttgcttcctcggttcctccccagctcaaacttccaagaacccgtgaagtgaagtgaggaggtcggcggaaccggaacccaggcgatacgagatgatcgcaaacggcctccgcaaatccagtgctgcctcctcccaggttagcaagctggtgaaatacattgctagtgctggaagcttgcaaggggggcacagtttatcagagccgtctgccagacattacagctctgaaccttcacttcaggcgacagaagaaaatgggtttaaggggcacagcatgctggctccattcacagcgggatggcagagcactgatgtacacccattggttatagagagatcagagggttcttatgtctatgacagcaatgggaagaagtatattgatgctcttgcaggactgtggtgcacagctttaggtggtaatgagcctcgactagtcaaagcggcaactgagcaattaaacaaattaccgttctaccattccttttggaaccgtacaaccaaaccctcattggatctcgcaaatgatattctcagcatgttcaccgcaagggagatgggaaaggtgttcttcacaaatagtggttcagaagcaaatgactcccaggttaaactagtgtggtattataataatgcactgggaaggccagacaagaagaaatttattgctcgctcaaaatcgtaccatggatcaaccttgattgcagctagtctatcaggtctgccagcgcttcatcagaagtttgatctaccagcaccttttgtcctgcacacagactgccctcactactggcgattccgtcttcctgatgagacagaagaagagttttcaactagacttgccaataatttggagaatcttgtcctcaaagaaggacctgaaacaattgctgctttcattgctgaacctgtgatgggcgctggtggtgttatccttcctccaaagacctattttgagaaggtgatctacaacaattcaggcagttctgaagaagtatgacatcttgttaattgcggatgaggttcttttgctcatggctttacatactcgggacatcctgtttcttgtgccgttgctgtagaaaccttgaagatatataaggaaaggaatattgtagaacacgtcaacaaaattgctccaaggttccaggagggaatcaaggccttctcaggcagcccaattgttggggagatacgcggtctgggactgatacttggaactgaatttgtcgacaacaaatctccaaatgatccatttccagctgaatggggtgttggttcgatatttggcgcggagtgcgagaagcgtgggatgctcatcagggtggctggggacagcatcatgctgtcacccccgctgatcatgactcccaatgaagtcgaagaaatcataagcaaattcggcgatgctctgaaggctacagaggaacggattgtagaactgaaatccaggaagaattagccgatgctgctggttgtaacgacagtgaggatggtgatggcagtgtccaatatacagtgtattttcaaactttatttcagtaaagtgctgggctggaatcttgtagtcggttgcatagcgacagttgttccttgttatggagcaataagtaatgcatctgcttaatcagagtagcatacccttgggtttgtgctggtacaggtttttcaaatgaacatagcttggtataatgtagggccatagtacccccccacccccccccccccccccccacacacacacacaaaacg

SEQ ID NO: 33294 - DNA, 311 bp, Zea Mays
tacatttattacaagtcctgatatacttaaagtgcataacttattacaatagcaggaaggtaggaaccctccaaagcttatacacaagcctaactaatcttccaccagaactggaaacgccctccagccacaggaacacttagagtactcctcatcacctacaacaacatgggttcgaaaaccctgagtacgaagtgtactttcgcaagtcttacccgactaaggaaaaatgactctcaaggatatgctggttaagtaggaatcaaggaaaaggctttagcaagaatcaacttagatacttttgcagaaat

SEQ ID NO: 33295 - DNA, 3089 bp, Zea Mays
tctctctctctctctctctctccacctcctctcccgacttcccgagtcccgctacgcagccgtcgcctcctactccctttgcgactcctcgcccacatccagcacttgcacatcagcaacctcaaccgcaagggaggtggcgaggctgagcgccagccgccatgtctgtccccggcgtcgcctccccgatcgccgaccgcttctactgccccccaccgcaccgccacctccttgacaagcaacacagacagcatccgccactaactgcctcggcggccgaggagccggcgaagccgacgccggagctcgggcgagacccttccccgtcgccttcgccggctaccaacctcgagagtttcatcgcctccaccgccgtccgcgttcccacgccggggtgccgggcaggagcgccgtactacgagctcgcggatctgtgggaggcgttcggggagtggagcgcgtacggcgccggcgtgccgctgctgctcaatggcacggatggcgtcgtgcagtactacgtgccattcctgtccgctatccagctctatgggtcgcggctgccgtcgaagagcaagaccaagaggttgtgattgaactgaccagatgaacgattcatcgtctgaactgttctgactgtgttcactaatggtgactattcttgaaaaccagagcatatcagcatgcctgtacttgcttgaaaaaaacatcaatcatagtaccattctcctggcatttcactgattatatagatctgtttccagatcaagttatataataccatggtcgaggtgtctctgaccagctcctgagagctataattccagctaacaatgaatctggtaaaaccccaaaccaatgcaaggaactggccgtgaaatttgctcttaaacatcaaagaattgtgctccaccctgcaactacatcacgtttccataaaaagcattaagttaatccagactattatggagcatggtgagcaatataaatttgcctatggtgaattcatttcttatgcttctttcagatttctcaaaaaaaaacggccataatttcacttgcattattgattaaaaaataggctgtcagaattgttagaacaaaaataatgaaggtgttactgcactgcttgctattttaagtctctgaaccatcaggtttcaacttggctgatattttttttgttggcttctctcgaagctgaaagtttatcttgaaggagttggacttccctgaaatgttttagaccttataaaccacagttcctttagaacacactgattaatttttcaggaataaaagcctctgatttatatttatttaagtttattttggtgagagctgtcttaccgagtcatcaggtcacaggttcgaagcagcctctacgcattcgtggagggaaggtttgccttggtttatcctttaccaaatcccattcatgtgggagcctccggcacttggtgttcccttatgtttcttatttgaggagtttttttagataatggaggtaatctctggtttcagcaacaactagggatgaagtgctacttaaaaatgtgggcactaggatttgaaccttggtaggtggtgtcatgcatccacaatctgaactgacacaaactggtttgttcagataaaagaagttattttgtggtgaaacaataaatgaataaatcagaatgcatgactgtttcagctttctatgaattggactagcagagatgtcttagaaataatgttcattttttcagtaatgcatgaatacatcaattgttactattattgtgtacttttctggtcaactttctcttggacattccttcaaaaaaacattcccttagataattatgatcttttggaactgttttttgttttcagctgcagataccttaatgaaggcagtgatggtgacaatgctccagaaacaagcagtgatgtaagcaatgagagtgacaatgacaatgacaatgaaaggtctattggaagaacaacccaatgtttagtagaaaatatttgcaccgatcaagaaaggttgtccagtgatgactgtgattccagtaaccaggaacctccccctgttttccaatatatggagcatgatgcaccatatggaagacaaccattagcagatatgatttcagtatttgcatgtaagtttcctgatctaaatacatacaagagctgtgatcttctcccgtccagttggatctctgtagcctggtatcccatataccggataccaacaggacctacgctacaagatctagatgcttgctttttaacattccattcattgtcaacaacacctgatggtacgataagcggttgtcctgagacaaataacttacataacagtaaagttgcttctgttcctgggaagatcacactgcctctgatcggcctagcatcttacaaattaaatggttccttgtggacgtcaaatcagcaccatgagcagcagttgactacgtcgcttctgaaagctgctgatgactggctttgccagcggcaagtagatcacccagattaccgcttcttcctcacacactaaattggatgtccatccaaactacctacctactgaacatcacagctcgatgcccactattttattcaatgaacttacattatcactttatatagtccacaatcacaagtaccagtatgctctgtaatatcatttttggggcttagtttatgttagtcccatattggtatctaggcaggattagttggtgactgttttggggttgtactgtaggaaccaattagacatagatcacctatattacgttcagtaccaattgcgggtgtgggtgatctgcaatcgggctaagtaggagattgattggcaatatacatttggcgtacttcaaaggcggttctaggatatattgatgatggcgataaaaatatttttctacttccctctgtgtgtttgatatattgtaacccatgtagtgctgctgctggattgttattatatgtattaccccgagaacgtatcatgtgttaccacaggttaggctgtgtgacatcatgtgatgaaattttggtttgaaatgaaattggcactaaggtggttggacttt

SEQ ID NO: 33296 - DNA, 2293 bp, Zea Mays
tcaccgtcgcggataattaataaataaaaccccaaaaagaaatatccaaggccgcgccgtgcgcgcaatccccctcgctcgcaccatggcgctgcagctccagctgccgcggccgctcgccgccgcacggccctctatcctcctcccttccccagcccatggtgcctccgcttccgcgaccccccttcacgcccgcgcaggcggcgttgcgttttcgctccagaccaacgtgcgcctcctcaagcccaaccgccgcgtccgccgctctcgggacccctactacgatctcgacgaggacgacgaggaggaggcggagttcgacgaggacgatgaagacgacgaggagggctacgagagcgatgatgacttgtcgggtttggaatatcctggtgtactttattcaaacagccctcgtgcttcaagcaagaaaccaggtatcttaagtgttatgctaaatctatttagaaacagtggtcacttcgtgcttaaactctaatactccaggactccaaactccagtggtaaaagaaaactgggaaggaagacaaaccaaaacccatgacaaatacggtagtccaggaagaagtaagtccatgcatcctaggagtaaagtgggacgatcatcaacagatcttaagaacatggacagagaagttgagttgaaaaatgcaagtatctctcgaagtctgttccagaaactacaagaagaatatgacttcgatgacaaatggttaccactgattgattacttgtgcacctttggactaaaagagtctcattttacttacatctatgagagacacatggcctgctttcaaatcagtcaggcttcagcagaagaaaggttggatttcctgctaaatgctggggttaaaagcaaagatatgaaaaggatactggtgaggcagccacagattctggaatacacccttggcaatctgaaatctcatgttgattttctcgtgagcattggagttccaaatagacgaatagggcaaattatttctgctgctccttcgatgttctcttacagtgtggagcagtctctgaagccaacagtaaggtatctgattgaggaagtaggtattgaggagagtgatgtggggaaagtagtgcagctaagcccacagattctggtgcagaaaattgatagtgcatggaaatctcgatcgcttttcctgtcaaaagaactggatgctcccaaacatagcattgttaagatggtcacaaaacaccctcagctgcttcactacagcattgaagatggaatcttacctcgactaaatttcctgagaagcattggtatgagaaactctgacattctcaaagtattgacaagtcttactcaggtgttatctttgtcattggaggacaatctcaagccaaagtatctttacttggtcaatgacctcaagaatgaggtccaatccttaacgaaatatcctatgtacctgagtttgtctcttgatcaaagaatccgtccccgccatcgttttctggtttccttgaagaaagctccaaagggcccatttcctctgagctcctttgtgcccacagatgagcgtttttgccagaggtgggctgggactagcttggaggcataccatacattcagacagaggttgctgctaacaagtttcgcagagaagtctggaaggaaaacactagtctcaagacggtagatgcctaggtggtgggagtttgtttctcttgagcccacgctcctaacaggtttatactgcatcattaactatagcatatacttatcgtccatatcacctccctaatggtgaaaagtcttcaccgaattccctcaatcagctgcaaatggatgacaatctaagagaaatgcattattgccagtcgccagaatggttggatggacacttggttacctagctctaggagtacctcgccttgacggctaaaactgttgtgcagtcaagctttcggtggaatcgccatgcaaccaaactaccaagtcataaaaagtttccaaaaaaaatatagaggaagcttgattgcacaacgaattttcccagcagttttttcccgtcttgattgctagttttactattaagtacagcttctgaacaaaatgctacgctagaaacatgtagcctaactgtaagagtgccatcacaggcagccttgtgtactgctgtaattctgcaatgccttttgacattgggggtttcctttttttgtgaaggcttgctatcatgaatcatacacggcttgtacgtcctaccatttcatggtggttgggttagaactctctgtgatggactgc

SEQ ID NO: 33297 - DNA, 2100 bp, Zea Mays
gatagtggggacaatcgatttaattgtagctggaacatttctaaaggtattagtaggtgacttgctgcagcaaacttgaacacacaagcaacaaacatatgcttcaggtccttgatgctaccaacagaaattcagtttctgactgaactaaacggtggtggtttgaatcatcgtggttcactggttttcacaatattgggattcttggcaaccatgaggacattatgagattcttggctaccatgaggacaaattgttcaattacattttctacgtctatttcgaagcgtcgatggcggatgtccgcacacaaaatgccttgaagggtctggaggaagttgcaagtttcctgcgtgtccttggctactatccgtgcaacacaataacgatatgagctgttgcgtcacactgtctatcttggttgctccgccttggaagaccagagtgggagatggttgctatttctgctcaagttagcgagaataaatactttgtttcgatggcatatcgttgaataaaaggttcctcttcccttgtttggaagagattatggtcattatacactcccgactgaatatgaacactcttgaaatacattgcgaagctgcagaggatcgtcattagaattgcatgaaggttgtatgcgaaaccactggattgaacaattcgagaaatctacagaggaagtcgtgaacagctatgcacaagattgagtctaaggtataggcatctgatggaggacatgttgtctctactcccgcatatgaaggacaaccaggacaaggtcgagtccaagcagagcaaggggaacacgccgagcaagctgcttgagctcaggagttgctccagctgcctttcttcgagattctggctgttgaccatgcgtcggatgagggcgcgattgtaccaattggttcgcagcatgatgcacatttgaccaaactgatgaatatggaaaatgaccaacctttgttgccggcaccaccagttaatctggaatcagccatccttgagcaaaatgcaaatatggtggctctcaaggaaggctgttctgtgggaagtgagctgccacctggtctgcagggtaattttggtggtaacaaagcaaacacgtgtacttcagcactgcattctattgatgaaggtgaagaaataacttgtggtttcattaaacatgagaggagttatgatttacagaatttgactatggataagtcaattcaagtgtctaatgaaacaaagtacaagtttcttgctcataagcccagagtaggctgtgaaactgctattcaaaactgtgagttggcttctgcattgccagatacagaatttcatggccctgttgcaaccatttcaactacgggtcaatcagaaggatctgacactgagattaatgttccaaactattctgacctagaagcactgatacttgatctggacctgattccatgggatcaagaatctgacttcatccaaccagaagtttcaaggtttcagtatcctgaaagcaggaaggatttgataagattagagaaaggtgtctgctcttatatgaaccgatctatcatgtctaagggtgctttcgcaattctttatggccaacgcacgaaatactacataagagagcccgaggtaagtcttgggagagaaacagaagaagtacatgttgatatcgatttgagtaaagaaggaaaggcaaacaaaatatcccgtcgacaggcagttattaagatggacgatggtggatctttctacataaacaatactgggaagttttcaattttcgtgaatagcaaagaagtaccctgcagtaaacgtataaacttaatgtcagactcattaattgagataaggaacctgaaattcatttttcacgtgaaccacgaggctgcaaggcaatacatagttcgaaaaaggagaggaagctcccaaggcgggatcacggcgtttgattggagtcagaacccatgagtagttaacgttatgatcaaggttgtttataatctgcgatagctacctctctcttcaagaaagtattggataagcgtaaagttatttataatttccgatagctaatatttctctcttccagttagcact

SEQ ID NO: 33298 - DNA, 847 bp, Zea Mays
cccgcaggcgcgcgcgcccaaccctagccgcgtgggcgccgtccgctcagccgccgctgcacactgttcatcttcctcaaaccgccactccctcacgtcttgcgcgcagccgccgcaccacatcctcgcctcgcggcatctcgcctcaccttgctgcatctcgcgctcgcctcgccctctctgcgctcgtcgtcctgcagagaagccccacgtgcatgtcctctggccgagctcccagcaccctccgcaaaagccccatggaggcgtgcgattagagccctcgcccatcccctacgtgttgctgtgcccggacgccgccgcagccgcgtagccatggccgtcgtcatgccctgcgcacacgtcacttccgccatacgcccactgctccgacgatcttgttggcatgtgtggtcgctacatctcgcgttgccaagactgcgatccaactccgaacttcgaggaatcgacgatcaagcttcggcgaccaaatgacccagctcttcgagttccacgaagttaaagaccctgagcatctgtttggtgaagattaccttttgggctactatggttagattcatgctattgctttactttaatcaatgaacatgatgtgaacacttatgatacgatgttgtcattatgattatggtgttggactggtgatactttagggggctcgagcggtttctcgattgcctctccgtaaggacctgttcgttggatgaccacccgggaaaacagtgcaaccttgagggtggaatgggatgcccttagctgactaattagaggaactggggtatagtttgcttcgccattgtgccgttaatggggctcggtgtatgcggct

SEQ ID NO: 33299 - DNA, 993 bp, Zea Mays
acccaacccaacccaaccgcgctttttgtcacctggaaagggaaggcaagtcgagattcgagaaggcaaatcgaattcgccatgggcatggctgctccgcgcgcgccgctgcctctcccccaactgctgctcctcctcgttgccgcgctcctcgccgccgctcccctccctagggcggccagggcggacgagttcgacgtccgccgccacctctccaccgtcaccaggtatgatgtggccagggagtccagtagtgtcatctccatgccgtcaatcccagacgggtgccgtgtcattcacctcaatttagtggcaagacatgggactcgcgctcctaccaagaagcgcatcaaggagctggatagattggcagttcgactggaagcccttctgaaagaggcaaatcaggtccttgatagtgattctctgaagaaaattccatcctggattaaaggctgggaatcacgctggaagggtaggactaaaggtggtgagctgattagtgaaggggaagaggagctttacaatttagctaccagaatgagggagaggtttcaagatctatttgatgacgaatatcaccctgatgtatattcaataagagcaacccaggttcctcgagcatcagctagtgcagtggcatttgggttgggactactttctgggaaaggaaagcttggacaagggaagaaccgagccttttctgttctgagtgagagtcgtgcaagtgatatttgtctgagattctttgacagctgtgagacatacaaggcatacaggaaaaggaaggagcctgatgtagagaagcaaaaggaaccaattctagagcatgtcacagctgcacttgtcaatcgttatcacctaaaatttacaactcgcgatgtttcttccctctggtttctttgtaagcaggaagcatctttgttgaatacaacaaatcaagcttgtgggctttttaatgaagctgagaaatgctgcttagatattatgcct

SEQ ID NO: 33300 - DNA, 3192 bp, Zea Mays
tcgaggtgataacttatggggagcggtggcggaagtgttgggatatcaggcatagccgaacacacgaaggcagtcataagagggggttgtgccatacaggcgaagtggggagtggggtggctcaccaccttcgaagggaggcggttgaggagatgtgtggcggtgtttagagtctttgcccagtagctggcagggtgagacgcctgaaaaatgagccaacggatcatggtggtggtggtgcgaatgatgcgttcaacccggcccgagaggtgtaggggcacgaaagagagagagagacacaactggacgtcgtggttgaggaaggagcgagaggcgctgttgtcgaactcgcggccattgtcacactagaaggcacggaccgggcgacggaactgggtggagacccaggagaacaagtggatgatggtggcgaatgtgtcggacttcaaccgaagtggggaaaatcacaatggacactagaaggcacgaaatgagagaagttgtccagaatgaccaggtagtatttgtaaccagagaggctaagaataggagaaatccagagatcacaatggacaagatcaaaggcctgagtagccctggacgtggaagtgaaaaaaggaagacgagagtgacgaccgagctgacaagcatgacagaggtgctcagaggagccctaggtataggagatatctcaacggttggaaagctgggacatcacgtcaggtccagggtgcccgagacgacgatgccaaatggtggaggtggtggtagtagcaagagcatgggggcggctacactggtgggggaagtgtacggtaagtgaatagagtagagggggtcggagctgccacgacaagtgagcacgacacgagtgggaaggtggcgtatggtgaacccccagggatcgaactccatagaacagtggttgtcgctagtgaagcgacggatcgagagaaggggatgcgtcagaccgggagcaacaaggatgtcgttaaggtagaatgatcccagaagaaccgatgcacctactgaggtgaccaggagggtggaaccgttgcccacaacgatagaaagaggatgtgagggttgtggtggatgagagtggaattgcgagctagtggtaggagtagtgtgtaagcatgctccggagtcgagcacccaatcggtgggagagggagatggtggtgatgccacggggtgcgcgaaaagagccaggggaggtgctctagcaaagtcactagcaggagacaatcacaggtctgggaaagataagcggtccaggcacgtggcggctcgcatgtggttgaagctcgacacagtcacaaaggacagggctcatggcgtgatcgaaggccacgaagattcctcggacaagcgtgtcgtcgtggaggaggacgcacacggcgatcccgagcaccagggaagcggcggcggcagcgtccgcgttgtgcgccctgcctgtgggggcaagcaggtcagcgtcggggaggatgcgcgtggccgtcgcggcggcggttcgcgcgcccgcagctggggcgagcagagcggtgctagggaggaagccagcgcactagtcgtccatggaagaggagcggtgttgcagggcggacgagcgaccggagtgggggcagcgctggcgagcaactacgacaacatcggggagctcggggttggggttacgccgggggagtgcagcggtggtgctggagtccatgggcggagctgcgttgagacgaggtcgcgccggcgagcgctgtgacggcgtcgggggagctcagggccgagcaggagacgaggagaggccttgcgcttcggggagggtggaggccgcgctgccggggaggtaggaggcccgcctggtagacccgtcacacagccgggaagggagaagttgtgcgtcgccggagagggaggaggtcgcatgccgccgtggagggagaggccacgcacgtgccggggaggagcctggcgggtggcggctgttgggaggtcaacgaccagagaggaacgcctggcaggggagggcgcaacttttggtggcctacggccaggctagggatgcctggtgggagagggcgtggctgagggtggccgacggccaagctgggagggggagcagcctagtggctgtgggtgggaccgtgggagggaggggaagtgagagaaactgcctctggtagtctggtaccaagttggaatggaaaactctccccctaagggcttgttcggttattcccaatacacatggattggatgggattggaaaaaattgtgaagaagtttgacttgtttgggattcaaactcatccaatcccgctcaatccacatggattgagagctaaccgaacaagccctaactgggttgggggtgcaaaatatataagctacactgaaagtatgcaagtaattacacagggactagccccggaaccctaatagtactctaacagggataactaactgttgacataaaaaaatcatcagctggcgggtatttatcaaaaatacttatgagaaagatcaagtaaggcttcagttaggtgtgtagcaatactctttgatgttaaggattgtagcttaaactactatttaataactggacctatttaatttgatttgttttagacattcaaggcttttagttttgttttggaagttgggcttagggtctatgttaggataaggcttgcaaagtttgttgtctggacataatttcctaatttacaggcccacttcatgaaggaacattgatttcatcgcagagcaacttcaataacctcttttatcctttgctattgttagaaatagagatttttggtgaaaaaaatccctccaacagcttcttttaattagatgtccaactattgccatccaatattcctgcacaagatgtagaggagctgttggagggtgaaaagatacggagagcgttttttagtacttgaggtgagtttaagaaagactcttggagatgctcaatctcctactccctccgttctaaattataagaccttttgacatttctagattcatagtttttgtcatgtatctagacataatacatatcttggtgcgtagcaaaagtataaatctaaaaaaaaagacaaaaggtcttataatttggaagggagaaaataatttcttgccatctggtttagtaacaccaagtcgccaacgggatacaacctacct

SEQ ID NO: 33301 - DNA, 2715 bp, Zea Mays
caaactcccaaatttcaacgtccaagggtggcgcgagcacacagacatagaggcacggaaagcagagcgcgaggaagagagagacagagagaaaaacccaaaccctaacaatcatttccaggcccccgccccccggcgtctccagaacgttccagaaccttcaaggaaccatccacaggagcaggcgcgagcgcgggtgtttggatcgtgggaggcaacgctggcggctcgcagcggcagcaggtgatggcggattcgcctagcggtggaggatctagggcttgtgtctgctgggtgagacaggtcgaggaggcagcgtcggggctggtgctcgggagaaacgaacaggggaggagggagggaggatgctgagcgtggtccgggtgcaccttccgtccgagatcccgatcgtgggctgcgaggtcacgccctacgtgctactgcggcggcccgacggtgcagtctccaccgacgatgtccctgaaactgcgcccgctgatggccagttcatgcggtacagatggtaccgcatacagagcgatcggaaagtccctatctgcagtgtgcatccaatggaacaagcgacgattcagtgcctcggttgtctcaagtcaaaaatacctgttgctaagagctaccactgttcagctaaatgtttctctgatgcatggcagcaccacaaagttttgcatgaacgagccagtagtgctcaaaatgaaaatggggctgaagaagaggagttatgtggcagtggtggttctggggttctaagtactgctggatctggttctttgtcaaattttggacagagccctagtattaacaatgaacctgtgcctttgtatccctcaggtactgataaaaattctggagaaacttggtatgaagttgggcgcttgcgaacgtatacaccaactgctgctgatattgggcatgcactaaaatttgagtgtgtagctgtggattcagaaaaaaggtctccaattggacctccgacctcagttatgacgtcacacgtaatccccgcaccaactccgacccctcgtcgccttatccaagtgaatggggatgttttgggtcacttggatttagacagccaaacttcatccttggggacattcactgtattatcttacaatattcttgctgatacatatgctacaagtgatgcatatagctactgcccaacatgggcacttacctggacttatagaagacaaaatttgttgcgtgaaattattggttatcatgctgatatcatctgtcttcaggaggtacaagtaaaccactttgaagattttttttcacctgagcttgacagacatggatatcaggcgctttacaagaaaaggacaacagaggtgtattctggaaatcctatggccatagatggctgtgctacttttttccgcagagacaagttttcgcatgttaaaaaatacgaggttgagttcaataaggctgcacagtccttaacagatgcgattattccttctgctcagaaaagactggctttaaatcgtttgattaaagacaacattgcactaattgcggttttagaagccaaatttgctaatcatggagctgaaaatcctggtaaaagacagctactttgtgtggcaaatacacatataaatgttcatcaagacctaaaagatgtgaagctatgggaggttcataccctcttaaaaggattggagaagatagctgtcagcgcagacattcctatgttggtctgtggagatttcaactcgccccctgggagttctccacatgcgcttcttgcaatgggcaaagttgatcagcatcatccagatctggcaatagacccccttggaattttacgccctccaagcaagttgaatcatcagcttcctctggtcagtgcatactctgcatttgcaagaatggtaggtgttggctatgatttggagcatcagcggagaaggacagaccctgcaacaaatgaaccactcttcacaaattgcacaagagattttactggaactgttgattacatattttacacagcggactccttgacagtggattcattattggaacttttggatgaggaaagtttaagaaaagacacagctcttccatctcctggatggtcatcagatcacatagcactgttagccgagttccggtgcaagcctagaatcagaagttgacacattaggtcttgtagaaaaaggttattgtcatcatccttggtggtggaacagcgttccatgtgggtatgacgggacgcgggctctcggggaagcaagcagcctaggtagcagcctcagcaaggggaaggggcatgtaacatttgattttacccttttacattttagctcatgatactcaagctgcccatgtgtaccattacttcctatagaagaaaatacttgagagaaattttgaaggctagtttggaaactctattttttccaaggtatttctatttttcaaggggaaatgaaatattttttcgtggaaaaatagaaatctctagaaaaaatgaggttcctaaactagcccttaaagggctataagccccttttttttctttcactctggtcgcgttggatttaacctctttgctgtatccatatgctcgctgcctacaagatgtaggagccttcagtttctctaccaatgtaattccagttccagtttttgttctccatgttgctggttgctctcattgccgttagatgtctg

SEQ ID NO: 33302 - DNA, 3474 bp, Zea Mays
actctctcctcctcccctccgctccctcccagtcccagatcccgattcgccgccgcctccggcagatccagccagcagctcccgccgcagaaccgccgcgggcgccatggagaagccatgctctctcctggtccacttcgacaagggctcggcatcgatggcgaacgagatcaaggcggatctggagggcagcgatggccccgccaaggctgacgccatgcgccgcgccatctcgctcctcctcaacggagagaccctccctcagctcttcataaccatcgtccgctacgtgctcccctccgaggaccacaccgtgcagaagcttctcctcctctacctcgagatcatagaccgccgggatccggccggccgcgccctgccggagatgatcctcatctgccagaacctccgcaacaacctccagagccccaacgagtacatccgcggcgtcactctgcggttcctctgcaggctctccgagcccgaggtgctcgagccgctcgtgccgtccgtgcttgcgaacctggagcacaggcaccaattcatccggagacacgctgtctccgcggtttccgcgatctaccgcctcccgcatggtgaccagctcatccccgacgcgccggagctcgtcgagcggttcctcgcatctgagcaggacgcgtccgcgcggaggaacgcattccttatgctctgtgcctgcgcacaggaccgcgccgtcgcctacctgctctccaacgccgatcgagtcgctgagtggcccgatctgctgcagatggccgttgtggatcttatccgcaaggtctgccgatcacaaaaccgtgccaacaagggaaggtatatcaccatcattacgtcgctgctctccgcaaccagcactgcggttgtttatgaatgtgctggtgccctggtgtcactctcttcggcacccacggctgtgcgggccgctgccaacacctactgccagttgctctcgtcgcagagtgacaacaatgtgaagctcattcttctggatcgcctcaacgagctgcgaaccctgcaccgggatgtcatggtgggtgtggtgatggacgtgcttcgtgcactggccagccccaatttagatgtcaagagaaaggttctcgatttagttctcgatttgctcaccccgcgtaatgttgaggaggtggtgctttatctcaagaaggaggtggtcaagacgcaggctggagacctcgagaagggtggcgagtaccgccagatgctggtgcaggccatccatgcttgcgctgttgagtacccagaggtggctggatctgtagtgcacctcctcatggactttcttggtgataccaatgttgctgcagctgttgatgttgtgctgtttgtacgtgagatcattgagaccaatccgaagctgcgtgtttccatgatccagaggcttattgatacattctatcagattcgggcatcccgtgtctgctcatgtgctctctggatccttggggagtactccctctctctatcagaggttgaaagcaccattgctaccattaaacaatgtcttggtgatctgccattctacactgtctctgatgaaggggaggtaactgattccaccaattcagcccaggcggtggtgaacactgtcactgtatcttccaggaggcctgttgttcttgcggatggcacttatgccacacagagcgccgctaccgagaccatttcagccccatcagttgctcatgggtcattagcatctaccctgaacctcagatcactcattttgtcaggtgatttcttcctggctgctgttgttgcatgtaccctgaccaagcttgtgttgaggctggaagaagtgcagccatccaaggttgaatcaaacaaagcttgcactggagcattgctgatcatgacatcgattctgcagctgggccagtcttcttaccttccccacccgattgataatgattcatatgacagaattgtgctgtgtttgagattgctttgcaatactggtgatgatgtcaggaagatttggttgcattcatgcagacagagctttgcgaaaatgcttgctgagaagcagttcagggagacagaggagatgaaggcaaaggcacagatctctcatgcccagccagatgatcttattgatttttaccacctgaagagcaggaagggcatgagccagcttgagttggaagatgaggtgcacgatgatttgaaggctgcaactggtgggtttactaaggatgcagatgatgcaaacaagctcaaccgcattcttcagttgactgggttcagcgatcctgtgtatgctgaagcatttgtaacagttcaccattatgacattgtacttgatgttactgtcattaaccgcacaaaggagacacttcagaacttgtgcttggaattggctacaatgggagacctcaaacttgttgatcgccctcagaactacaccttggctcctgagtctagcaaacagatccgtgctaatatcaaggtttcatcaacagagacgggggttatatttggcaacatagtttacgagacttcaaatgtgatggaacgatcagtggttgtcctaaatgatattcacatcgacatcatggattacatctcacctgctacgtgtgcagatgttactttccggaacatgtgggcagaatttgaatgggaaaataaggtggctgtgaatactgtgattcaggatgagaaggaattcttgaatcacattatcaagtcaacgaacatgaaatgtctgacaccaccgtctgcactggatggggaatgtggtttccttgctgctaacctttatgcaaagagtgtgtttggcgaggacgctttggtgaacatcagcattgagaagcaacatgacggcaagctcagtggctacattcgaataaggagcaagacccagggaattgcactcagcttaggggacaagatcactctcaagcagaaaggtggcagttaactgtgacaagatcgatcaaggagagagataagaggacagttatgaggaagtcacgaagttgtcggtcgaagatatatgttgctgtagtaacgaagctgttccaaacttccttgaaatagttgtgaagtttatgttgatttctcgacagttgtctggacttggaaacagaagcttggaggcggtgttgtcacgttatttttgtagagatgaattggagctcattttctgttgcatatagatttgccaattgtgttagggtacttttatggtgtttatttaagaaatgaggtagtccattatctttttactcagtttctttggtttgtggaataaattgacgatgagaccccctagaacttcttccctactactacattactagggcctaggcagtgatcatgatatggttgattgcgtggtgacgtctgacactgcatgcgtttattcaaaggaagcaggcggcaggcatgctgtgcaggcgcagccgccaaaaatataataagggagaaaaaggc

SEQ ID NO: 33303 - DNA, 4585 bp, Zea Mays
tctagagatgagctacgtcttgtctatggtgtttctgagcgtacagaaagcgatggtgcagctaatttaattcagaagttgagagctataaactatgctctgggtgaactaggacagtggtgtgcttacaaggttgcactgtcattcttgacagcactacagaatgatgaaagggccaactatcaggttgatgttaagtttcaagagtcatacttgagaaaggtagttgatttgttacactgccagttgactgaaggggctgcaatgaaaagtgacagtaatgatgttgaaatgcataattctgaaaaccccaagccaaatgaacttgaggagggagagctacctgacagtcatggtgaacatgtagatgaagtcattggtgccgcagtggccgatggaaaagttaccccaagggtgcaagctttgataaaaatacttctcaagtatcagcacactgaggattttcgtgctatcatatttgtagagcgagtggttacagcattagtcctccctaaggtctttgcagaacttccatcgttgggctttatacggtgtgcaagcttgataggtcataacaataaccaggagatgcggtcgtgccaaatgcaggatacaatcacaaaatttcgtgatggccgtgttacactgttagttgcaactagtgttgcagaggaaggacttgatattaggcagtgcaatgttgtcattcgctttgaccttgcaaagactgttttggcctacattcagtctcggggtcgtgctagaaagcctggatctgactacatattgatgcttgaaagaggaaatatgtctcatgaagctttcttgagaaatgctcggaatagtgaagagacattgagaaaagaagctattgagagaactgatctcagtcatctcgatggcacttctatgctaagccctgttgatatatcacctgattctatgtatcaggttgaatcaacaggtgccgttgtcagtctgaactctgcagttggactcgtacatttttactgctcacagctgccgagtgacagatactctattcttcgaccggaatttattatgcaaaagcatgagaaaccagggggttcaacagaatattcttgcaaacttcaactcccttgtaatgccccattcgagaaacttgaaggtcctatatgcagttcaatacgcctggcccaacaagctgtttgtttagctgcttgtaagaagctacatgagatgggtgccttcacagatatgcttttacctgacagaggaagtggggaaggagaaaagactgaacaaaatgatgaaggtgatccactgcctggaacagcacgccatagagagttctttcctgaaggggttgctgaaattctacatggagaatggattttatctggaagagatggttaccaaagttcacagtttattaagttatatttgtattctgtgaactgtgtaaacattgggacttcaaaggaccctttcgttacacaactttcaaattttgctcttatttttggcaatgagctggatgcagaggacaataataacaaaggcatctctcgtattccgtggaccaattgaaattacagaaagtcaggctcatgagcattgtacttgatgttgatgttgatccctcaacaactccttgggatccagcaaaagcatacctctttgttcctgtgggagctgagaaatgtatggatcttttaagagagatagattggactctagttaatagcattgtgaattctgatgcctggaacaaccctcttcagagggcacgcccagatgtctatctaggcacgaacgaaaggacacttggaggggataggagggaatatgggttcgggaagttgcgccatggaactgcatttggacagaaagcccaccctacgtatggtatcagaggagccatcgctgaattcgatgttgtcaaagcgtctggattagttcctggtcgtggatggggacattttaatgattatcaaaataaaggcaagttgttcatggcagattcatgttgggatgccaaagatcttgctggaatggttgtaactgccgcccactcaggaaaaaggttctatgtggacagtatttgctataatatgaatgcagaaaattctttccctaggaaagagggctatctgggtcccttggaatacagctcgtttgctgattactacaagcagaagtaagataagttttgagtgctggaagcaaaaggagttctctcttagctctacctccttttgatttccctttttttttggcaaagtagctttatggcagcataccatgatgattcttgtttttcctctcaggtatggtgtggagttagtttataagaaacaacctcttatacgggcacgcggtgtttcatactgcaaaaatctactttctcctagatttgagcattctgaagctagcaatggagagttctcagagaatcttgacaagacatactatgtatatttaccacccgaattgtgccttgtgcatcctctccccggatcacttgttcgtggagctcagaggttaccctcaataatgagaagggtggagagcatgcttcttgcaattcaactgaaggacataattgggtatccagttcctgcaaataagatattagaagccttgactgctgcgtcatgccaggagacattctgctatgaaagagcagagctgctgggtgatgcatacttgaaatgggttgtgagtagattccttttcctaaaatatcctcaaaagcatgagggacagctcacaaggatgcggcagcagatggttagcaacatgatcctgtatcaatacgccctgaataaaaacctccaatcttatatccaagcagatcgatttgctccatcaagatgggcagctccaggagtgttacctgtatttgatgaagaaacgagagattctgaaccatccatctttgatgaggaatttactcctagcagtgagttacaaaagaacttgtatgatgactatgatggcgatagcatgcaagaagacggtgaaattgagggagattctagctgctatcgtgttctatcaagcaaaacattagcagatgttgtggaagcacttattggtgtctattatgtagctggagggaaaattgctacaaaccatctgatgaaatggatcggtattaatgcagagttggatcctcaagagatcccatcttcgaagccatataacatacctgagagcataattaaaagcatcaattttgacacattagagggtgcattgggtatcaagtttcagaataaaggcttacttgttgaagctataacacatgcatcaagaccatcatcaggtgtttcctgttaccagcgcctggaatttgttggtgatgctgtattggaccatctcattacgaagcacttattttttacttatacggacctacctccaggccgcttgactgacttgagagctgcagctgttaataatgagaactttgcaagggttgcagttaaacataagctacatgtacatcttcgccatggatcatctgcattggagacacagattcgagagtttgtgaaggatgtccaggaggagctttcgaaaccaggtttcaattcttttggccttggggattgtaaggctccaaaggttctcggagacatttttgagtctattgctggcgcaatattccttgatagtgggtgtgctacctccgtagtctggaaggtttttcagcctctgcttgatccaatggtgacgccggacacccttccgatgcaccctgtaagggagctccaagagcgctgccagcagcaagccgaaggattagaatacaaagcatcccgtacaggcaatgtagctacagttgaagtcttggttgatggcatacagattggtgtagctcagaacccacagaagaagatggcacaaaagttggcggctagaaatgcacttgttgtcttgaaagagaaggaaaccgcagcaaagaaagacactgaaaaggatggcgagaagaaaaacggttctcagttcactaggcagactctgaacgacatctgcttgagaaggcaatggccgatgccacagtacaggtgtataaacgagggtggccctgcccatgccaaaagatttgtttatgcggtaagggtaaatacatctgacagtggatggactgacgagtgcattggagagccaatgccgagtgtgaaaaaggccaaggactctgcagctgttcttctgctcgagctgctgaatcgaaattaccgtggcaagcctgatggaaaataatctttggtgatgttctgtggtggtaggtagacgtggaagcatccatcattctgattatacccccatgcagtgcttttcagcaaagcaaattaatggcctttgttgatgttcttggtggcggtattggtgatatggaggcattcaatgcaagcataagcagagctatggggagtgggattagaggattattattagttttgtctgaggtgactactaggtattttactggcgaggatgcgcctgcagctgggaactcggggttctctatcttggcctcgccgaccaaatatcacgtacgtcgacgtccgcgaacagtatatatatggtaggc

SEQ ID NO: 33304 - DNA, 2924 bp, Zea Mays
cacctacgcccggcccccggggattgagcaagcatcgggtgctttccgttacgttcctccctcccgtcctgtcctgacctcctcgtctcatcatacttcagacttcacacatcgatccccactcccccacggaagcgaagcgtacgctacgcgcactgccctccggcgaccgccccgccgctggcgggtcggattgggtccgatccggatctggatcagcaccggcatcgccgcgacggagatgccgaccccgaggcagcggcatacctccacctccggcgggggcggaggagggaggcgcgccgcctccgggtcggccatgctgccccccgtggtggtcctcgtgttcctcttcgtggtcgcgccttcgctcttcttcgtcgtgcgcaatgacggtcgcgcccacgcccacgtccacgtagcctccggtaagcattgacatattctgtttgcctgcagatcgcaagggtaagaatggcaatcaggaagcagcagcaatgaagaacctcaaatctattttgcctaaggaggtgtttgatgctataactgctagtcaacaagaatcaggcacattgagtgttgatttttttaggaatcatgcatctccctcttggaaaactgatgatctagtcaccgagaagagcatggatgtcaatgacaatgctaaagctgaaaatagtttgctagaacattctgtgccaacaaatagatcacccaaagatccagatgaacatcaagttgacaaagcagcaaaagtagctcgaaggaaacttagggagaaaaggcgtgagaagagagcaatggatttggttcataaagatgatgaagcacgtattaagctggaaaatgctgccattgagcgatcaaaagctgtcgattctgctgtgcttggaaaatacagcatatggcgaaaagagaatgagaatgagaattcagactctacagttaggctgatgagggaccaaattattatggctcgtgtctattctacgcttgctaaatcaaagaacaagaacgatctatatcaaaaactgcagactcgaatcagagaaagccagcgggctgttggagaggctaatgctgatgctgacctgcatcacagcgcaccagaaaaaatcagagcaatgggtcaagttttatcaaaggctagagaagaactttatgattgtacggcaatcactcagagaataagggctatgcttcagtcagctgatgaacaggtcaggagcttgaagaagcagagtacatttcttagccagttggctgcaaagacaattccaaacagcattcactgcttgtctatgcgtttaacaattgattactatatcctgccccttgaggaacggaaattcccaaggagtgaaaatttagaaaacccaaatctctatcactatgcacttttctctgataatgttttggcagcctctgttgttgtgaactcaaccataatgaatgctaaggaaccagagaaacatgttttccatcttgtgactgacaagttaaactttggagccatgaacatgtggtttctgctgaacccacctggcaaggccaccatccatgttgagaatgtggacgaatttaagtggttgaactcatcatactgtcctgtgttgcggcaacttgagtctgctgccatgaaagagtactatttcaaagctgatcgtcccaccactctctcagcaggttcttcgaacctaaagtatcggaaccccaagtacctctctatgctgaaccacttgaggttctatctcccagaggtctatccaaagttggataagatactcttcctcgacgatgacatagttgtgcagaaagatttaacagggctgtgggatgttgatcttaatggaaaggtcaatggtgctgtggaaacctgtggggagagttttcaccgttttgacaaatatcttaatttttcaaatccacacattgctcggaactttgatccaaatgcatgtggctgggcttatgggatgaacatctttgatctgagggagtggaagaagaaagatattactgggatctaccacaaatggcaaaatatgaatgaagacagggtcctttggaagcttgggacacttccgcctggcctcttgaccttctataagttgacgcacccactggacaagtcatggcatgttcttggattaggatacaacccaagcattgaccgttcagagatagacaatgctgctgtggttcattacaatgggaacatgaagccatggctggagctagcaatgaccaagtaccgaccatattggaccaagtatatcaagtatgatcacccttacatccgtggatgcaacttgagtgagtagatagtcgtgctgaaaaactgacagatgaggaagagcttattggacagaagtgttccactaccatgtccttgcggtgcgttattcgactcagcaaagtggtactacctcaagctcttgattgctttcctcccctcctctcccaagaaaaattcaccggtggctgttctgacgagtgatgtattattatagcgatgcgttttttaattcaattattagtaatatgcatttatattttccgtcaaaattagcaggagaaaaacttataaaatggatttgtggggctggtgtcgcgtgctgcttagaggtatgcctagagaatcgagtgttgccggaattggatcctttttttgtatcagacgataaagtgggagtacaagccaaagcggaaggcatgaatcgaatggattacaggtttaaccctgagtcctgaccaatgtgaaactattttacctacagtatcaagaaatgctggtgtccgttttatgataactgatctcgtagctaatcttgtgtttctcggtcacgtgttacatggtgctagcgcctgagagattggattagtcaatttatttcacaaactatgacattttcttctagcaa

SEQ ID NO: 33305 - DNA, 1864 bp, Zea Mays
actcgcgcacgtcagcactcagccactcagcacagccactgacccgtcgcctccccggctcgcgaccgcatctctctcgccccttccaagttcctaatcgccaccgctgtccccaaccagcaaaccctagccctcatcgccggcggccatggccgagaccgtcgacgacaagatcagttacttccaggctgtcaccggcatctccgacacggacctctgcacggaaatcctcgccgcgcacaactgggacctgcagctcgcggtgtcctccatcaccgccaacccctcctcgccctccgccccggtttccacctcctcacgcgacccggccccttccgcccctttggcagatgcggagttcgtcgcgccaccgccgccgataccgccgccgcctcagcagcagccggggatcgcgtggaagctggtgacgctccccttctacgtggtctcgggtggggccagcctcgtcgccggctccttccgccttggcgcctgggtcgccgggggcgtgctgtcccgctccctctccctcctcggcctcgcggggcaggccggcagcggcgaccgcctgctagagctgccgccgtcagctgccgaggcggctgacttcgtcgccgagttcgagcgcgagtgcggcgctggccgcggcccgcgcttcgtggccgaggggttcgctgatgcgctgcagcgagcgcagcgggaattcaagcttctgttcgtatgagaacttcgttgcgtggggtggtagtatcagaaggaccgaagggttcaagatgagcaacagcctgaatgcgtcgagattcccgttttgtgctgtggtcatggcttctacaaaccagagaatcgtgctattgcagcaggttgaagggcccaaatcacctgaagagatgataacaattcttcaacgtgttgttgaagaatgtgctacatcactcgttgctgccaggattgaagctgaagagagactaaacaaccagcgtttgcgtgaggaacaagatgctgcttacagagctgcacttgaagctgaccaggccagggaacgtgaaaggatagaggaacaggaaagacgtgaaagggaggctgtagaggctgagaaaaagcgtaaagaagaggaggaagctgtagcaagggcagcccaagaagcagctgaaaaggaagctgctcttgcaaggaggaggcaagagaaggccatggctcttggagctgaacctgagaaaggaccaggtgttactcgggttctcataagattcccaacgggagagcgcaaagagcggagattccatagttctgcaaccgtcacttccctctatgactacgtcgattctttagactgcatgaaagcagagaattacagcctagtttcaaatttcccacgggtcacatatggtccagagaagcactccctgacactggaggaggcaggcttgcatccgcaggcgagcctgtttatcgagatagagcaatgatgctatagaaaaaccggaacttggaagtataggtgctcctttttccgaatttgtccagtaacagttaaggatttccagatgtattacacaccacaggtgcatgcttgttcatgaaataaaattcgccctcaccaagatcagttgactgcagccaggtcttgtgaattgtgattcgtttggaaagcctgccttgattctgtcagccaaagcatgacgacctaatttgcctatccttccgtaagacatcctcaagaaaggaattctccctggcttcttttagcaactaagtgactccagggtaaaatggattcgcaagttcagttggattcaatttgggtaggcatatcaagcttccatacattaagaaaactactactttttctctatatatatataga

SEQ ID NO: 33306 - DNA, 1117 bp, Zea Mays
cgggccttgcggacgccagcgtgtgccgagcggaggcaggcaggtgtcgctgggcgcgcagcccacatgtcccccgccgcttccgcaccggtcttctcccacctcggccccctcatccctcctccaactccaatgctctccactcttctccgccaccgcctcaccgccgccgcctcctcctcgtcgccgacccacagcacgcctctccgtctgcgccccctcgccgcagccatgtcgtcgtccgcgtccgcgcctcacggcggccggaagccgaaccgcctcgccgccgagcacagcccctacctgctgcagcacgcgcacaacccggttgattggtacccttggggggaagaggctttccagaaggcgcgcgccaaggacgtccccatcttcctctcgagtatgaactctcctgataccattggtgtcatgtgatggaggtggagtcctttgagaatgaggaagtggcaaagttgctgaatgattggtttgttagcatcaaggttgaccgtgaagagcgccctgatgttgataaggtttatatgacatatgtatcggcactgcatggtggtggtggttggcctctaagcgtctttttgtcacctgacttgaaacctctgatgggtggtacatactttccaccggatgataattatggaagaccagggttcaagactgtattgaggaaggtcaaggaagcctgggaaactaaacgtgaagcgcttgagcggacgggaaatcttgttatcgaacaattaagggacgcattatctgctaaggctagctctcaagatgtgccaaatgacctagcagttgtctctgttgatcaatgtgtcgaaaagttagcgagcagctatgatccaaaatttggtggatttggctctgctcccaagtttccaagacctgttgaagattatataatgctatacaaattccataagtacatggaggctgggaaggagattgaagccttgaacataaagaagatggtgactcacacattggactgtatggcaagaggtggagttcatgaccacataggtggtggttttcacagatatagtgtggatgagtgctggcatgttccacattttgagaagatgatttccgatcaggg

SEQ ID NO: 33307 - DNA, 2640 bp, Zea Mays
ccagtcttgttgactcttgagtcttccaccttcctcctcccgtctcgtctccaacggtgtgcttcttcctccggacgcctcgctcgtccgaccgctttacctccctcctccggcgagctccctccgctgttcctgatatgcaggagcactagcaaagcggcttcgccatccctccggagtccggagcagccagttttacaacgttgaaggcttaaaaattctacagaactagatgatacttgcataatgcagccctcagatatttggaaggcgcatgctggttcatcacagtcagaggcttcgggtctggatatggagaggaacggatgcaatcataattgctgtccatctcctctccagccaattgcttcagctggtcagcactctgaaagcagcgctgcatacttttcttggcctacatctactctaatgcacggctcagctgaaggccgtgctaattactttgggaatctacagaagggtgtactaccaggacatcttggtcgcttgccaaatggccagcaagccaccaccttacttgatttaatgattataagagcattccacagcaagattctccgccggtttagtcttggtacagcaataggctttagaatcaggaaaggaacattgactgacacacctgccatccttgtgtttgttgctcgaaaggttcacaggaagtggctcagccctactcaatgtcttccaggtgcccttgagggacctgggggtgtgtggtgtgatgttgatgttgttgaattttcttattatggtgcaccagccccaacaccgaaggaacaactttatgatgagcttgttgatggattgcgtggtagcgaccctagtataggctcaggttcacaggtggctagtcttgagacctatgggactttgggtgccattgtgaagagtcgaactggcaacaagcaagttgggttccttacaaacaggcatgttgcggttgatctggattatcccaaccagaagatgttccatccgttgcctcctaatcttggacctggagtttacctaggtgctgttgagagagcaacatcatttataacagatgatgtttggtacgggatatatgcaggaacaaacccagaaacttttgtccgagctgatggtgcatttataccgtttgctgatgactttgaaattgctagtgtcagcacctccgttaaaggagttggagtcattggtaatgtaaaggcaattgacttgcaatccccaattggcagtctcattgggagacaagttgtcaaagttggaagaagttctggtatgacaactgggactgttgtcgcatacgcacttgagtacaatgatgagaagggaatatgtttcttcactgactttcttgtcgttggggagaaccaacaaacatttgatcttgaaggggacagtggaagcctcataatcttaacaggacaagacggtgagaagccgcaacctataggaattatatggggtggtacagctaaccggggaaggttgaaacttaaaagtggccagggtccggagaactggacaagtggagttgatcttggccgccttcttgatctcttggagctagatctgatcacaacaagtgaagggctacaagctgccttggaagaacaaaggattactctagctgccgctgcggctgcagccactaattcaactgccacagaatcgtcacctgttgctggccctcaagaggatgataaaatcgacaaaatctatgagcctctcggcattaacatcattcctcgagacggttctgccatatcaacggaccaacccaacgaggatgtggaagagctaaacctgatgtctccaatgcgcaatggtgaagaaggcaacggtgacttcaataacttgatggacttggaatcggaaaattcacctgatggtatttctattgctctgaacctgggagagcgggagccagaaagactccgctctgtttctgattcgatgctggacatagacttgcagaaatgaggctgcccgctgctatgctgcagacgtattgcaggaggctccgtatcattcagctttttttatcgatcattgcaggtatggccacaaaggaaataatctgtttctaggcgactggaccggttgttctgcttgaaacccggtctgggttaagctgtgaagctcctgcagccgcttgctcctgcagttttgcgtcaagtgtctaccaactctagcatatgtagtgctgcgtaagatgtcggcacctcagatagacagaggcgccatatttcttgctcatgtaatgttatttgttgtatgctcgtttgtatgtactgcatgaagcattgtaaaattgagcaacagcaaccagagctcgagaatcttaggcgcaaccaaccaaccccgtatcgatgaattgacaataaagctgaatattttaggtgtttagaaagtattttctcttagatttttggggagattaggatacaaactctctgattcaagcagcccctaggtgttgtcctgacctgcttgatcaaacgacctgctggctaaagtttggacagagtagtcgctctctagcttgatgagttcttaagctatcttcaacaaattactcattctatctcatatatcgtttggtttacgaaatgtaacgtaaatgataat

SEQ ID NO: 33308 - DNA, 2417 bp, Zea Mays
atggcggcattcgcagccccctccttgtcctcgctcatcctcctcgcctcgccccactccgcgcccactctcctccgcctgcgccgcgcgggcggccgctctctggagctgtcgtcacggcgcggcgggagcgcgcgccttcgggtcgttcgacgagcggtgacggaggaggagagcgaggccgcgcgcggagacgaggaggtggaggaggccccggaggagccagtggctggccgcgacctcgtcacgctcgccgcctgcctcgtgggcctcctcaccggcgtctccatcgtgctcttcaacctctcggttcatgaaatacgtgacgtattttgggacggtattcctttgcgaggcgcttcatggctgagggaagaaccgattggtgaagtctggcagagagtgatatttgttccggtcagtggaggtgttatagtgggtggattgaacgctctaagaagtcagatagaaactaactcagatgcccctgtgtccaagataaagagtgcatttagaccattcttgaaagctgtggcagcatctttcactcttggaactggcaattcactgggtcctgagggtcccagtgtggaaattggttctgcaatagccaaaggatttggtgatgtatttgagtgggacggtgggaaaaggctgtctcttgtggcagctgggtcagcagctgggctttcatctggttttaatgctgctgttgctgggtgtttttttgctgtggaatctgttttgtggccttctgcggattcctcatcccttgccaactcgacacctatggtgatactcagttcagtgatagcatctgttgtttcagagattggtctaggttctgatcccgctttcactgttccggaatatgattttcgctccccaacagaacttcctctataccttttgctgggtgtcttctgcgggttggtgtcaattgcattatcaagatgtacatcacttgctatgaaggcagttgaaagtttacaaaggacaacagggttaccgaaggctgcatctccggctttaggtggcctcattgttggtctccttgcacttttgtaccctgaagtattgtactggggctttgaaaatgttgatatcttgctggaatcacggccatttacaagcggcctctcaacgaccatattggttcagcttattggagtgaaaatattagcaacatctttgtgcagggcttctggattggttggtggttattatgcaccatctctttttattggtgcagctacagggatggcatatggcaaattcatgaagtttacatttactggccctgaaccattgctgcatgtcccattcttagatgtggcatcacctcaagcatatggcctggtaggtatggcagctaccctcgccggtgtatgcaaggtgcctctgacatctgtcctactactttttgagcttacacaagactatcgtatagttctacctttgctcggggctgttgggttatcatcctggattgcttctcctcaaaggttctctaaaagaattaggagtaagctggattcttgggaggataaatcgagtattcctcagcaagcaaacgacatgctcactgaaaacaaagaggccacttccatggatgcagctgatttgtcgttagaattatataaaattgaaagctccctttgtgtctatgatgccaacgacagcaatatgttcaaaaatcttactgttggtgaggccatgaaaactaactacttctctgtctcaatgacaaccccattaattgaggcactagatcttatgcttgccgagaagcagccctttgttatgataactgagaataacacatctgcaagaggcttgctggcactaaagaatatccaagatttttgcaaagctgcaaaaactaccagatcacaagctgagagaagattatggactctcatgatgtggatcacctacctgtagtttctgaggatgctaatcttcaggacagaggacttttgataggttttgtagaccgagaatgcattgccattgctcgaagagccatggcaacaaaagaaattttcagttctatgtatgggatcaggaaggaagagaggtagcacgaaaggaaggaatgacacgacacagaagcactccctacttggcaaatctggcttcttttcctggtcaaggctaatacctctccaggttattagttgctaagtaaaaacgtgcttcaggcatgtggttaaggtgggtctccatatttttctcgaagtatcccgcttaccggttaccaccatgactatctgcaatggtgaggttttgttgctcttgtttgctacaagttctcaatgttagaatatacccgtttagggtttggggtcttccccgtgtaatgaccatctcacccctctgtaatgggcctgacccagtttactcagcctattaat

SEQ ID NO: 33309 - DNA, 1433 bp, Zea Mays
ctttgcagagcattcgtgtaataatgaatgaaggactggcaacaatccctgtacaatgccttgatgaatgcattttggtaactggagcatatggtactcagaaaactgatataaacataagtttaacatcagttggacttttgtggactgctactgattttattgtgaagggattagtcagcaagcctattgagcaagctagtcacatgaatgatgatgttcaatcatgtgaaatgactgaagaggcaaacagcaagcaagttcctccaaaactagttgattatagtatacttttcttttcagttttctctgtcctccagaaattgggttcagatgatcgtcctgaggttcgaaattcagctgttaggactctcttccagactctcagcatccatggccaaaagctttctaaaagtatgtgggaggattgtctttggttatatgttttccctatgttagagcatgtttcccacttggcatctacctcatctcgagatgagtggcaagggaaggaacttggaactcgggctggcaaagctgttcatatgcttatccatcacagtcgaaatacagcacaaaagcaatgggatgaaaccattgttcttgtacttggtggtattgcacggcttttgcgttcttttttctcttacctccaacaactgagaaaattttcttctggttgggtgcttttactcagttttataaaaaatagcatcttaaacggtagcaaggaggttgctattgctgccatcaattgcttgcagacgtttgtcggcgcaaactgtccaaagggcaatttggaatcctcgtatgttaaatctgttcttgatatttatgaacttgttcttcaaacttcatctaattttaagaatgactccactgataaagtgaagcaagaggttctccgtggtcttggtgatctttatgtccaagcacaatctctgtttactggtgacatgtatctaaggcttatggcaattatgcatctgatgatcaagactaccttgaatcctactgattatgatagtgaactgggtagtattcctgctgtacaacgaggtatattggaaatcattcctatgctacgcccaacagttgtattgtctcccatgtggacacatctgcttcttgagctgctatgctatcttaatgggcacgaaggccccctccagaaaaataatgaacaaacgcccgatcataattctcaagcactggtagacggtgcaaagcatgctcttgttgaaagaagcaatctcaatggcgggggtacaaaactggatatggtgggatctggttggggcattctatttgtagaaaaacttgtaccaatcattgccaaccttttcttggaggctccaccaaatgaaaggtttagtgtctctcctgaagtcattcaaggtcttggaaggtatttgctttttatgatttatatc

SEQ ID NO: 33310 - DNA, 2094 bp, Zea Mays
cgcttagaggcatggcaatcgatatttcgtgaagtaaattattatgtcggcaagtgtgagtcgagttctttgctgaaactctaagcttcacctgagatctgacattgtcggtgtcaaattgctgtacatttgagggcacgtgctcgggagctcatgcaaggcgtaaatcttattgcaagaagggcagctgtgcatgttaagtctcaaatatagactcacttgataacactgcatgagaggttgaaaacttgaggtacagttgatattctggttcagagtatgggttcaaggtttgcatcacatcagctgagcaatggcctgtatgtttctggtcgacctgagcaacctaaggagaaggccccaaccatttgttccactgcgatgccatatactgggggtgacatcaagaagtctggagagcttgggaagatgtttgatctccatgttgagaaatcaagaaaatctggtcctctaggaaacgctccttcaaggaatacttcatttggaggcactgcttccaattctgggcctgtctccaatgctggtggtcggtccaactactctggttccctttcatcttcagttcctggtgctggtggatcagccagagcgaaatcaaactccggaccactcaataagcatggagagccaacaaagaggtcatctggtccccagtctggaggagtaaccccaatggcacgccagaattctggcccccttcctcctgtgcttccgacaactgggcttatcacatctgggcctatctcttcagggccacttaattcgtctggtgctccaaggaaagtatctgggccacttgattctgctgcatcgatgaaaatgcgggctacttcctttgctcacaatcaagctgttactaatctgaacactgaagatggttactcaattcagggaagctttccgaagccaatactctgggctgtgattttgctctttgtgatgggttttatagcaggtggcttcattttgggggctgttcacaatgcaattttgctgatagttgttgtggtcatatttggttttgttgctgcacttcttatctggaatgcttgctggggtagcagaggtggaattgggtttgttagtcgctaccctgatgctgatctcagaacggccaaagatggacaatatgtaaaggttacaggggttgttacttgtggaaatttccccctcgaatcctcgttccaaagggttccaagatgcgtatacacttctactggcttgtatgagtacaggggttgggattccaaagctgccaataccgaacatcggcgttttacatggggtttacgttcaatggagattttcagtccgggcttcgagcattggtgaaaacaggatatggtgcacgtgtgaccccatacgttgatgaatctgttataattgacatcgatccagacaacaaggatatgtcccctgaatttttgagatggctaagagagagaaacctttcaagcgatgatcggacaatgcgcctaaaagaaggatacatcaaggaaggtagcactgtaagtgtgatgggggttgtccaaaggaacgacaacgttctgatgattgttcctccatcagagcccatctcaactggttgtcagtgggccaagtgcgttctcccgaccaaccttgacgggcttgttttaagatgcgaagatacttcgaacattgatgtggtgccagtttaattagcggtgaagagtcgttgccaaagaaagtgtctgttaaatatgagtctgaattgtttcatgcaatgttagttgacaaaaatgtgcaaatgttgggtgtgattatggcaggtggagggtggttcgttaagctggcttttggatgtatagtttctttttcttttagttgtgttttgtcatttctttttaattttcagctccgagatctgaaacttgtgtaaccagatgcctcttaatctaaatcagcgtggcatttagatcgatttgaaagcttacaggtgacaggacttcggatgtacattcttccccttttattgtgttgtcatttattttcttttttaatttcaactcagatctaaaacttgtattcagatacatgaagcagatggtttgc

SEQ ID NO: 33311 - DNA, 8758 bp, Zea Mays
atttttatcaacatataccctaggtatcgggtcgtggatacccgttggcatctctatccagaagagacccaattgcccagggccgccgccgcgccgacctcgccgtcgcgcgctttgcttctcttgcccccctgcccgtggcctccgccccaattccagcgggacagcctcgatgagccgccaggatcgtcaccagtggcctcgccctaaccacggatacgaccctcgcgccgccgccgccgccgcgcaatggtatggcgccgcttcgatgctgtttcccgaccccggcgcggcggcgctgcacgggataaacccctacggcttcgcccctaaccctttcttcaataacttcctcccccagaactccgctgccctagctgcctaccaactgcagcagcagcaggctcatcacttcgcctcccatgcctaccaccaagcccctaccggtaacaccatgcaccgctctaccaaacccgccgccgctgccaaacctgcgccgccaccgggcaaccagcaggccgtgctggaccgggctcaagaggcggcgaggaaggctcgggaggagctcgtgaagggtggggacggcgtcacggcgtggaaggtggcgcaggcggtgctggtggcgctcaaggctgattcgtgggactccctcggcgtccagccccaggatgtgcctctcctgcgggatctcttcctaatcgagggcaaggtgaacgcattcatccattgctatgttgcagcaagaaaaattgtaacggtttatgatctggaggttgagatatgcaagaatgagggggttgtgcaatttgaagagctgggattgggacctttccttcagcacccgcttgttgcacattattttttagtgccagctgatttgtctgtggtgcctaagctttgtagcgaggaaattatcaataccctgctgaaatttgtggacaaatctaagaaaaaaatcacaattgaagattttttgaaccatcttgcagagaaaaaatcagtctctgggaaggaaaaacttggtgtgcgggtacaaagcttggggttgcatatttccttactacgacaggccaagcaaacagaagtgtctgctgcgaagcttcgagcaaatatgagtggatctggtaatagtagtcaggagaaggatttgttgaaaaatgcaagtttccatactcacaagaaggctttggacaagaggttcatttctttaactaatcgtataaaagagttaccaggcatcaataagcatatccattttgattcgaccgatgatgaaactaatagttgtactggttctgaggatggtaaatctgatggcaatgagaatgagaatgaatgttctattcttgacaaaaaggatggtgataagcgtgtgaatagctgcccatatccgtcaaaaactgaagaactggaaaggcttggtttgaaatctgaaattaataaaaggcaatctttagagaatagcaagccaagagacagtgggaaaaaggggaaagtaagtgaaaaaagaaaatatgaagaaatcgggagtcctagctgttcgttcaagcagcctaagaagcagcaaaagttgcaaaaacatgaagcatcaccgaaatgtttcctaagtataggtaagctggaaaattttgtaacaacatggaaggaaacatgtcgtgaacatccagttcaacaggttttggaaatgttagcaaattactatgggagaacgatatcagggaagaggagaattagaaatttcttctcacagtacccaggcattggccttctcaatgttgctgttaaatcaatgggatgtggtctgctggatagcatttacgatgtgatacagcttgctgatgagaatgatgtagcttcaagccctcctcctaacaccaccactgaagttatggaaattgagcctccaagtaaagaaaatacaggtagcactaatggagcccatgagaagagtgaagacaacatgactgcacatggtgttgctattgatgatgtcatcaggaggatttcagaatatattgaatccaacagtaaaatctctggtgatgtggctttgcaagtgagggcacttaatgattgtgaaacatgggtaactactcaattttcagcaaatcaattcagtgctcttggccatgggacattccttgagtttttggacaaacattgtcaccagttccgaactgctttgagtagtttctttaaggagggtccttctaattcttcatctctggaagtttctgtactgcagcagcaaattgaatttttactctgtcaagctgagagtaattggctggaagatagtgacttttcagaggatagttttgttatgcttcttaaaaagcaatttccaacaataagctttaatattgtgcaagacaaatctgatggtggagtttctggctttattgaggggcagaagaaagacatacggacatatagtttaaaattttccatctctttgttggagaaacgatggtctggaactttgccaagtagacatgggaatgttgatgaactggggaacattgtcgctgaacaatcttgttaccataccacagtttgctcacgagaggcaattaattgtttactgagggctcctatgctgtctgatctgcatctttggtcccattgggattcgctatttgctcctacactgggctcctttgtacattggttgctgaatactggtccaattcaagagctcgcatgcattgcgaccacagatgacagaaatgcattcttctgccaagcttgcaacacctgcctctgtgggagccacccatgaagattctaacatgcatatttctagtgatgttaatatgatggataagagaaaacaattgtttcctgtcataaatgatcgggctggtatagataaggaagacaataagatgttaaatcctgctggaactgaggcagatgttgcagaactacatactaccagcagatcttctatgatggaagaaacaagtcttgaggaagcatctcttgttattgagactatacgccgtgaagagtttggtctggatcaggcactaagtgacactgagaatagcttgttaaagaagcagcatgctcgacttggcagagcattgcattgcctttcacaagaattatattcccaggattctcatctacttcttgagctggtacagaatgctgacgacaatacatatcctgaggatgttgaagcaacattagcattcattctccaagaggatggtattgctgttctaaacaatgagaggggcttctctgctgagaacattagagcactctgtgatattggtaactcgacaaagaaaggatcaaaccagggttatattggaaataaaggcattggatttaaatcagttttccgggtaactgatgctccggagatccattcaaatggtttccatgtgaaatttgatatcacagatggccagattggttttgtgttgccaactgcagttccaccttacagtaccacttcttttagtagaatgttatccgttgaagatgacaaggatgcccattcattgtggaacacttgcattttacttcccttcagatcaaaatttagggagtgcactggtatgtgctccattgtgtctttgttttcagatctgcacccatctctactgctgttccttcatcgactaaaatgtatcaagtttaagaatttgtttgatgacacacttctgattatgagaagggagattcttggtgatggtattgtgagaatctcgcatgggattgagacaatgagttggttggtggtcagtaagaggctacaaggtaccattgtgcggcatgatgtgtgcaccacagagatagctgtggcgtttactttgcagcagactgaggaaggagattatgaaccttatttgaagcagcaacctgtgtttgcttttcttcctctaaggaattacggtcttaaattcattcttcaaggagattttgttttaccatcttccagagaggaagtggatgcggatagtgcatggaatcagtggttgttgtctgaattcccttctttgtttgtaagtgcccaagaatctttttgtgctcttccctgttttcagaggtgccctggaaaagctgtcacagccttcttgagttttattcctctagcaggagaggttcatggattcttcagccagcttccacacttgatcctttccaagttgcgtctgacccgctgcatgtttttggatggctctactgtgcaatgggtctatccatgcaacacacttaggggttgggatgaacaaactaaaatgttattttcagaaggcttacttcatgaacatcttggtcttggttacctctcaaaaaatattgttatatctgataagttatcaagagccctaggtattcatgactatggaccaaacattttgctagatgccatctcatctatttgccgaattgatggttgtattgagtcattgggcctggaatggctttgtgcttggtttgttaacctttatctgacattgctgtctcattcttctcaaaatgtttcctcagcaagaaacctcgaagacattcttttggataaagttaggaaaataccatgcatcccactttcagatggttcatttacctctatttcagatggtcgtatatggttgccatatgatgttgccagttccattcctgaatgcagtagcattccgaattttccagctctatatggtaatcttcgaactgtaagtccaaaccttctctctgcatgctgcaaaaataaatacctcatggaggaagtcagaataaatgatctggcagacatgctccaaaggatcggggtgcggaagttgtctgggcatgacattgttaaaaatcacatcatggtgtccttgcgtaacggtttagatgctaatgtggctgatatagtgattagagagtatgtgagctttattatggttcatcttcagtcttcttgcaccagctgtaactttgaaagaggagagatagtgtcagaactacggaagagtcctatcttccttacaaaccatggatacaagagcccagctgatgaaccaattcacttcagtaaagattatggaaattccgtggatgttactagactgcttcagaatgtagaaataagttggattgaacttgatagtagctatttgcagcatcatggttcacagtcgtcatcatttgcacgggaaaaatggaggcaattttttgaagaaatgggtgtgactgattttgtgcaggtagtgaaagttgaaaaaactttatcccaagttgattctattctagcaggaggactttctctagctgatgtatctacaaaacaatgtacagtgtatgactgggagtcaccagaattatctagaattttatcaatattttcttcaaaaagatgcaaggaaaattgtgtatatcttctggaagttcttgatagattctgggatgatcattatagtgcaaaatctaggatcttcacagatgctacacattgtggtgaaaacagagcagttgaatcatcatttatgaagtgcattcaaagcttcaaatggatagcatcaagaatggatgaggatcttcattatgcaacagatttattctatgattgtgaaaatgtccgctctctttttggtagtgtggctccatatgctgtaccgcaggtatctagcagttcacttaagaaggccattggattcaaaacagaggtatcttactgtgatgcattgatggtcctgaagtcttggataacgtcaaaggttccctttagagcaaggcgtggcagacgcaaagattgacattaaacgggagttcatgtcgtctccttctatatttacaccactacagcgtcctcgggcaagtgaggttattcctggaaggtttttggcgccagaagacctctattggcatgacccaacaggatgttctgaaataacagaggatttcgttgcaacgaaaaacagaagtatgttcccaagaaaaatgctgtctgcagcctatccaaacctttatgaattatttactctgacatgcggtgtaccaaaggccccaacaacatcaaattatgttgagatgctgctacggttgtcaaccattgcattgccttcacaggcaggaaaccatgtcttttgtgtatttgtgagatgggccaagtgtatgcattctgaaagtgacaagatgaatgatatattgtacttgaaagaatcccttcagaaattagaaacaacaatattgcccacctcagccgataaatgggtctctctacatccttcttttggccttgtttgctgggtagatgatgatgagctaaagcaacagtttgttaactctaatgatgtttacttcatacaatttggcgacctttcttctgaggataagcaaatgttgtatggaagagttgctgctttaatgaaaagcttaggcatccaagcactttcaaaggttgtgtatcgtgaagcaatattttatggtacatcagagaacagagaaaaggtttccttgatttgttggctgttgccatacatgcaacgttacatctataagatgcatagagatacttatatcaacttccagaaaaacgacatcatgaagattagcaacctgcaagtagtagttgttgacaagttattccacaagtatgtactgaggggactcgagagttcttctaagaaaagattccaatgtcattgtcttttgcagggagatactctatatgcaacacaagaggctgactcacattcagtatttttggagctttctagaattttctttgatggatcccatgatcttcattttgcaaattttctacacatgatcaaaaccatggccgaatctggcactcatgctgagcaaatagagacttttatcgttaataatcagaatgtgcctgagttacctgagcatgaagctatctggtccttctcttccttgtctgcagccaaacatggttcagcgaaccaaggtggtgctgatacccagggggttgatttccaacctgtccatgaatttagtattcccaatcatcagaaggcacaggtgatggtttctagttggcctctaaactattggagaacagcacccgtcttcagaacacctctcataaaccagcatgcaagcatgcaagaggcaaaggtgaatgatgctggaccttcatcaaacttaaacatgcctgctatgtatggacacaccgaagatagtttgctttctgctgatcttgaaagggattggattatagaagagaatccaagaactgaaactacattgtttggagatagttcatcggaaatccttgatgagcctcagatggtgatgtctgctgaacctttccatgcacctgcttatttgaacttggaggctggaaattcaagcccaacggttcatgtcgagctaacaaattccgatgagaaactggccaatcttgcagaagacaagaatcggcgactttcagatgcaagccagttaagaacaggttcaaacccaatggttgatgttgagctaacaaatttcgatgagaaactggccaatcttgcagaaggcaagaatcagcgactttcagatgcaagccagttaagaacaggttcaaacccaatggttgatgttgagctaacaaatttcgatgagaaactggccattcttgcagaagacaagaatcagcgactttcagatgcaaaccagttaagaacagggaggcttggtgaagaactggtcgagaaatatttggccaaacagctaggttccaacaatgttaggtgggtgaacaacagaattgaaaccggactgccttatgatattgttataacacacccagagggtttcacagagtatgtggaggttaaaacaactgtatcttcaagaaaagattggtttgacgtctcagcaagggaatggcagtttgccttggagaaaggggattcatttagcattgctcgtgtcatcttaggtacaaagaaagcaagtatagaaatgttgaaaaacccacacaagctttgtaagcagaaagcattgcggcttgctctcctgatatccagatcggcagcaacctagactaaaatgtcggttttgttgaggctagcaccgatcatccttctgcagattgttatgattactctgactaataatcaacatgaactggagtgagcatctgcatcttgataggtatttgctgatccaagttagcagattcttctttttggagagagatggggtaccgggtacggcatgagtgcaagacaacatacagttgagccgctctatagtaggctcctctttctattattctaactcgggtaatcttctccaatggcggctctctaccatgtctcttgttacatacaacttacgctctgcctttgtaacccattctggtattttgttgcataatgtatgtgattttgtcattagatttgtttttcaatttctgccctagacatcgtcccataggttgattgtgtaactaaacatgaaactgtacataaatggatggaatttgattttaccatgtacatgaaatttgattttgcgtgcggcggctgcctggtctgtgcgttctggtctctgtgcgcagggcgcggcatctgcccggcagcctgctcgccggctgctcggtgagaaaattggctagttgggtactggttttttttttcaattgataaaaaaacaggatctgatggagccttttcatttttgttttactttccgtctcttttatcagcagttgaaaggcgatcacttattctcaatttggtggaatctcctttatcagtaattgatagttgaaaggtggtgacttgttttcaat

SEQ ID NO: 33312 - DNA, 3626 bp, Zea Mays
tctgaagcggcgcgacatgcttggggttctgaacgcatgggctcgcgcgcgcgcccgcccatttgcttgcgttgacctcttcccaccaccacccagcactccggccgcggaagccgcgctggggaggcggttggtgtggtgccccgccggcttagattgatgaatcacagcgcggctcggtcgcgtggactcgacctcgtcgcctttagtacaagttgcgtcctgcgggacatagctctcgtcctccgtttcctagccttgccagtttccacgacagagagagagagagcgagaggaggaaagaagagtcatcgcagacagaagagggtgctccagcgtgcatctcgtcgcccgccgtcggcgtgattgcttggcagcaggatggaggaggccacgcggcgccgtatcacgccgacgacgacgctgctgctggccctggcggtgctggcggcgagcgttcccgccggcttctgcgccatcaaccctcaggacgcttctgctctcaacgccatccagagccaatggacgaacgcccccttgagctggtcctcggcgagcgacccctgcgacgggggctgggacggaatcatgtgcagcaacggcagggtcacgtcgctgcggctgtcaagtgtcaacatccagggcacgctcagcgacagcgtcggacagctcacccagctcatgtacctggacgtttccttcaacctcggtctcaacggccgaatgcccgctacaatcgggaacctggcgcagctcaccacgctgatcctggcaggctgtagcttcaccggagccatcccacagcaactcggcaacctgcagcagctctcgttcctggcgttgaattcgaacaagtttaccggcacaataccccctacgctgggtctactctcgaacctcttctggctggatctggctgacaatcagctcactggatctatcccggtctccacagcaacaacgccggggctcgaccaacttacccacacgaagcacttccacttcaacaagaaccagctgtctggaacactcacaggcctcttcaactccaacatgagcctgatccacatactgttcgacagcaatcaactgactggcccgataccagaggagctagggggcatttcatcgctccaagttctccgactagataggaacagccttaagggaacgattcctcctaacatcagcaacttggtcaatctgaacgagctgaacttggccagcaaccagctcactggaccgttgccagatctaagcagcatgaccaaattgaatgtcgtggatttaagcaacaactccttcgccgtttcagcagccccaaactggttcacaactttaacatctctaacctccgtatcaatatcttctggaaagctttctggcgctgtccctaagggtctcttcaggttgccccagctgcagcaagttgtgctgagcaacaacgagttcaacgggacacttgaggtcacaggcaacatcagcagtcagcttcaggctatcaatctcatgaataacggcattgctgctgccaatgtcaccccaagctacaacaagactctagtgctactagggaacccgggctgcgtggacccagagttgaaagtcttctgcagcctcaagcaggagagaatgatagcgtacaacaccagcctggccaagtgctcctctacggcctcgtgttccagtgaccagcgcctgaaccctgcaaactgcggctgcgcatacccctacgccgggaagatggtattcagagcgccgctcttcacggacctgacgaacagcgccacctttcagcagctggaggcgagcttcacgacgcagttgtctctccgcgatggctccgtgttcctctccgacatccacttcaatagcgacaactacctccagattcaggtggcgcttttcccgtcgtctggggtgtccttcagcgtggcggatctgatacggataggcttcgatctgagcaaccagacttacaaaccaccgtcgaattttggaccctattacttcattgcagatccatacgctcttttggcaggtgcttcttctcgtggcagtaaaaaatcacatatcagcactggcgctatcgctggaattgcggtagccggtggaattcttgtgattgccctcattggcatggtattatttgcgttgcgacagaaaagaagggtcaaggaagtgacaggacgaaccgaccctttcgtttcatggggagtttcccagaaagacagtggaggggctccacagcttaaaggagcaaggttgttctctctgaatgagctgaagaactgcaccaacaatttttcggacacccatgagataggctcaggaggctatggaaaggtgtacaagggaacactcgttgatggaacgcgggttgccataaagagagcagagcgcggatcaatgcaaggtgtggtggagttcaagaacgagatcgagctgctgtccagggttcatcacaggaacctggtgagcctgattggcttctgctacgaacaaggggagcagatgctggtgtacgagtacgtctccagcggaacgctgagagagaacttactagtgagaggaacgtacctggactggaagaagaggctcaggatcgcgctcgggtcagcgaggggacttgcgtaccttcacgagctcgccgatccgcctatcatccaccgggacgtcaagtccaccaatatcctcctcgacgaccacctcaaagccaaggtcgccgacttcggcctctccaagctcgtcgcggacacccagaagggccacgtctccacgcaagtgaaaggaacgctgggttacttggatccggagtactacatgacgcagcagctgtcggagaagagcgacgtgtacagcttcggggtggtgatgctggagctggtgagcgggcggcagccgatcgagagcggcaagtacatcgtgcgcgaggtcaagctggccatcgaccccaacgaccgcgaccactacgggctgcggggcctcctggacccggcgatccgggacaacgcgcgcaccgccgggttcaggcggttcgtgcagctggcgatgctgtgcgtggacgagtcggcggcggcgcggccggccatgggcgaggtggtgaaggacatcgaggccatgctgcagaacgaggtctccgggcccgacggggccaccagctccgccggctcctccgccaacgacttcgacggcgccggcggcggagcgaggtcgcacccgtacagcgacgtcgagatcacgagaggctcgtacggggacaacgcgtcggactacatgccgtacttcgaggtcaagcctaagtagaccttccagtttcagacttgtatagcttgtgagatacattgtatagatttgtattatatttcacgtttatattttttggtttctcgagcttaatttttaccatgctacttccgatctatcatgacgcaaactgtacattcctcgaaattttccaagataagttgttctgttcttatttagaagtcagattttctctcaccgtttcaaacttatggactagtttggaaactccattttccttatatgaccagtgatttcccagttcaaattgctatattttgggttcatgaatgattggcaaaggcagtggccgattcaca

SEQ ID NO: 33313 - DNA, 791 bp, Zea Mays
cctcctcatatatatgttggtcgtcgtcatcctagaagcgcaagcctagctggtgcactcacgtctctccacacaccactgctaagactgccggcgagtcctccggccggttatacacaccgcggtttttggtcgtcgtcacaaacccaaccgtcagccatggcccggatcttcctctgcatgagcttggcggcggcgtgctgctgcttctccattgcgctgcttccaccgccggcgcagggccgtcctgggctgccagccggcggccgcataaatcatctgccagagccaaccacagagccggccgcggcggcggagcaggagcagcagcagcgcggcgtgcaggtgaggaagacgaggccggcatggtcgccagcggcggcggcggaggggagcgtgaggccggagatgcgggcggtgcccggggggccagacccgctgcaccaccacggcggcagccccagcaggcggcctgcagcagggacgcacccggtgacccggccggccggccagccggcatggctaggctagctgcgcgcctgcgtccgcatgcacgctcacctcttgtgcatgggcagcatggctgccggcgttgggagactccgtgtggccgcgcgtctcgcctgcacgttactggtgtctggtgaataatggctatagagatcgagttagggtgcgcatggcgcctggttcagggcggtttggtatatgtacctgggtatgtacaaatggcctggaagtggcggatccaagaatttatgacagggaatatttttagaaaatagcaaaac

SEQ ID NO: 33314 - DNA, 2562 bp, Zea Mays
gtctgcttcccttgctcgccccgtcgccgctcctcgctctctctttactccaactgctcccactcgctccccaaccacctcccacctctgtctccactccatctccacacgtggccgcgctgaaagcggcggtgcgtgcccgggcagccaagcaccagcgccgcgccatggctccgtgaattcgctcgcccgccgcgatcaagccagggttgatagttactcagttgcgggtttggcgcgagctcggtgccaccgcttagacttggccatgacgaggcactgtgctgaggcggcggcggcgacggcgccgagcctcctccgagtcctccttgccttgcactgcggggtgctgttcctgcaatgctcggcagcatctgccatgggcggcgacgtgtcggcgctcatggcattcaagcgcgccatcatcgaggaccctcactccgtgctctcggactggactgacgcggacggcaacgcctgcgactggcgcggcgtcatctgctccgcgccccagggctctgtcatttccctgaagctgtcaaactcatctctcaagggattcatcgcacctgaacttgggcggcttagtttcttgcaagagctgtatttggaccataacctgctctttggtacaattccaaaactaattggctcactgaagaacctgagggttctggacttgagcgtcaatcgactcactggaccgatcccttccgaattaggtggcttgagcagtgtgagcatagtaaatttccattccaatgggttgactgggaatataccgtcggagctgggaaaattacagaatctcgtcgaacttaggttggataggaatagattgaagggatcaattccaggaagcaatactgccagtttttctcctgcttcaaatattggatccacagctcacaatggactatgcccttcttcccgattatatgttgcggatttttcttacaactttcttgtcggaaaaattccatcctgcttgaaatatcttccaaggtcaagtttccaagggaactgcttccaggatgagtactctgtccaacaacgacctttgcaaatttgtacaagtggttctactggccagcaaggtgtcatatacggatccaaacatcctggccataaacatgaaaaaatggagcaaccaatttggcttcttgctttagaaatcgcaactggtgttcttctggttgtttttgtgattactggtatagttactgcttccagaagttgcaagctgaagccttctataagaatatcatcatggaatcgatcgaaaagttggagcgacgagataacagtgttgattgattctgatatgctgaaaagtctaccaaaattaagtcgccaggagcttgaagtggcctgtgaggattttagcaacatcattggctcaactccagagacggtagtctacaaaggaaccatgaaggatggacctgaagtttctgtgatatcgttgtgcgccttcgaaggtcattggactagccaccatgaactcttttaccaaaacaaggtcattgatctggcaagattgaatcatgagaacatagcaaagttcttagggtactgcagggagagtgatccattctctcggatgctagtcttcgagtacgcaccaaatgggacgttatttgagcatctacatatggagagggaggccaattttcttggctcaggcgaatgaagatagccattggaattgcccaggggttaagatacctgcacacggagctgcagcccccatttgctatatctgagctgaattcgaactccgtgtatgttacggaagattttactccaaagctggtggattttgaatgctggaaaatgatgttctcgagacactccatctcgagagacgagaaggctcgtgggcacttgaacagcaaatcctcttttcccggccacggggattctgcagcggatagacaagccgatgatatccaggccaacaccttcgctttcggagtgattttactggagatcatcagcgggcggcttccatactgcaaggataaaggctatttggtcgactgggcgagcaagtacctccagcaggcagaggagatcgggaagctggtggacccggagctgggcagcgtgcggagcgaggacctggcggtgctgtgcagcgtggtgagccggtgcatcgacccggacccgtcgaagcggccgtcgatgcagatcatcacgggcgtgctggagaacgggatcgacctgtcggcggccgccatcctcaaggagtcgtcgctggcgtgggccgagctcgccctcgccttgtgacacgctctactcccaccacctttgtgaatccatacggctgctgattgatttccttgactggcgtagggtttgctgccggtctcaactgagcagccgtttcgtatgaatgaatgaaacctgaaaggccatatgtatgttcttttcatccatccgttcgttctacacatccatcccgcacagatcatttgttttttttttttttgctccaatctattttaggttcagaaaacagtgtcggcaaaagaattatccggtaaaacgacagacgcc

SEQ ID NO: 33315 - DNA, 2006 bp, Zea Mays
atgtccgtttcgctttcccgtcgccaggttcggttgctcagccaccagtccgactcccctccatcaggaacccatcccctgctgctaccggtgacgggcttgtacaagcgagaaggaattatctgccgaccatttttcaccacactgctgggcattaaggatatgaaggccgtcccacttcctcgcccgagggcagccacgagaaggcgcgcgtggatgctcgccgttgcagcttttatcttcgtcgcactagtctgggcttatctctttcatgttcttgactccggggacactgccatttgaaaggttgtgggaaaagttctttgagggccatgagggaaggtataccatatatgttcatgcctcaagagagaagccagaacatgtcagtcccatatttgttggtcgagagatacacagtgaaaaggtaacttggggtacaatttctatggttgatgctgagaggaggttgctggcaaatgctctacaagacatggacaatcagcattttattttgctatctgatagttgtgtacctttgcacaattttgactatgtatatgactacctgatgggtgcaaatctcagttttattgactgcttttatgatcctggaccgcatggaaattttagatattcaaagaatatgttacctgaggtcacagaggctgattttaggaagggttcacagtggttctcagttaagcgccaacatgcgttgatgatcattgcagatagtctttactataccaagttcaagcttcattgcagacctgggatggaagatggtcgcaactgctatgctgatgaacattatttgccaacagtattccatatgatggacccagatggaattgctaattggtctgtaacccatgttgactggtctgaagggaagtggcacccgaaagcttacagggcaaaggatgtcactttcgagcttctgaagaatataacatcaattgacataagtcaccatgtcactagtgatagcaagaaagtggttacagagaaggcctgcctatggaatgaaacaaagagaccatgctacctgtttgcgagaaagttctaccctgagtccataaacaatctcttgaccttgttcgcgaattatacacttatttgagcttctaggtggcgcttagaggctacacaggaaacattttgttatacaaaaccttgtacattggatagcaacagagtaggacattaattaacagaatagcaatagctattgaatgggaggttgtgtactgctcggtgccaacctcgccgggagggctctaccggacgccccttggccgcctggtattcaaaaccgacgagatggtccaggcggtggaagcgcctgacgtggtcaggaacaaggtgtcgttctccgtctttggcctagagggcgcagtgtcattgaaaggtaagctgaatgtgctggacagtaaatggattcaggtcgtgttcgaagcaccagaactgaaggtcggctccttggggtttcagtacggtggcgagagcgaagtcaagctggagatcacctatgtcgatgagaagatcaggctagggagagggtccagaggctcgcttttcgtcttccttagacgatgatagaatggcatgcatgtgtgttgagacttcagacccacaagcaccgatgaggggtggcgctgacgcggtcgtttgtacaatactgtgttcaggacttctatacgtttatgtaaaaattctggcgtccagctgggtaattctggcgtttcagtacggtggcctgatgaatgttgttgtgtagtttgtagcatccattattagtgctgtaagatgatgttttgaattctgatacaccagtgcgagtgtgatgaaccaaattcatacgacacgtttggaccatagaaatgcagagtactgttatgggatggagtaggacgaatctgcaggaatcatcagctcagctcgtgtcggatcctaggagtgtaggatctatgaatctatcgatgcagcctccagagatttcg

SEQ ID NO: 33316 - DNA, 270 bp, Zea Mays
acgtacacagcgattacataaatgactcgtcatagcacaatgcttcgaataacaataaagataagtaataatatgaaagactagagtcatttacataatataatcaaagtacacagaacagaaacgtagccaacgtaaacaacccaccacatgcaactgactgggggaggtcgctagcctaatcctcgaactcgccgaagtcctggaactcccggagatccacctcgacgccttcttctttacctgagcatagatcgcaccaaaggcaat

SEQ ID NO: 33317 - DNA, 1969 bp, Zea Mays
cctgtccccgcctctgccaacgctcctgccccgcacacccacccgccgctcccgcgttgtccgcccccgtcatgaattgccctcttccatgtgcaccacagaaatctcggcgcgagatccccccgaaacctcgccataccctactgcgaggcgtaccattcggcagcgaggccctccttggcgggaacggcgtggtagtcatggaggctaagacgctccacctcgacgtgtgcgttgaaccacacgctgtgcttgtccttgcataacctggtgaggatttggccgcatcgtcccgctgagcatcacgtgcgacggcaggccctgctgctcccaggtgtcggtgcgagataggagagcgcgaacctggccgagctccatgtgaggcagtcccagggcacacgggcctcgcggtggcccaaggacgtcgggcggaagtcgcgccgagctacttccctgtctacgccaaggacgcccaacgcagagaagaggatgcccaccagcgacgtcccgtgctgcgaccgccacgcgaagaaggctgacggcatgccccgctccgatatgcccaacagctgggaccgggaaaaagacatgggacaaatagaagacatctaaagctttccaaggcagatgcctccagaggatatctactctctggtcatatgatcgatgcatagatcacttcagacaatcaaataacagtagtatacatagaaatgcaacatgtaagtatttcctttatatgtctaacagtagtttacaaatatattccacatataaccatattagcttaattgatctatgtataaattatgattattagaataaattttaattccaaatatccaaacatggcctaaataaatactgaattggacattgtatttaaatagacaacagggaacaagagcatatcaccagacacacactagaactcataaaacagggatactatgctattagtctctcttaaatgcagtacatggaagcaaggtttatgatcagatttttgtataccagagaacactcaagtctcccaactgcccgcctgccgaggtgagctccgaatgcctgccctccacctctgatccgtgttgcggcttcgctcctgtgtggagcaagttaattttttttaacatgcctcaacatagatgtcgtccaattacgactgaagcaaaaaaatattgcaaggctaaacactcgggtcaattgctatgtctgggttggatgtggctccaccagctctgcctccctacttcctctactgctgcggctactgctacatcatctatcgtgcctgtttttctaggaatcttaatggcatcaggctggcattttgttcaactcattagctggttacagtaacaaggaaccaccattttaatgcaaaggagcagatgcgacaggatcacaagtaggaggagcggcgacgatgctgtagcgagagacacgggtgccaaggtcgttgtgctgcggtggtggcaggacaggaaggaaacgaaaaagcaggagccagggctgttcaacaacgtgaccgagtcgctgaggcgaggaagagtaaggtgaaggcactcgtcgacgcctttgagactgacagagcgtcatctcgctgcaggaaaccagcaagcctgctgctgctccagctatgaaagtaggtgtcgtgccatgagtgcttcttgacctgcagtgtgcatgatcacctttcttggaatttttggtcttttttggttgttagtgaccgtaaaagtggcgcttgttgaggtttgctcgttcccatgtaaactgagttttctcatgggagtttccatacttttgtagtgctagaaaaaaggaaagtctgtacaggttttgtgtctatgcaaggcttgagaagttggcattgtactgataagtgataagtaaacaagttattgtaatgatttaaactagattgttttgaaaggaaatggaatgcataaagcaaattaaactt

SEQ ID NO: 33318 - DNA, 1775 bp, Zea Mays
ttttcccttctcgaggacgaggacacacgcacacacggaagaagccactagctctccgcagtccgctctcgcctctcggccttctccttgtgccgccgaacaccctcacaagagtcggcctctcgatttctcagtccagcctcagcagtccccttccctccctccatcaggtgttgcctcccgcagatccaaatcggaattcggtccttcgtccccaaaccaccaatccgggaagtgaagtgatgggggagtgcgaggacggcaaggagtacaggtgctgggaggagctgctgccggacgcgctgggcctcatcttccgcaacctgccgctgcaggaggtgctcaccgtcctgccgcgggtgtgcaagtcctgggggcgggtggtggccggcccctactgctggcaggagatcgacatcgaggagtggagccagcagcagggcaagccggagcagatcgcccgcatggtcgagctactcgtgggccgcagcgccggctcgtgccgccggatcagcgtctccggcctgccctgcgatccgcgcttctccttcatcggagacaagtaattctgaaacctgagcgatgcttcttgctgtttttgatcgattcctgtggcaagtgaatttttttctgcaattttttttttttgcgtggagtgttagattagaattatacgctcattctaagcctcgccgtcaggtttaagccgtgatgggggtgtttgcttgcagatctgctgagaaccgcacgagctctccggaccttggagatccccaggagcgagatcagcgactccatggtggaatccgtggcgccgcggctgccgaacgtcactttcctcgacatcagcagctgcacgaagatgggggcccgcggcctggaggcgttcggcaagcactgcaagtccctggcggggctgcggcgggtgatgcacccgatcgacctggcggacagggcgtgccagcacgacgaggcgcacgccatcgcgtgcagcatgcccaggctgcggcacctggagatggggtacatgctggtggcgacggaggcggtggcggagatcctggggcggtgccgcgagctcaggttcctggacctgcgcggctgctgggcggtggacgacaagctcctgccgcgcgaccgccacccggggctgcgcgtcctgggaccccgcgtcgacgactgctacgagaacagctactgggaggagtgctccgacgactactcggacgactcctccatctactcgtgggagctcatggacgacgtcgacgacgactacgactacgccgccggcagcgacgacgacgacgacgaggccgtctgggacgacgacggccagggcctggagaacctggaggtcaggttctacggcggtggcttcggcgagaccttcgccggcttcgactggccgccgtcgccgtgacatgacacctgctgcctgcgcttgcgttgcttgcgtgggtgggtgagcctttgtgtgttgtccccaagctttggaagcttgctgtgctgctgtagtactgtgcctgcgacatcactcgatcttcctctacctcgcagatatgccatatgtgaagcgaactgctagtggtgcaatctaaaatgtagacgctggtgtttacatgaagcaatccccatcagcatgcaccggtgagattccaccggtgccaatccccatccatcctacctactactagtcatagagagcggggcagggtacccctgtctcctgatggcttctttaatgtcatgcgagcaaacatggcagtgcaagg

SEQ ID NO: 33319 - DNA, 1253 bp, Zea Mays
gtctaagtttatcgttcgaattgaagaactaacgttagacaaaaaagttaggcaaagtatgataagttaggcagcgaaccaaacaggcttactattctctatagtttaaatgcctttcgaaacaaaaaaataaataaatactaaatatgtttaaaataacttgatatagagttatactttaatcttatgtattatctctttttattaaaaaaaatatggcgtatcctcgccatggatggcttcacgggcgcgcacgcttcttccttctcgtgtcatctccgcttgcgccgcccctagccccaccatcgtcctccccatgaagccgccggttgagccgccccctcttgtgtcgcctccatgtccgcgcagatatgcctcgctcgccaccccgccgtgttcctccccgagacaccgtggccagcctctagcccgcgctcttcctcgtcacggcgatgtcggcttcccggaccccttccggcttgcttccatgccttcgcttcggtttgttcgggcgcaggagaggctacacttcctctatgagtcgaggttggccgtcggcaagagctccgaagggttccaggcgctgcagcaatctacaccagggccagcttcgcgtctacttctgcacagatgagtgcggctaattgttccaagtttaagcttcacctctagtcatgggtaaagagaagtcacatttcaacattgtggttattggccatgtcgactctggcaagtcgaccaccactggccacctgatctacaagcttggaggcattgacaagtgtgtgatcgagaggttcaggatcttcaggttgagcttgagaatgagaagcaagaaaaaacaaaactttgacaagtgttggataacttgaagacggaatcagaaacttcaagggtaaaacattatgaggaaatagaagttgtaaagatgacatcacaagaaatgcacgtcctcctttgttaaatgctaaaattcaaccagggccagcacaatctaaggccataaagtttctaagcccccaacagtgaattattctagtatgtttcttctttgaaaattggttgttggttgaactatgtcgggttgttctatcaatagttggttgctagtttttcacaagtaggacttagtggctccaagtttgttgatttttgttactagtagccttaagttttgttgaacaatgttgcttcttgctagatgtattgtgacctatgaattggaatttgtctgccacaattttggtcaagaa

SEQ ID NO: 33320 - DNA, 917 bp, Zea Mays
gcaacttctgtgccccttgatgaaatttcaaaaaccatcacactgcattttacttctacaaatgtagatactgttgaattctaaacaatggaaaagcaatagtagcattcagtactaaaaagtgtcctctaacaaaacatccaagcacattaaccatgcgttcagagcatgcaatgtttttctatttggcaatgtttttctcaggagcaaccgacgaagaggggcgacttgaggaatcaggagcaacattcacgtcagccactatgtcatcaggaacaaccacgccaggtctcctcatcaagatccgtcccgcgtgaatagttttatccatagctttatcgcgctgggccctcagggtagcagaagtttcttcagcaaccttgacagccaaccgagcgttttctagctcctgagcgacggatttcttggaagcacgcagatccttgatgacatcatctttggtcgacaccaactgcctgaggcgaatctcatcatccaaggattcttgcagcttataacgatgattgtcaaactcctccctggtgaagcgatgactcctctccaagatggtcaacgagttgctggagtcacggtatagcctgtcaagattgtcacgagaagtaacgagggcacgtttttcttcctgcaaacaagaatcagcttcttcaaacgtcaagcaagcaataaaaacacagcaaaacaaagcccggattcacatgtcaccttttcagagtcgagctgagcgcggagagtagagttcagcgtgttagcatcattcagagaagcagaaacccgggccagttcagtctgaccttgagaatacttttcttcaaggtcagagcaccgccgggccagttcagcttgaccttgagaatgtttttcttcaagatcagagtaccgccgagcaatatctgtca

SEQ ID NO: 33321 - DNA, 3206 bp, Zea Mays
cgggtcatgtgactgggtccgtaggaagtgcgggcgtgagggacgaggccgagcggtgtgaggaaatagaaccgggagactggagcggaggcgggaggaggaggagggagaggggatcgagaggaacgcgcgcgaacagaagagaggaaggaagaggaggtggcaggctcggttccgcgcgcgccgacgtgagattccgggccgcacgtgcccgcagtgtgatagatatcatcttgaggtcttcataagtcagcaacctagagcagaaaatgtcagctccggaattcaggacttcttaccagcaatcccctgagaatgtcggtcaactcaaggtctgccaatgtgggtcgggcgactccaattttcagatcacaaataaatccgacggtggcgaaaattcaccaacaacttgtccaaactgtcaggatccacttattcttttactgcaggtccttaagagtggaaatttactgctttcatctaaagggattggctggacagtatggaaaaagcgttggtttattcttacaaggacatcattagtgttcttcaggagcgatcctaatgttccccctcccagaggaagtgaaccaattgttacacttggtggaattgacttgaataacactgcaagtatgatagtcaaagaagaaaggaaacttataacagtcgtgtttcctgatggccgtgacggacgcactttcacccttaaggcagaaactacagaagacctaaatgagtggagaagtgcattggagaatgctctggctcaggcacccagtgttgtgaatacagcgggacaacttccagtagtcagcactgacataacagaacctgttgaagctgctgttgaacaatcagagaataagtctgtaattggcagaccagcagaatttgcacttgtcgatgctgatggcactacagcattcctgcagaaggccttaaagttcatcgaagattatggtgttaaggtcgaaggaattcttcgtcagtctgctgatgttgaagaagtcaaacgcagggttcaggattacgaaaagggaaagaatgagttctccccagaagaggatgcacatgttatcggtgactgtattaagtgcattcttcgagagatgccatcttctccaattccggcaccatgttgcactgccctggttagagcttaccgaactgacaagacaaaaagactcgatgctatgaatagagtgatatatgaagtattcccagaaccaaatcgtcaattgttgcagaggattctcaaaatgatgcagattgttggatcacacaaagctgtaaataggatgtcttcatctgctttggcagcttgcatggcaccgcttcttctccgtcctcttcttcttggtgaatgtgaaattgatagtgaattcagtatggctggggatggttcattccagttgcttcaagctgctgctgctgccaaccatgcccaagctattgttattattatgcttgaggaatatgatcagatatttgatgtacctgcttttccctggacgtgcttttctttgcaagcttgttctatttgaacccatactgtattgttatggattttaatccaacaattacctgtttaggatattgaagacggttcgtactcttcagatgcttataccgagtctgacattgacaaggaatattctacagacaatgacatccctgaagattatgatggctcctctggttctggtgaagatgttgaagaagatttgaatgatgatactgaacactcttatggcatgaaggtcgaatgtgatagtaacattaggattgataatgcaaatgataaggcaagaaaaggcttgccaacagaggaggatggctgttccagtgataacgacaaggctcatattacgaagcttgaaaacaagaagactcatctccaatctaaacttacggaggaggagaaagaaaatacagtcctccaggcaaatttagaaaaacgaaaagaagcattacacaagcgccgtgtagcacttgaaaaagaagtggaaaatttacgagaccagctactgaaggagagaagtttgagggcttctctggagtctgggctaatgaatatgcgaagaggacaagtgtccttcccctcaacgatagacaccaagactaaggctgatcttgaggaagttgctgccgttgaagctgatattatgaacttgaagcaaaaggtttctgatcttcggggacaactcaacaaccaagttcagttgagttccacctcgttatgtgaatcatgcaacaacaagcgatccataaatgcagacaagcttgtcgaaggtgaacaaaacgctgccctttctccacagattgcctcagtcgaagcaccacctattgtagggtcttattctgtacctgacatgttctgggctacaaaccaaatggttcagaagatgttgtattcaaagggtgagattgcgaaggatggccaagacggatcacttacatcaagatggaactttgcacagagaccacactcaaatagtccagtcatgagcagggttcaaggttccgatgcctattcaagtactaaaaccgaggaatctggaggcgcaccttcctctgcattagcgaagctgactacccgactcaactttttgaaagaaagaagggccttgcttgccagtgagatgcaaaacttagatctgggccgctcccaggcccagaggcatacagctcctccgaaagctgagactccaactgagaagtagaatcgttttactgcatcgttgttaggccacaagctcaggtaggattgcaggcagtaacagaaaacttcgattcgacaatgcacagagactatctagctatagagtaacttgatttgtacatcgcacaggcattcatgtcttcaccctgatgattcatatgtcaagttttttagcgacaccgacgaacaacctggtttgtactattttatctccaaataaacaatactcctactctgggacaaagccaaagtgcgtttgcaaattatttgtcggtctgtctggtactctggtttgtacatcaacttcacttacgatcaagctaagtaaaaataccgtaccatgtgtatctatgccttcagtgtaacctaatagcaattccagtaaaacttggcagtcccagtgccaaaaagagcgaccagtatacctgcttgaacatcgtgctccgttaagttggcagttccagtgccaaaaagagcgacc

SEQ ID NO: 33322 - DNA, 290 bp, Zea Mays
ccgagctccgcgtagaggaggacatggcgagcaccgaggagaacatcttaccgacgatgcggttgtagaatgccccgtccacggcaaatggcggccccgcggcaaagttgagttcccggcgagcaattgccaaggcggcgagacttcagtcgtgaaattgatggttgtcgaagcactccgggaccgcggcgcagcaccagaatgccctgcggacgcctgaacgcgcgcgacacctagtttcgacggcggcgggtcactacggccttacgagcccacggcggctacggtgt

SEQ ID NO: 33323 - DNA, 2324 bp, Zea Mays
cggctcctcgcccaccaatctgtacacactccgacgccgacgcgaaatcggaaggaccaccaagctcaaaaaagcgccgcccggcgccgatgttgctgcggcggatgcgatggatgtcggagggggacggccggtgggagctggatgcggagaccccggtgacgatggagggcacggcgcgccccgtcccgggggaccccctgccgctggggctctcacggggctaccgcatcacccgtcccaagcagctagacttcttccaccggttcatggcgtcccctctggtacccaccttctccgccatgcgcgacggcctctctgttaaccacgcccacattttctacatgacagacaactggtatggtaacgaaccagacccattacatatttctactgctccgaggatgttgcggttgggaggcactcaatgttttgcttgcaatcttgtagcgtcaggctccaacgataatgcaggattggtgtgcatagtgtgattgagataacactggatttgatacacatacgaatttggatttgttaatcgtggatcattatgtcaacactaggattttgtgcctccctcgtcaataaacgttagtattgatgtctcagtggatggagtgtgagtcgatttcattagtagttgattttaagtgacctgaaatgggctatcatttccgtgtcttctttgttatgcataccattgtcggctcagagggagaggagtagagtaccgtccaattttttgtttctccctggttaatttaatggactaaatatcctgctcaatatagatatctagtagaggttacacttatgttcaataagtttctcaccaaacttatgctaacgaacaatctgatgtgatctgttcaggtcttctaccatcttggagaaaatcaatgttaagaagcttgtgtctgtcgtgaaagagaaattagcaaatcggcaggaagaggcctcttggaccaaagatttaaagaaccacttgcatgatgttatgtctttaggtgtaggcacggagatcttgatcacaccagacaccactttgctgctggagttatttgatatcaagaaaggcaatcgaggaaaagcaatatttcaccacgagcttcctcatcataatattacattccaagcatcttggcctggattatttgttgataagaagggaacatattgggatgtgccattatcattatcggctgaccttgcttcagttggctccagttctggattgagttatcatctattattgcagcagaatagtggggaaccaaaatgttttgggggtgatgaaacagatgatgttcctactgctctgttacctggcctatgtgctaaagtggctatttccatgaagaaaagcattgatgcttggaggaaaaaagaagataagctaaaaaaagttcagccatatgatgtatttctctcggattcacatgtttctttaactggtattgttggtggagtagccagtggatatttgggagactgttcaaggagagtggctatacgagatgaaacacacaagagtaatgcttttataatgtttgacgagaggaataaacgtgctgcctttgcagacctctttgcttctgttactttcactgctcaatacgggaattttcagaggctttttctggatttgactaaggcaagtgcccgatttgatatcacctctggttcattgttcttatgtggtgcttctcgccttgcacaagatttcttcttctctagaagacctgatgtagagacattctgcgatatttgtcctgatgtgacagtttcctttcaacaacagatagttgggcccttcagttttcgtgttgaatcctctgtagccattgaccccagaagccaggaccattttgttcgagtggatgatccgatcttcgcaattgattgggctctcaaagtcctgggttcagcaaaggccacagcgtggtattcacccaagcatcaggaggccatgatggagctccggttctacgaaacctgaagctgttcatcgtgaacgttgtataaaataatgcctggacttcatgattgctatggtcgctgatttcactaggatcagatggtgatgtagcttgtgctgttctcggcgttaacagaggaagttaatactgtttgagtctttagtgaacttgctaggtgaaccagtctgagtttctgattgccttttgtcagtgtacaaaaaccatgcccccaccatttttatttctttaaatatatgaattttagggtgagcttattaaataattaatccttttttagacatccatttgttcatctttttgacaaaactcaagacagctgaa

SEQ ID NO: 33324 - DNA, 4685 bp, Zea Mays
caacaagtatatttggccaactgttcacggttcttcaccagttgcgttcgtcgttcccgttctcctcctcgtatcccctggtccgtacgtcgtggccaccggcgccgcctagctcgcaccgccgacagcgtctcagactagatcgcgcctccccctcccaaatcgggttccagtcgggctcccgcaaccgccgccgtctacaccaggtgccgaggccgatcttttcgtcggcaaagatcgccgagcagatctgcccctggccgtcgccctacaccaggtgccgatatcttcgccagcgaagagcgcccagcagtttgtattgacaggtacagtgatttgggattctatactacctagctttatgattgcaagacctggttattttcacctgaggttgtgttcaacatgttagtggcatgaaaattgcctcaattgggggcaatggcatctagtacaaaatcagatttagtgtctggtagccctgatgggcatggatacttcaatgcacaacgtgggtcctatgcagctgcttcattggaaaggtcaggaagcttccgtgaaggcggtgatggctatgcgatgttttcagcatcaaactcatcaagaagattcaacatcacttccatctctagggagaaatttaccaaatgctatcgaagagatcagacgtatgaggagtaatcttaacgacaattcaaataaggccagggaaagatctagagcttttggtggtgctatggcgaagattgataaactttgtcccaatattgtgcgaaaacgttctcgaggagacagttcatctaatgaacgatctagtgtgttatcatctggaggagttacccctaaaaatgttcctcagagccatttaaatgcagatgatatggaagctgggcttcagagagaagagaggacaaagaatgcaggacaaaataggagaatacgtacatccatggtggagatggatgcaagaacagctggtccatcaagaggccccggacctactgataggatctcagatcctggtaaagccaccaatggcagttctgcagttccagaagaaaaaatcagaggtttggcaactactatcgatggttgggaaaagccaaaaatgaagaaaaagcgttctaccattaaggcagacatgtcactggctggtgttttgaggactgttgatgtagaccgagagtcaaaacaaggcatgcagcacaagtttactaatgacggtagggcgagaatgacaagttctagtttcaggtctggaactgttgcatctggcacaaccaaagcagatttgctttctacacaaaatggtcttgttatgcgacccttaaataggagtgatcaagacaatggtttccatcctactaacaaaagggaacgtcaagctgcattagataaagaaacgcccaacccgagaaccattaacaagcctaatgaagacgacagtggatgtaacattgcatcattaccgaaggcgaatggatctgcgcggggaccccgatcaaattcagggtcaatattgaagtcatatccaaacattcatcgatcacaagctagttctgatgattgggaacatccgtctggtacaaataagttaatttctgctggtggatctggcattcataaacgtacaaaatcaacacattcattatctcctccgatccaatggggtgggcagaggcctcagaagatatcccgttcagcaaggaagtcaaatttagtccctataatcactactgatagtgcactggtaccaggttcgctggacagtcctgtcaatgaagattgtgcaggtttaccgaggcgtgcatctgtaaatagccttcaacaaacaaaacgaggagatcatgggctctcaactggacctgaaggcaatgagcctgtagttgctgagaaaaagctaagggacaagggcaaaagggctggtgaactggatgatgggcatggctctggttttcagaagattgctatgcttgggcatccttccaaaaggaataagttgcctgctgatgaggatattggagatgctttaaggagacaagcaagagttgtcccgggttttactctgaccaggcctgggactcctgtatccattgacaagcttgaaaatgctccgattacaaaacaaagaagtgtgaggacagtctcagagagaactgagagtaaatctgggagaccactgatgaagaaaatatctgagcgcaaaagtaatgcacggcctaggcatacaagtagcagtgtgcagtcagactctcctgtgcaatctgaagatgatcatgaggaacttcttgcttcagcaaatgctgccctaagatctgcttgtgcaagcacgttctggcggcaggttgaacctttcttcgcatttttgactgcagaagacatcacatatcttagtcaacagatacatttaccagatgattcctcttcaagtaggtcaatggaagggggtgaatgccaaaaatataagggtggtcttgaatacatttcacacccctcaactccagccgctagcaacaaagatgatcacgctgctcttccaaatggttttggcttgaatcagttggataatgacataggggttggctgggaggcaagctgcattgaacctatcctcgatcaacttgtccatgggattggggtaccaggatggtcttcagttggccaaagacttattcaagcattgattgatgaagataggatcgatagtattaccaacaacacttacataagcgagggctatgcatttgatacacatgaaattcattttgatggaggaggatggaagcctcactcaaataattataagttagaacctttagcgaattttgaagcttcaaggaggggcccaaatggtctgacaatggattctgactggaaatataatgatgtgtcaaatagaagtggcaatgtcatggataaaaccaaggtgtggcctgagtttcagtacagtgagatgtgcttcaatgataggattatcattgagctgagtgaagttggtgtatctattgaacctgtgcctgatcttgcacagagtgaggacgaggatattaatgctgaaatctgtaaattagaaggccaacttcgtaaagaggttgtggagaagaaaaacttgctattgaaactggatggcattgttgcaactgcaaaagagtctcagcatagggaattctcacgccttgccatggatagacttctcctgagagcatatgagaaatatatggccttctgtggtccaaatgtttcaagcagcaaaaatgtcaatagaactggcaaacatgctgctctaagttttgtcaaacgagtactagtgcgatgccaaaactacgaagaggcggggacaagttgctttgatgagcctattttcaaggacatgtttttatcagcgacgtctcacagacgcagtctagatactgcttcacaagataacaatacaacagcgagaccagtccacagggccggtgcaccagacgcttcgcgaggaagcagtcacccgacggacctgtcgtttgcaaaggaggatccctggacaaacaacgtaaagcagcgggaactgttgctggacgaggttgtaggtagcataacaggaggagctctgagaacctcctcctccgtccttggtatctccctcgtcagcaatacgaaagggaagagaagcgagagggaagggaaggggcacaaccgagacagcctcaggtccggccgtccgtcgccgtccaacgcaaagggtgaaaggaagaacaaaacaaagctcagacagaaggcagccaacatctctgctccttcaggaggtctacagcttccagcgaaaacaacgcctcccagcagtgggaacggcaaggaggagagcgcagcagcagcagcagctgctgctgccaggcatggtggtgatccggcggcgaatgcttcgaatgacgccgaaatgcccgacctggctaacctcgagctgccaggactggacgccgactttggcggctggttgaatctggacgacgacgacgccctccaggacctcgacctgatgggcctcgagatccccatggacgacatcaacgagataaacctcatgatatagccgtacattttccttcgtttctcacagtaacaaccaacagagaaaaagctcccgatagtgcgtgcacaggtaaccaccaaccctgcagttttaacaccaggcctggttattaagcttcacttagggctagtttggaaactcaaatcccttccggtattggaggtgattgaggggagaatgcaataatttcttcctcaatctcctctaattctggaggggatttgagtttccaaactagctctgataaaagagagagagagggacagacagttgatagagacctcttgacaatcccaacaaccacgtgttgtcttttttgtaccagcgtgtaatttgcctccctgccttgtaccctcccctatacgttcatctgtcgtgtagacgtcggtgtacatatctattttggcgccctagttacaaggtagggaggctagttactgcatctgttactcgctccaaaggttgtgtgtgtacagactgaggacatttctcatctcatggcagcgccgactttccccccttattgcgagcataagatcacattcttttatctcagattagattgaggctagagactattccagccaatcaatgttaacgtaaataaatgtat

SEQ ID NO: 33325 - DNA, 1854 bp, Zea Mays
accagcaaaaccaccacaacacccctcgcactacgcgcgccgccgccgccgctagcactggtgagacgagtacggaggagcagcacagggatggacggcggcctcgaggatgagcaggaggacccaagcttcctcaaaccaccacagcacccctcgcactacgggcaccgccactgctgtcgctttcagcgtcggtaagacgagtagggaggggcaatgcagggatggacggtggcctggacggcgagttggaagacgcgggcttcctcgacgagccccgcttcacgatcagcttctcccctccgctaatggaatgagtatttttaccggttaaagtttggttaatgaaggaatagaaaatggggttgtgcaatttcaagactcaggtgtccatggattggagaaatttccatttagatgacccatcaacatcctacattgcctggtgatcacacctgtgtcacctgtatgaatgttggtcaactttcagcctctgttaacaacacaattgaccaagagcggggatgagtagaagaggatgatcctggtgtgtatattactgttcgagcattgcatggtagcatcagagaactacgtaacgacgaggctgagcgacaattccagtgtcccaatgtgtgacccgagttcaactcctctttcgtcgacctcgagatcccaggtactatgacacacagctaccttctcgcaacgtgatgtgggatgaattttgacctgtaggttgaataagtgaagtggatgagtcagaaagtggaggagacagtgtgcaggagcagcctgtttatgtggccgtagtggatctcgcatcctgtttgtgagcttggtattcctcctgaaaacatcactgcaaaccaattgttatttggcacattgggggagtacgccggatttgatcccacagagcccacttcacgcagtgggggtaaagcaaaagcagtgcagcaaataaaacagacaattgttacgattagtgatggcgcaactgatctggaggctcggcaacctggcggagcagactgtgtgccgccagagctagcggagggaggcgggtcattcgatttgccatgcttaggattggagaatcactagagtaatagtatatacatggtggggagtgaaaccaacagaggaagaatccgttcttgatcaaaattagtcggctgcttggttcgtcgtctgcgtgttcgatcggaggttggcgacgccttggcgtggccgctttccgcaagaaagcaaggaaattgtgctgaccgccgctaatgcgctggatatttctgggagtggaaacgaaagtgtactctgaatttcaagttcctgtcaaaagtaagatcctctgacgaaggtgtggttgtgatcatgcataaactaactgttgctgccacatggatcggagagggagatcgatccacagaagatggtatcatttgtcaagtgtatgttgggacttgatgctgttgtttgggacattattgggtcgtcattgttggagaaagttgtgtatctacttacagaattggatgttaatataacatgggaagatattcttcaagataaacacaacaaaggtatatttgacatggagcttgaggatttggctgaggatgaacataaccttggccgcacaagtgtggagacttgaattcatatatacttagttaggctcaatgttagcataaacagttgatgaacaagttttcccattagtattttagtttgaatttagagtacaattatgtatgagttatttgacaatgcttatttatgagatattgaatgatatttatctatattgtattaattatagtgttattaaatatatgtgtttgtatttttctc

SEQ ID NO: 33326 - DNA, 3730 bp, Zea Mays
aaaaccccaccgctgttcgcgtcctcgtttctctcaatctctctcctctcctcgcctctccttggtgtccgtgttcacgccgtcgctagcgcctgccgcggcgaagcttctgccctccccggcgccgggctcgggtcgtcgtcggccaggcagctgctacgcgtgaacacggtcacaccagtaccacgtgacgtgaacggtgaactcgtgaagaacagagccgccactgaggaaccctagcgacggcggcgtgctaccggtgacattgtccccctcggtccctcctccatccccgacgcagcggcgccagcctgcaggaagcctattcgagacaaggtcgatctttgctgccttggcgagcttcagccgaatcaaggtcgagcatggcggcaggccagtaaatagagcaacacaaaacccttcaaatcaatggagacctctgcagcaaccccgacccggccgccacaccaggcggccacttccccatcgccatcgccctcgtcgtcgttgaggctgtggaggccagcggcgcagcgcaacatgcgcaatcagtggtcccatctgagcgccgccaaggagcagtggctggccgccgttgctgacggtcgtgcccacgcctccgcgctcgtcaacgtccacctctcctgcaggaacatgccggcgatggatttgggggtgctcaaggatatgccggggatccgcgataaggcgaactccaagttggcgcttagagaggagcaatacagcggcatgcttctgtcggcctacaaggagatggggatggtggaggagccccagtattcaaatggttctccgtattagaatttgagagtcttgcccaggagcttgttcagatgtttgtttcagagcaaaagttgaagaggctgctactcttggaatttctctcgattgctttaaaggaaggtgtagaactccagacatcattaaattggggtgatgaactatatgatggtgaatcaaataaacttcagagtattggccttcagtcaggagatgcctactcaccgcctgaaaattggtgtgcagaacgtttagggagtcagagacctggcaatctccctctgcatgaagttttacaggtttatttaaccacttggcatgctaatatgaacatcaaccggagtagaattggtgaaatatttgagcttgttgaggaggagatgaagattaaactgtcttgaagattccgattcattttgttgggctatccatcaaggaagaagaaatggaaaagaaagatcaatcagttcactattcaccaggattctatatccagtgtctttatctgccttagtagaagccttcagagcttacctatgatcttagaatatagtactggtctccttgtgacccataatttttttaaaaaatttaatgttgggttacactggaatcatattgggaagagcgttggaccaacatatgttattgaaatgagatttctaagttatcaggatcattcgcctagcttcagggtttagatgggcgtcgaggcagcaatcgaggcaaggaggaggcgggggtgggggatgctacaccgaccgtgacgtcgcctactgtcttggaccttctgtgcgccctccttgacaccctcgacgctccacggagctcggaggcggtgaccgtcgaggaggtcggtccctcgaggcgacccggggaaccggttgaaaagtacatcatcccgcctcctatcgttggggcgggtggcgacctcgttcgtgccggatcggacctctcgacatggggagggccgaccctgaggtggatggccaccgagggcaacccctacttcgtccttaatgacacggaggagagggagatgtgggcggagtttcgagcaatggctcaggggcttatggcgaagtccgtggccaagtcgatctccatccgcagcgagcgcgacatatgggccgtgctgcagcgctatcaggccatgttgtgttgcgcaaacgagtagctgacgctgaagagggccgaggcggcgaacctatcgtcgttgtgtgctgagttgaaagacgaggtcgcgactgagcgcgagaaggtgtcgtcgctggaggaggaggtgcgacgcctgagataaggccttcgggtggtgactggtgaacgagacgagtctcggcatcaagccaccgaggcttctcttcaagctgactctcacgaaggacctgggggccgagtggagtacggtccaaggcctaagggcctaaatgggagagctcgaaagggatttggatgctgccattcacacctctaaaactcacccaggccgtcgaccaaaagatggtcgagctgaaggacctgtccgacgcggtggtggagtttggtcgagacctttgcgtcgcggacgttcccttgggtgagtacttgcggagccgcatgcgagccctgagtggctacgtgcggagcgaactccgtgaggccgtccatcttggggtgaagcaagtgttggtcgtagtcgcctcccactatgagattaatctcgagcgggcatgcgaaggctacgtcttgttggacgagcgcaacctcgccgaggccgagatgcagaggctcaccgatgttgtcgaggggtcgggctcagtgtaacaccccgtccaatcccggaccggcggtacttactcctggcagctctctaggatcatttatcatccacacaaaccaacatgggtcttttgtgcgcactttgtcctcactcatgtgcacccgataaaacttcccagtcggtcactaatcctaaattgctccaagccaaacacgcttaacttggaggttcttttgagatatgcttccgaaaaagaagatgtatcttgttggtatggatactctattaattctattaagccttgggccaggatatcaccatctcagggcctaggatatcacaatccacccccttagaagaccgacgtcctcgtcggtcaacctcaatccaggaacctcccctcttagccacatgtgtgtctagtgtcgtcatattccatgccatgtgaccacttagggcccacatgcgccatgtgccatatatccgaaccccctagcccacacacgctcgtgaaacctcaagggtcggctctgataccacttgtaacaccctatccaatccctagaccggcggtacttactcctggcagctctctaggatcatatatcatctccacagaccaacacaagtctttgtgtgcgctttgttctcactcatgcgcacccgagaaaacttcccggtcggtcacttatcccaaattgctccaagccaaacacacttaacttggaggttctttcgaaataggcttccgaaaaagaagatgcaccttgttggtatggatactctattaattctattaagccttcggccaggatatcaccatcctaggggctaggatatcacacttagcattggcgtgccacttcgaggatgaggtggttctgccggtgcagtcccctcctgtcgaatctcactccgctgtggcgcctcccggcgtccccgaggttgacgctgtgcctcataccgcgcagactcttcatttgccctgaggggttataaggaatattttgagttgcgtgtataagtcgtgtattgaacactttgtttttgtatcttgtttatttgctatgttattttttcgcttgttttgtgcccgccgttttgcctttccacagagtcctcatcggaacgtgagttaccttatgggaggatagtgagtgaggataccat

SEQ ID NO: 33327 - DNA, 2089 bp, Zea Mays
cggaagaagccgcaccaggagcaaattcctcctctctcgagggcggttgcgtgctcgcgtgaagaaggccggggccctatctctccgatcgcggtagggcgttcgcagcgccgattcgagccgacgattggccgtccgcgaaggttaaacaaaatcaaatccccctgttcatgtgttatggcagggcatcatcataataacacacatgcctccaggatggatcatgtgaacaggttccagagtgaagcacagccttttgcaaatggagctctaccatcaggttatgtgggcgcaccaataagaccaaatggcattccattctcaagtcacaccgggcaatctcatattcagcacagtgatgctcctggaaccatgcttgcatcctattctggctatcctcttgctggaagctccagtagcacctatgcaccacataatactcatcatctgcctgctttgagctatccacataggtctgatgataacttcattctgagttcccatatggatgacagaagggttgcactgaagcggagaaatccaattatttatccagtggatggagtcaataatgggagctgttatgctggcagttcatctaatcctcagttcccatgctacatgcctccaaatcctattcctgctcctgaaccctgccctcctcgaataacatcaaatatgggttcaagctactggactgatcagccctttggtagcaatggaggatctcagaggaatgtgagaggtcgccatgatcacaatcctatccatttgggacacaatccaggtgtagcttgcgcaacaagcagcactcatgggccaccacaccatgctaatgtaattggtcctcaaagtacagcagtgccacaaaatagagcatatttttctatacctccaagagtgactgccccaggcagcgatggaaactgtagcatggttttcagggaagggacatactactctgctccgcagaggaccaacataaatgccccccctgtcctagcacctcctggttcttctgatagtctacattttgtgcatggtgggtatgccccaagagcagcccctcctaacagcatcagcacatatcctgccccggcttttgcgactcctaacaactcagtgacagttacccatgagcctgatatcccttgctatcgacctgccgtccctggctatccgcctgctacctcagcagcagcagcagcagcaagtgttcatgctgaaggtgctgctgcatcttcgagacatctaggtcatgtggctctaggttccagtggtagtgcaaggagtagaaggctgagggattcataccatgcttttcgtccactggttattgaagaaaataacttgagaggaccagcaaccgagcgttttatgatgctaaatcagttatttatccatgaatcgagagaagattctgaccctcactgggacatgaggctggacattgatgatatgagttatgaggagctgctggctttgggagaacgaataggcaatgtcaacacgggcctagctgatgaaaaactttcaagctgtgtgacggagataccctgctgcagctctgcccgtactcatgatgataatgagagcgcaagatgtgtaatttgcctggaggattacaaattcgaggactctgtcgggaagctaaaatgcaatcacaagtatcacgcagactgcatcaagaaatggctgcaggtgaagaacgcttgcccagtctgcaaagcttctgcggcagatgacggcggaggcaccgaatgaagcgccctgccgcccccattcaccctatctcaggcgaagctgtactggctgatctggtttgctgtgtgtaaataatggtcctgaaacggattatttgtgagctgaattaaactcgacatgtaaatttaatcctcaagctagttgcaaattgatggcagcggttagccctacgtgtcagccgtctgacgtaactgcagagagaaaacgtttgcatgcatatgtacagctcgatccaatagaggttattaaatgttaacaatttattagttagttaagccgtctttacgacgtccatcgtcacctaattaaattgcaactaattttc

SEQ ID NO: 33328 - DNA, 3393 bp, Zea Mays
cccatcagtgggtttgtaacacaaatggatgaagtgaggagagttaacaaatggatgaagtgaggagagttagcagaagatgcagcactgtagactgaccaaattccccccgcgggcgacgaagaacatcactgtagggctgatttggtgaccggggatcccgaggggaagaaatcctcttgctattcaaaattgaattgcaaggggattcctcccccatggatcccctagggatccctaatcaccaaatcagcccgtagactgaccaaattccccgcgggcttgcggccaaacctttcaccgaggccgcaccctcccgtgcatgtcactcctgccggcgccgggcgtcctatggtagagactcgccgctcagcgcggaggagcggcagcggttcgctcccggccgacggagcgccgtccgagccggcatccagctcccctgcaacctccctccccccgcgggagaataatggcctggttatctctaatgacaacacattgaagcagaccgtggaggtagaaaaacaggggaggcaaggtaaggaggtcttagtggttcatgaattggatgagtcgaatgaggattctgggtcattggatgagccgccgggttggcttcctgacggttggactatggaggtttgtcaagaagacaatggctccatctacaagtactacacttccccaatgtccggatacatgttcacatcaaagatggagacattgcattatcttttctcaggggtggaagaacgcatgttggagttgcaggagtcacatacatggcttccacgtgggtgggtgattgaagtcagagccggtgggaagaaaatggacaaaatgtacaaggtaggttggagatttgttgcacaataacatctagggatgcaaggaggcttgtccgtgaacccactaacagccttaatttttgaagttctccgcggaacccacaaaaatcaagcatatttgcaggttcacggataagctcacctgtgtgggcctttcattacatccatatggtgtggtactttactgcaactatacatattggatataaaaaatacaacagtcttccaataagatgtagctggcaagacaagatgttcccttctaaaagcgagtacaaaaccgaaagaacaattggggtaggtattggctgcaggcacacactggcatgcttggtcaggagccaaggtgatgaagcttgatgtcacctcaaccttggatggtggctcatagcatcctctggttttaccagatagatgcagaggatacatgtcatggagggttaggtgagtgaggcaatgccacagctgtggatggaatggaagaagatatccaaagaaaaaaaataaagcaggagttcacttgtgactctctcaatgcttattattttcagctcaacataaaccatgatatcaatcaacattgtacacgtagttaccatatcaatggaattctagggttcaaggggatcatctgcagttgtttgaatggttgaaataaatcttctcttttataattcagggttgaattttatgtctttaagagtgggtgttgttagaatacaagtgaattgcccatctcttctatcagcttgagcttttgggttgaattggttggataaaagattgaagtctcgagttcgaatcttggttagcgcaattaaataaaataattgttgcttgcttttattccacgtctgaggcttgagagagcctcggcatcaggagtgttagaatacaagtgaattgccatgacttaatttgtgtaggggcaggaggtataaatctttgctcgttcagaagaaagctgttaggttgagagtgaggaggaagttttagttacatggtggatatgttagttccttggaggaaattgaagtcacacaaacgttagatgagatatgagcatatgacatttctttttgttttgaagcttatgccttctgcagttttatgttcacctacctactgggcagcgattcttatcaaaagcatggtggatatgttagttccttggaggaaattgaagtcacacaaacgttagatgagatatgagcatatgacatttctttttgttttgaagcttatgccttctgcagttttatgttcacctacctactgggcagcgattcttatcaaaagcagaagtattgcactttgttaataagggcatggtttctacatgtgatatggatgtgctgtgcgacactagcactgatgataatatacttgctcatgtggaattcaatcctgatggtttaccagatggatgggtgaaagaaacgatatctagaaagttcaatgatggaatcagaaaagaccagtactataccgatcctgttagtcaccgtgtatttcgcacgcttaagtctgtattgagctaccttggaaccggagaaatatctaggcattcctatttaccaaggagaaatgtcattgacatgtattcatttgataagtgtgcagatctgcccaaaagcatggtgaaaagattgaaagcaaaaggacaagcaaagaaaaaattcatgagagcacaggttttagacaaggacttatctaatgggcagacttcaaatcactgtgaaggtgctattgggttaactcaatctgacccggaaggagataagtttggatctatggaagcggcatgcgaaaaggggaccagttcagagactatgaaacagcgaatagggaggccaaagaaaatcttgaagcaaacaaatgatagcatttcggatcgtgacaagggttcacatcaggagcacatcgaggccaaagaggaagttgatatctgtggtgggaaagacttgacgcatttgaaaactctggagcgtaccgaggctcagaatagcacaatgataaccaaggaagtaaacaacaacgacacagcagagaaaaacctatccaagatagagggagacaactcggatctggtaaccggcacgggtttgcacaagcaagagaatagcagattaactgaagttagtgagaaggcaacattctccacaggttacaaattttacaagaggagaagttgcaataagacatgaggttcaagaaaagcataaaattagatcaagttatctggtgagttttatgggtcgccgcccaaaagttgtatcatacttcttcagggaacaaatggaaccaaagttgatctggtgtgtccaggttttcatttttttcgttttgtttattcccttctgcatgcttctgcttctagttgatgtggagggtgtctagtggaagtaatctgtttgattcttgtatcataggaattaatactggttgtagagagcaggatttaacacttgacagcaggagcatcaaaggaatcaaatttaagaagctttcgttaacctgagggctgagacataaatgccgtcaa

SEQ ID NO: 33329 - DNA, 441 bp, Zea Mays
cccaggtttagggttagcgctatctggtcgcactccaggccgccgcttctccccgtgcagtctcctccctcccccggccgtgctccaggccaccgccttctcccccatgcagccgcctcctcccgtgcaacctcctccctcccccttgctcagccgctcagctccgcctgtccgccccccgccagccccgcctcctttggcttgctattgctcgcttgttgtccggccgccctgtcccgcactcccgctgtccgcccgtcggcctgtcccactgtccgcttgctgttgctcgcttgttgttgccctgctgtcccgcactcccactgccccgttgttcctcgcttgctgttgcttcagcagttgctcaaacaaacagctttgcgtctgttcctgttcctgttgctcgcttgctgaagagggagtattaacgaacgccggccg

SEQ ID NO: 33330 - DNA, 2270 bp, Zea Mays
ccctaccccagttttctcttctcccctcgctctctccgtgtctccatctctgctaatctgtgcaactaatcatcatcgtctccagtctccctagtccctgctgccgctgccgcttgtcgctgacgccgtcgcgtatcctccgcatctaagctgccggcggcgaccaaacccgccccgcctctcctccgtccgcccccgcaccagctggttccctcccgtgaactcgcacgctcacaggttttataattgtttgcaaaagggctatagtacttgatgagatgaagtcaacagtgttttcaacagctgttgtttctattgggtatgcattgcttggatgggattttgcagcattatcagctggagaatcatgattggtgcaatctttgctccttccatcgtgtactttgctttgttggtttactacttgccagagtcacctaggtggcttgcaagtgatggaaagattagtgaggccagagtttctctgcagtggcttagaggaaagaaacatgatgtttcaggagagatagctgctattgtggaaggtgtggacatcatatcggactccactgttggcgctgctcgtgctcagagtttctctggaaccagtgctagccacacttggccccgtagtactttttattggcagctttcagacccactagttgatcttctcggaagcgttcatgagaatatgtcagaaggaggaagtagacggaatagtttcttcccagtcttcaacagtttttcttttccagagcatgaacatatgaatgaacacagggatggtaacagtgatcaacagactagggagacttattatgctggagaagctaataatggagatggtttaagggcttctctgctttctcaggcagcaagtgttgaagtaaatgatacaaatacctcttttacttctgaagggagctcttcatatttaagaaggcatggaacatcagtgcttgcacaagagtttatggcgtctatacatgattatgacattgaagaagaagaagaagaaatccatgggtttgcattgcctcaccagtctgcacctcgtgatatggaaagcaccgggagacatccattcagacatcaaatagtccggttatctgaaacagctgatatgaagtttaaatggcgggtgcttcttcaaccaggaatcaggcatgccttatgttatggcatgttaattcaagcccttcagcaatctacaggaatcagtggtcttctccgctgcgctcctgaaatatttgagcagtctggagtggctagtttgttttcagacattggactttctcctcattcaacatcaattctcatgagtacccttaatgctttgctgatactcccttgtataactgccgcaatgctgctgatggatgtctgcgggagaagggttattgtgctggccactactcctgtcctgatactatcattgagtgttatgtctatgtccaccctggtgaatatgggaccgttcgaaagtgccgtcctcttccacttcgcattaaccatttgcttctggtcctatgtcattggtttgggaccgataccaaacattctctgctccgagatattcccaaccaaggcccgtgcgacatgtgcaagtttctgttcgctttccttctggtttgggggcctgctttcagcgtactgcttcccggtgatgttgagcaccatcgggcttggcggagcgtgtgggatctatgcacttgtgtgctgcgctccgctttttctcgtctactatcgaataccagagacgaagatgcttaacctggagctcattgcggagctgttcaagctttcaaggcaggagcatgtacagtagattgtccaggaaccgaggtagcccaggctgagtgccgatggatggtgatgtgtgtacatatgacaaatgtaactttggatgctgaatttgtttttgctagttaggaggattggtgatagtgtacgaagtggtttactcttttgctgtccacaggttgctggcagtgtttgtagtgttttgtcttagggggaattcctgtactccactgtaattgtaatgtaccctataacttatttgtcatcgcaaatatcctaatgcaatttcttatccttccataccattgctagtggtatagaagggaccaggacatgcagttttcttatatttttttatgccgtcgccggtggcatggaaaggtaagaaattgcatccatccgagtgtcattacgagagattaggacatttgcgattggaaataaagtattagacaaaatttggc

SEQ ID NO: 33331 - DNA, 1458 bp, Zea Mays
ttgcaagtaacaactactcttctccggactctcggggtttcccgacgtccaccacccatcctcgcttctctcgagtcctcaatccatcctccggctgttccctcccagcgacgaaaccctagcccgtcacctcgacgcctagcccgccaccttgccgcccgtcgctgcaggtttatggcgcctgtgtgatcggatcagcagtccgctccgtctccctcggcccacgcatctgatgttcctctcccgcatcgtactccgcgacctggattccatcgactctccggcctccatggcgtcctcgaagaaggttgtgacccgtgacgagtgggagctgaagctccgcgacgtcaagatccgcaaggaggacatgaaccgcctcgtcatgaacttcctcgtcaccgagggcttcgtcgacgccgccgacaagtttcgcatcgagtccggcacccagccggagattgacctagcgaccatcactgatcgaatggaggttaagagagcagtacagtcgggtaatgttcaggaggcgatcgagaaaatcaacgaccttaaccccacgattttggacacgaatccccaactatactttcatctccagcaacagaaactaatagagttgattcgcgtgggaaaaataaatgaagctttggagttcgctcaagaagaacttgcaccgagaggcgaagaaaatcaaacatttctcgaggaaatagaaaaaactgtagcactactggtttttgaagatgtaaaaaattgcccttatggggaactattggatgtttctcaacgtttgaagactgcaagtgaagttaatgctgctattcttacaagccaaagccatgagaaagtattgtggaccggaatcctgtacagtggtgataagatatgacttcggcttgacacagtcagcgactgaccaacaggttcagatagttaaaaatatccgaagcttccaagcttgttaaagatgttgaaatggacccaaaatcaactggacgaaaaggcggcttatcctcgaatcaacgatttcaccactgccgcgctggaagatccatcgatatgaatctgctgtgaaggaactgagggtatgcaccaagcctgcctggtgcctacacgtggttgccccggatctgtcaatagatcatcgtctgcagcgattgagttcaccccttgcactagtgtttaagatcaatgcaagcaattgatccgaaaacatcacctgtgttctacctgtacatgatgtagaagacatgtttgaaacctttttaagttagtgaaatgttggatttttttcatggacatatattcgtttcaaacctgtggtacttgcaacacgcaaattgtttcagtcatgctttgggccttgaattcacggtcctactgtcagtttgatgcaactgtgcaaagaagctcattttttttcaatgtcagaaccaattagcggctacagatttttag

SEQ ID NO: 33332 - DNA, 1627 bp, Zea Mays
gcacggttcccccacggccccaccttccgtccttcccagcaccgccgcggaccataatccccttcgtcttccccagcacactgcacaccttcactcccgcatcctaagctatggcggcgctgagctggatccggctccggccgccccgtgctgccattctcattttgctgctcctcgccctcaatatctccccctcctttgccgctaacttcgagggcttcgactccgacgaccttcctgtcgcggccggcggcctagatgctgacgatgacgagggcctcgacggcgtctacctcccgccccctccgcccatctccctctccacctccgctccttcacctcccgtcacgacgacaccggcgccgaaccctaacccggctacgcctacgcctcgggatcccaccccggcgctcgacctctgggacgaagacgagttcgagggcatccccgtgcccgaagcgatcccctctgacgactccgccgcgccggccgaggtcgacccatcagatccctccgcggaggcaccggtggaggtggcgccggctgcgaagaggagcccggctgagctcctccgcgcgttctccttcgagatcgcgtgcgccagcttcctggtctgttacgtgctcaactacttcactgggaagcggcaaaacgagaacatcgcgctggcctgggccaccaagttcgccaccagggactctatcttcgacaagaacttcagccttcttggcacaggcgacggcaaggacacgccactcctgctgaaggaggggcaggacgtgttcaagttctatgcaagtgggagacggttctgccaggggttgcttgccaccatggagatgcgagcgcggtacgatctgctgtcaaagttcgtcgagttggtcttccctaggaaggacaccatcacattcgaagtgataatgaacgaagaggccatggaccatgtggttctggctgtagccaggaagaaggcggccaagacaatgcacaaagaagagagggatctgcaaaggtttgccagtgttctcacttctgcacctgcggggaggaagtgggtgtcagatgagcttgctgtggtggctgagtcaaaggaggttgctggggatatgatcactgaagctgtgcttgatcaggttcttggtgagaagacgttcgagaaatttggaaagtggttcatctcgcttcatttttcggaccagttggcaggatcctacaagaaggtccttacattcaagtttgtattgccagatgcaagcaacatgtcagagatgacaagattggtttctcttgtgccatactacattgatttggttgggcgttataagctcagctctcatgctcgctctaaaactgatggagctagaacgaaggctgctcaggaagcttttagggaactacagagtgccaggcaggaggccctgcaaaggaaaaaggctgaaaagaagaaactcatggaggagacagatgccaaactaagcgctgaggcactccggaggaaagatgaaaaggaaagggctaggcaactgaagaaatctgggcccaaagtgaagatgctccgctcttgaatctaccacggcgtgtttggtagactgggtgaatagagaaactgcacctgcgaagttataaa

SEQ ID NO: 33333 - DNA, 2332 bp, Zea Mays
actcgtcagctacaattctacggtccatacaagtagatcgagggtggtcgagcgtttctttctctcttcggctgaacgcggttttgcacaagcgagcaaagagagggagagagagaaagaaaagaaaagaaaagaaggggagggccgcgactgtagtggggagatgcctcggcatactgcgcccgcggcgccgccatcggagcgcggcgagatggacgaggtggtagaggcggatccggacacggaggcggaggatcaggaggagaggtgggcgacgctgctaccagagttgctctccgacgtgttgctgcgcgtcgaggcctccggcgccgagcagtggccggcgcggaaggacatcgtctctttcgcctgcgtgtgccgctggtggcggaaggccgcagtctccgttgtgcgtcctccggcggagtccgccaagatcaccttcccctcctcgctcaagcaggaaaactcatgaagtccatgaactgcggaggagtttagggttaggggctgggggttttggtggggaggaatttgttcttgacaatggcaccgctcattgtggtggtgggaattgatgatgggggaggtatgtttcattctagttagcgagggactagcagtgatgacagatgcagtggcaggagccgctagagacagaggaggcaggcacagtgggggtgctagagccaggaggaaaactatgggagaagcgaaaggagtcgtacggcttggtgctcatggtgtgcgacaccatgacacgcagatgacaggaaggcggcaggcggggtgcttcatttggcccattgaatctggtgtacaggtatcattgcagtagcaatatggaaaagaaaacaggtcactggatgtccgtcataaaggtccaaatctgacgtactttgggcacaacaatctgtctcagaatttgcttttggagccagggcctagggagaacccaatgcaatgctttatcatgcggaataagaactctacattctacctctaccttggcttcacaagttcacctgtgtataaagggaagtttctcatggctgctagaagattaaggcgtggtccccatactgagtacattatatctcttgatgcagaggacttatcacaagggagcaattcatacatgggaaaactgagatctgatttctgggggacaaacttcaaaatatatgatagcaagccaccatatgacggcgctaaagcatcaagtagtcgatctagtcgtcgtttcggaagcagaaggattagtccccaagtatcgtctggtaactatgaagttggacaggtttcatacaaatacaacttgctcaaatccagaggccccaggagaatgaattgcactcttgaatgcccttcagcgcaagagacctgggaaaactcactcaagacaaagttcaggaggcccttgggtcccacaactttacgaaacaaagcgccccgctggcatgagcagctgcagtgctggtgcttaaacttccatgggcgggtaacagttgcatcggtcaagaatttccagcttgtgactgctgccggccccagtgaccctactagcaacgtggacgaggaaacggttctgctgcagtttggtaaggtcgacgatgatattttcacaatggattaccggcaaccgctctctgcgttccaagcttttgccatcagccttagcagctttgggaacaagctagcctgtgaatagcgatacggttcgatgctcgtcgcgtggctatatggtttgcggtggtgggtgcttgctcgccgttgttacaatgtgatctgttctttttttttagttgagtatcgacgtactatttgtaccatgctgttgtacaagagatgcactatactgcattactgctgtcttgtcaaaaggacttgttcaagaaggaaatactgtgtcataaactttttgctctgattccatgcaaaaggcattccggtgctcatatatgctcatggtgaagtgatattttccccttcttgataaatattatttttgttttgtttgggtaactactgctactagtgctgggatgctgagcgcatcttagggaaatcttcttatgatttcactagtatagtgaccgtgcgttgctacggcatgtcaattatttgataaaatgttagttcacaacgattacaatgttttgtgacaatatgttaggatgaaaacagacaatttacattgacaatactttcttaaacatggagttggataggtagagggagactggtattgcagccaagaagcaagaaaataagaaaagagaggcaaaagtagccacctactgtttgtcccccaacaaatacaagcgtgaag

SEQ ID NO: 33334 - DNA, 2709 bp, Zea Mays
cctaaatacaccctcgctccgcccaccttctcccacccactgcctcgtattctattcccctgcctccccatctccgccgtcctcgccttctccaatccactagtcgacaccgcacgcgctcgcctcctcccgcggcgtcgccatagggttagggttccggcgacttccctcctttccgcgtcgcggcgaacgccttgggagacccgccccatgtcgtccgacccatcgccccacctcccctcgccggtggccccgccgggcgcggcggaggcggatccccatcacctgccccaacccgccgagccacacgaggtgatgcaccggacgagggccgtcgacttcctcgggcgacgcacgcccatcgtctaccagaacgacaacgggccctgcccgctcctcgccatctgtaacgtcctgctgctgaagaatgtgatcagtctgaaccctgacgctggcgaggtgtcgcagcagaagctgctctcgctcgtggccgagcgcctcatcgaccccaacattgccggacaggataaggacgaggagtatgtttgcaaccgggagcagaacatcgcggatgccattgatcttctcccgcgccttgcaacaggcattgacgtgaatgtgatgtttaggaagattgatgactttgagttcacccgagaacgtgctatatttgatcttcttgatatcccgctataccatggatggatagtggaccctcaggatactgaaactgctaccgctattggatcaaagtcctacaatgctcttgcttctggacttgctgaattcaagtcaggtaaaccaacagaagaaaacaaatatgtggaggaagaaactgttgattttgctgccgcaacaactgcagctttaaagattccatctcccagtgtttctcgtgggagatcgtttgatgaacatactctctcaaactcatcaactgtaccacataaaaggcgaggtgaccttgaggaagaagaggaactgatgagagtcctcaatctatctaaagctaaaagtggggatgtagaagtttcttttgacacttcacatagtcattcatcctccaatattgagacaccacaaaatgagagttttcagtcagaagcactcgagttggtggtggcgacaaaaaaagaggaatatggtaatcacgctacgagtgatcatgtctctatgctatcagtcacaaatgttgctattaatggcagcgaagttgtacccgaagaatcccaagaaaatttgatatctaaagaaccagaggacaatggaataaagaaccttgatatacccattcaattttcagaaactactccttatccgtctcatgaatcctttgctagcagtgaccaccaacctgctattcctacccttgttgaaggtgataaagaaacctgcaaagaacagttcgatgtacaaattcatggccagtctaatgatactgaggtcgcttgtgactcatcagttacaacttgtgaagctgttccagatcatgctacaacagaactggatgtgaaaagtgattctttagataattctcagtctctaccttcaagcattcaggaatgtgaaccaatataccaaggtgaagagcacatacttggcaccacaaatatggtgtatgaaaatcaagagccagtgtatgagggggaggtggttcttgctgagcaggctgacaagattggggaaagcagttcttctggggatgacaaggccacagaacatcaattctcttctgtttacaagagggacttaacgaaagtgagctttgtgtcttcttccgcaataaccactttaacaccatgttcaagtacaacggaagtctatatctcctagcaactgatcaaggttttataagccaaactgatttggtatggcaaaggttggatgaggtgaatggagatggcgtttttcttactagcaacttcacaccatttaatgctgaaactccaagaaatgattcatggaatgaacagcaagctatgacgagtactgctgattatcttgctcaatttgacaactccacttctggaaactctgatcttgagctagctatagcactccaacagcaagagtttgagcggcaaccacaaaggtttcaagctccacagccgcagcagcaacagcaacaacagcaacaaccaccacctcagacgcagtaccagactcaatctggccgaccaggacttgttgttggtccaaggaggtccaacgccccacctccgtccagaagtgaatcgaagaaagagagatgcatcgtgatgtaaaaataccttcaacagaaatgtagaagaaaaagagagaaggaactcattaagtcattatactgtaaagaaatgttttcttctgcggaggcagtgtctgcgtttagtcaccttgagccatctcccatttgagctttttttttggttttactttctctgatgtatgtaaataacctaaacgaataaagtgtagaaacagatgctgtcaaagtgatggccccatgcaatgtgatttcattcatcgccccgtgcaatttgattttttttcgtagccctctgaaatcgattgattctatttcacttgtcacaatgtaacgctaatttttgaattctaaaattgtgggttattttgataacctgtttagttgtatttattttcagaaaagaactacatatttacttttcacgataaatgaaagtttcgtaaaaataaactaaaaataaaggt

SEQ ID NO: 33335 - DNA, 3760 bp, Zea Mays
ggcacagcccacccacgggagggaaggtctctccctctttctcttcgtcttcttcctcctccttttggtttccttttgattgattgatctagtagaacacagaaaggagagagaaagagaggagaggcaacacagaaacaagagaagaagaagaagaaggggagatcgagatcgatcacgcaccgggggagcagatccttcgcctcgccatcagggataaggattcatgcgaaatgccacctgaacttggaatgtcttctagaactgttgctggtgctgttgtaaataggaggcctcgccgcctgtttgggagatcatcagagaggaagaacccactcaaccttcagtttgagcgtcaagtagctcgcctcgaggcaaggcagcagcaacagaggtgtgttattgtgacagttattcccttcaatttctgttacgacttcaaatcactatcgctcaccgagagtgcaagtgaggatccttcatctcgacctacatctccagaagagaaccctgaaacatcgtcctcaccatcgattttgttcctgcaccttaatgctcaagatgtatctcacagaagatggcaggataattcatcaaggctactggaagataagcccacaacatccaatagcatgtctgattcagatttcttagtcaacagctttaccaagccgagtgataatgcaaggccatcaagaaggaagagcaaaaagaaaagcaagaaacacaggcaacgctgtaggaagccgactgatggatctgaagctaaattcagagagggcaatggtgctgcctctgcagctgatgttggtgattgtgaagattcgacactttcgcctaagcatgttggtgacatacgctttgaggaaacttctcccagttcttctgtcaaggaagcttctgaagaggctcctgagagtgatgatgatgagtaccattgctgctcaggtggttcagtttcgagtgcgtcctactgtgatgagatggaactgtccaaatcaacaacttcgtgccctgcattgtgtggacaatgtcctagcagtaacttacagtatttggacaacactcaaaattctgcaccaacaggtccatctcaagaaacttgctatgctggcagtaaagcgaactgtaaccatgataccaagtccctgtttatattcagaaatgaacgtggatctgatccttgtgaggcaacagagttttgcagctctagcagtggatttgatgagaactggatagagaagtttgactatgatagtggcatttgttcgccaaaaagtgttggtacatatggtggagaccaggctgcccacttgtgcagtgacacaactggtgacaatgatttctgtcttgtaatatctagaaagagggccagaaaggagaagaaaatgtcattgtggaagagttatggagcgcatgcatccacacctgcacttgatcgaaataaaaaatatgttggccattcttcaatgcagatgaccaacgaattcaacagtaacgactggtcccatagacaaaatcatgttagcaggatacaccctcagcatggaaatgcactgaaaagctccaccaaaaatttcatgcagaggccaagcattggttgcagggagactcaatatgggtttccagctaaagaatccaagttaggagcaagtctcaatcattctacaggtccaagagaaaaaacttgtggaaaattaactggcggttttgataagacagcacaacagctttatttggacagagacctatccaatgctcttaacagcagtgaatcaatacgttgtgagacgagatcaatttcctcttctgaaccgacaactccaaagtctttaaaaggcaattatacttcagagtctggtgaatcaacagatattacaataggagctcttcccatgcagaaaagaagattgcaggatttagttcgaactgatgatgccagtgaaactatttctgggcgatcatcaccttgttctgagtcatcgacaactgaattaattgctggacatagtacagattcatctattgaagggaaccatggctgtcaagggctctgtaactctagaacacatctagcccagatgctcagggttgtaaacgatgcctgtaaagttcaggttggtgcagatgttctccttgctgctggttatccaatttctgatcttgagaaatttatatgctctgcaactcccgttattggtcgtgcaccttgcatgataagcaacacttgttcattggaccaagtagttagtgactcagtttgtcagcatgacatctctaatgtttccttgaggagaatatgggagtggtatgaagagccagggtgctatggattggaagtaaaagctcttagcaatctcagctctaaaacatccagcagcagcagttcagagttctttgcatactttgtgccttatctatctgctattcagttgtttgggttgtctaggaataacatgcatcacagttttggtgtgcaagggagggaattactgatatcatcaaatactgcaagctctatgagctctcatcctgtgcatgcaaaagcgcatacactgcttgaggaaagtaatgcatgcttgccagagtcatctttagttgtagaagatcctggagaactcatatttgagtactttgaaacagagcaaccttctctccggcctccattatttgaaaacagtgcaaatgtttctgaccaccgggtttttggggacactgaaaaattgcaaaatgcgaaattgtgtgagcttcatccagcttcctggttctgtgttgcctggtatcctgtttatcgtgtgcctcgtgggaatttccgtgcggcatttcttacttatcattcactggggaagttggttcataaaaaatgctccatggatacgaatgacgggcatacacaagtagtttcaccagttgttggtctccagagttacaacgacaagggagagcagtggtttcagctgagatgcccagatttgaagcaattgccaatagaagattctttaaaaaccagtcctgctgaagttcataaagagaggctgaggacgctgaagatgggtgcattggccatggcaagagctgttgtcccaaagggaagtggggagtcggtgaaccaccatcctgattacgagttcttcctgtctcgttgcgcctaggctaagcggttgtgatatgaaggaagaggggcttttctgcttctagctcctgaatgtagtagtgaccatgaaaatgaaaaaaaaacccagagtagtgactaaccagagaccggctatagatacagtttatcttagagagaggagagcctggggtgatgcatatcactgactgtataggagatagactcgaatattagatactctaacctgattccggattaccaatgcaaaccaagttggtgagctgttgaagtatggcagtacccgcgggatgggtgctttattggggctgggggcaaagatgagaagataccacagatgagatgacgctgcaggtgttcatcttttgtacaaagaccacaccagaggagcagcaagaaatttgctaccagcaagaaatttgttaacacatttgcgaggttgggcttttgttgtggcttgtttgctttgcagacttgcagtgttgctgtttctaatcatgatactgtgctgcttctgtttctaatcatgatattgtacatgaatgtgtcaacgtctggtgctgtgctgctagcaaacgcaagtgaaagcgtgcgagtaattagaggcgtgcaacctcattgcttctc

SEQ ID NO: 33336 - DNA, 2750 bp, Zea Mays
cccagcccaacactttgaactggggaaacggccgcctccttttttaacgcaatcatctctaccgggcgtgttgctcgcctttttgcttccgctccgcctgccaagcaggcccggcgtccaactctggtggcaactgccagggcagcccggtactcgctcgatcgctcggctccccgttggcattaaagcccccgacgcggttgttgtgttgtactgttgtttgtactaggcattactggttgtcttgaagaagaagatgatggtgggctcttcccgccaccagctgctgcagaggaaggggaagtccgtggctgacaagggcgccgccgccgccgccgccactgtggcggcagagaaggtggtggtcgcggtgagggcagccacgagggagatctccaagacggccatcatctgggcgctcacgcatgtcgtgcagccaggcggaagcatcatacttcttgtcgtcatcccggcacacagctctggcagaaagttctggggctttccgctgttcgctggagactgtgcaagtggccataagtctatgttggatcagaaatgtgatttatcagagttgtgttctcaaatgttgaagaaaattgatgtgtatgacatagacaagataaatgtgaggtataagcttgtttccggctctccttctggtgttgtagctgctgagtgcaagcaagcacaggcaagctgggttgtgctagacaaggatttgaagcatgaggagaagcgttgtgtggaggagcttcagtgcaacattgttgttatgaagcgatctcagcctaaagtccttcgacttaatcttgtgggatctcctgataaagagtctaaagcaacatgtgcagttccacctgtgctagatggttctaccagtaaaattgcaactgatgttaaggaagcacggagttcaattcgaggacctgttgtaaccccaaatagcagcccagacctggagacacctttcggaagtactgaagcgggaacttcctctgtctcgagttcagaccctgggacatctccgttttctgcttctgaaacaaatggttctctgaagaaagaggtgcaacaaacaaaggataaaattcagcattcagatgctaatatttctgattcagacagtgaaacattgagccctccagcaaatttctcacttcagccatggatgtctgatattctacagggaccagcatcgtcaagatcacttggaaaagttccacgaaaaaatcgcactgcaactgcagatgttttgttggaaaagttttccaagctggatctcctgaatgaaattaatgctatgagaagcaggtcagacttaaacttccgaggagatgtcagggatgttgttttgttggcaaggaatgcacctcctggaccacctccgctttgttcaatatgtcagcacaaggcacctgtttttggaaagcctcctcgctggtttagttatgctgaactggaacttgcaactggtggtttctcacaagcaaacttcttagctgaaggtggatttgggtctgttcatcgaggtgtccttcctgatggccaggctattgctgttaagcaacacaagcttgctagttcccagggtgatgttgagttctgctcagaggtggaagttcttagttgtgcacaacatcgaaatgttgtaatgctgataggtttttgcgttgaggacagaaggcgtttattggtttacgagtacatctgcaatagatctttggattcacatctctatggtcataatcgagaaacattggagtggactgcacgacaaaagattgcagttggtgctgctcgtgggctgcggtaccttcacgaggaatgtagggttggctgcataatccatcgtgacatgagaccaaacaacatccttgtcacacatgatttcgaaccactggttggagatttcggcctggcgcgatggcaacccgatggagacatgggcgttgaaacaagagttatcggcacattcggctatctggctcctgaatatgcacagagtgggcaaataacagagaaggctgatgtatactctttcggggttgtgttagtggaacttgtcactgggcggaaggctgttgacattaaccgaccaaagggtcagcagttactaactgaatgggcacgcccattcttggaggagtatgcaattgacgagctcatagacccacgactcggagagcgctactctgaaaatgaggtgtactgcatgctgcacgcggcaaacttgtgcataagacgcgacccacattcaaggcctcgcatgtcccatgttcttcgcattcttgagggtgacatggtcgtggaatctggtggttctgttactggcagtagtgattctgggagcagaagctggaggatgctgaacgaacagcaacattgccaggagtacagtagcccggctcaacaagagtcgcaaagggcaggcgaggggaaacgctcctacagtgccttgagggcctcttgggaccgagacaagcagagtatctccaacagatattagtgccgtctcataatgcagtgcagctgagattgtttagtcctgtattattccttcgccctacctcccggtctcaattttttttggcttgctcttttgtcttcacttcgtagcaatttgtaggccgaaagcttttgctgatacattgccctggtgtatagtagaaatgggtaataggtttacaagtatattgagctgcaagttagaccctctccaacaaggactcgtaaacgcactacaccaa

SEQ ID NO: 33337 - DNA, 3587 bp, Zea Mays
gtatactgcttccacttcacacgcttcctccacgccacctcgatctgtgcggcggcaaacccagagatccttgccccgtccgccggcgaaaggcgctcacctcccctcttcgctgtctgcgatgcagaggatactatcgagggccgctcgccggtgcacgaactcctcggcggcgttcaactcacctcacgcgcaggccaatgcagcaagtgttcactctgaagacgccccaacttgttcaaacatgattacagagaacgatgattttacatggaagactagttttgttagacccatgcaatcagaagtcgtcaatgccctccgtagaggtgaccggcagcgagcatcattgattctttcgaactttcatcacactaaggaatcactgaccaaggaagatttttcttatatattggagtattgtgcagaggcacctgatcctttgtttgttatggaaactttggaactcatggaggagaaggccattggcatgagtaaaagtatctacagatatgtcattagagctctgagcagagggggatatgcgaaggaggcacttcactggctggctcttctaggggagaaagaaagcactcatgccactacaccgatttttaatatctttctaaatgcctgtggtagagcaaatctgaaggacgccgaaaactgtctagagatactggaaaatctttttcttgggaagtctgaaataacatactgtgagcttttgaagcttgcagtgttacagggaaatttgcctgcagcttatgatatctggaaggagtgctctaggtattatagcccaagcattgtcacgcaaaggagatttataagggctttaactgcgctaggtgaccttcaatctgcgtatcacatattgcagcatatggtagcccttgctgcacaaagctgtgactatctgagggtgtcttctaaaagaagataccgatcatcgagactagacattcctgtacctgctttgaatgaatttgaagatctcaacctgccatcatgccaagggaagctggctaccggcgaacatttggttgatgctcaacctgagctatttgatgagaaaactcggccagctttgttcaggcaacaatctttcttataaggttgtagtagatgcgagtgttgcaaatacattgaagtctgcaccaagcacagtaaaacaaattttgagatgggcgttcaatgatgttttgcatgcatgtgtaccgttcaacaactgccagttagctgagcatttatttacagagatgcagaaacttggattgcaaccaacaagttatacatatgacggttttattaaaaccgtgatagctgggaaaggaattgcatatgccaacaaagtgattaacgccatggagagaaggggcattgaaccttacagtgatacacttgctgctctctcagagggtcatagcaatagtttacagttggatttggctgaggagtttttggaaagaatttcagagataaaaccaaagcatataggttcctttaatgctttgctttctggatgtgcgattatgaatgaaccagaaagagctgtccgcatactagctaaaatgaaacatgtgaacatgaagccaactctcaggacatatgaacttttgttttctctgtttggaaatgtaaatgttccttatgaacaaggagatgtgctctctcatgtcgatgtttccaaaaggataagtatcattgagatggacatgtttaacaatggaatccaacacagctttgtgtccatgaagaacttgatacgagcttttggagctgaggggatgatagaggaaatgctgaggtacctgaatatagcagaaaatactctgtggaacataaatcctcatcagaagagtgatctctacagcactgcgttgcatgctctggttgatgtgaaggaaactcacagagcagtaaagatgttcaaaatcatgagatcatgcagtcttccaactaatatttcaatttataataccatgatagagtgctgcaaatggctgccatgcttcaaatcagctagtgctttgctgtctttgatgcttcgagatggtttcaatcctacggttgtgacttttacatcactcctgaaggttgtattagaaaatgataattttgaaggggctctggatctgcttgatatatgcaagattgaaggacttcagcctggcatacagactttcaacacagtactcttacgtgcatatgctagaggtcaaattcatgtccttgaatatattttggagtgtatacatcgatcaaaaatccaacctgatccatcaacactttggtacacgttttgtgcctacgaggagcatgaactgtacaatactgcaattgagtcattgctagtcctcagcatgagaatgatatctgaggatgccggcattcctagtgagaaaagaattgtttttgaagatctaatcctcagtgaagaacctgatgctgaattcaggatcataagggcattccaagcaggcgaagaattccttgcgacagctttactgaacctaagatggtgtgccacaatgggtgccaccgtatcttggtcaccggaggagagtctttgggcaatgaggctggcagcctcgtatgatgctaacaagagaccacatataaacccctcggatgctcccaaatcttggggaaggaatccacttaaccgcccgtattgggaggctaacgggtgattggttgattggttggctacgcttccgttgatcacgcttggcacgtgtttggatggctgcagagcatctctaccgcctgctcccatgcatgcagcgttgattttttcccccactgggtagcctgcatgcgcggaaactcaactccccgtctccccctcgtttccagcggcccaggctggcacgatgctggtgcgagacgcccctacaaccaatcatgcgttaactgaggcagagctggagtctagcgtttcaaatctctctgttgagtatgatgacaatgttgtgttctgttttgctggaagccagtagatgttttgtttacctaactaacatgattgcagtacgatcgggcggcctccctacctgtcgtgaagcttgttccgcatgattgctccaaattggcctcgtaccgttttcaggcttctaggccaacagctctatgttccgattctttacattacttgataggttgctcactttatttacccagttgtaatttctgattatactggctgtcgggagcattagctttgcaaaactgtaggaatatatatgacaacgacgaagatcgagtcgcatggcagtgacagaagaataagaggtgttacgattacaatagctggaaaccaaaacttgctctggttattttgaaggtgtttagattttggaatgacgatgttacaattacactttattctggcaaaggtagattgtagaaggatggatagtgatgcactgttaccgcgtggtactgggttggtctttgtttgttgtacatcagttgttttctggcaggtcgttttgttgacttcgtagctgcccgaataacagaccaattattccatctcagttagagatcatttgtctacggcactcgacattcccttggtt

SEQ ID NO: 33338 - DNA, 3995 bp, Zea Mays
cgcccacaaccctaaccttaatcccgtcgccgccgtagccgcggaccgactgggccgactcccgcaccgcgccttcggcgttatattcggtccctgcgttctctctctccggttccccacctcccgcggcgagccggggcgctagggttttctacatggatccgcgccgcgcacccccgcggggcggcggcgggctctcttactccacgctgttcaacctcgagcctttgcagaacttaagggttcctgtaccagaaaatctcgcccgctacgggaacagcagctcaaatgggagtccaagcagtgagggtcaaggatccttgttggatcagtacaatggtgtacatgatgcttcccatggcttgcatcggaagcgaaaaaagcaccctgatggtgccggcgatgatgatcatgcagatgcctatagtaacaaaatgatggaggatcactaccgtgcgatgctcagtgaacatgtccagaagtaccgaaggtcaaagtttaaggagggtgcttttatttccgatccttctcaggtggcaatcccccaaataaaacacaaaaacggtggtaaaaaagttatgaagcacattagtaatttcagggatattgcggcattaaatgggatagaagcttcacatgagtataattggatagaatgtattgaaactcatggtggttttaataagcttgtagcatccgttgattccacctatttagatatgggggataatatacactacttagttccagagggttatgataagttagcattatcccttaacctccctatttcttctgatatacgtgttgaggagcacttcttgaagggcgcactagatttgtgcaccctatcagcaatgcttggtactgaccaaaggtttgaggcttccagccatggtggattatctgaacccctgccacaatttgaatctctcaaggaaagggtaaaggtgcagaaattttctcttcaagttaccgaggacccctttgcaattccggaaggagcagctgggaggatacgaaggtctattatatcagaaactggcaatttgcaggtccattacgtcaaagtcttggaaaaaggagatacatatgagattattgagcgcagcttaccaaagaagcaaatagtaaagaaggaaccttttgtaatcgtgaaagaagagtctgaaaagacttacaaactctggcagtatcttgctactaaaagcattccaaagcatcacaggaattttacttctttgatgaagaaacgacaagtagatgcgaagcgcttctctgatagttgtcaacgagaggtaaaattcaaagtaaggaggtcactgaaactgatgagatgtgctgcaatacgtacaaggcagttggctagggatatgctgatattttggaaacgagtagacaaagagcagtatgagttgagaaaaaaagaggaaagagaagctgctgaagctttaaaacgtgaggaggagcttcgtgaagccaaaagacaacaacagaggctaaactttctgctgtcacaaacggagctttatagtcatttcatgcagaacaaggctggtggctcagcgccacctgatgaggaagatgtccctgatgaagatgaggaagaagatcctgaagaagctcaattgaaaagagaggccttgagggcagctcagcatgccgtttctcaacaaaagatgaggactaatgcatttgatagtgaaactgtgaggcttcgtcaaacttctgagtctgttcttccaactgatgattcatctagcatggatcctagtaagattgatctattacacccttcaacaatgcctgagaagtcatctgtgcaaacaccagagttgtttaagggtgtattaaaagaatatcagttaaaaggcttacaatggctggttaattgttatgaacaggggttgaatggcattcttgctgatgagatgggtcttggcaaaactgttcaggctatggcattcctgtctcatttggctgaggacaaaaacatatggggcccctttctagtggtggctcctgcatctgttgtgaataactgggctgaggagttgattagattctgccctgacctaaagatacttccttactggggcccagagaggatgattcttcgaaagaacatcaaccccaagcgtttgtatcgcagagatgctagcttccacattcttattacaaactatcagatacttgtgaatgaagagaagcttttgagacgtgttaagtggcaatacatggtactggatgaggcccaggctatcaaaagttcaagcagccagcgctggaagacattactgagctttagctgtagaaatcgtctacttcttactgggacaccaatacagaacaatatggctgagttatgggcacttcttcatttcatcatgcccactctatttgacagccatgaacagttcaacgagtggttctcaaagggtattgagggtcatgctgagcatggaggagctttgaatgaacatcagcttagtagattgcatgctattttgaagcccttcatgctccgccgggttaagattgatgtcattgctgaaatgaccaaaaagaaagaagaaattgttccctgcaaattgagttctcgtcaacaaattttctatcaagctataaaaaataagatctcgcttaacgagttgcttgatggaagtcgtggcaatctaaatgacaagaagttacttagcctgatgaatattgtcatgcagctacggaaggtctgcaatcacccggagctgtttgagcgcaatgagggaagctcttacttttactttgctgatatcccaaactcacttctttctcccccgtttggggcattacaagatgtacattatgcaggcaagagaaatcctataatctttgagatcccaaagttagtttatgatggaatcatctgcaacacagaaaattctggaagcatctgtggatttcagaatggatatttgaacagttgaagctttcttcctggccacttcatcattctttgagggactagcattttcagtaatgcgatggaataggaactacactgatgaaattatggatgcattccttgattcagaagatactgacatccagttcagtcagaatgattccacaagagttcgtgcagttgcccggttgttgctttcttctacaaaggccaagcccagcttacttaggacaaagattggaactggcccaagtgaaggcccatatgaagcactggtgctttctcatcatgacaggcttgcttcgaacataagggttcttcgttcagcatacacttatattccgccagctagagcaccacctctaccctataggatatttgggtcttctccaccgatgagtaattttgatccagctaaaatgctcactgattctgggaagctccacaccttggatatgctactacggcgccttcgagctgaaggtcaccgtgtgcttctttttgctcagatgactaaaatgctggacattcttgaggattacatgaattttagaaaattcaagtatttcagacttgatgggtcttctgcaatctcagaccgccgtgacatggtccgagctttccagaacaggaatgatgtatttgttttcttgttaagcacaagagctggggggcttggtattaatttgactgctgctgatactgttattttttatgaaattgactggaatccaacacaagaccagcaggcaatggatagaacacacagacttggtcaaacaaaggaggtaactgtgtacaggcttatatgcaaagatactatcgaggagaaaatattgcaaagagcaaagcagaaaaatgcagtgcaagagttggttatgaaggggaaacatgttcaggacgatcatttgttgagacaagaggatgttgtttcattacttattgatgacacacaaattgcacataagttgaaagaaatatccatgcagccttagaggattgcccatgcagagaggattggacttacaatggcaactgggagtctctggat

SEQ ID NO: 33339 - DNA, 1805 bp, Zea Mays
gccaaaccgagctaactaagaatcgaagtagctgacaagcatttcgtcccgctttgacaggtatgtcctaattcctaaacaaacgaacgcattctcctcccaaaccaccagacatattgcagtctgccgtagaagtgaaagggtttggtgaaaaattccggccgcctcagcgtcgcgaggtgggggacgagacgaagccagagcgccccaaacccaaaccccagaaccccgacatagggttacgccatcgccatgggatctgttgcctccgcagcagcgccaccttctcctcactcagcgctaccccaggagggcgcgccgccctatggccccgggctcgccgggatcctcccgcagacgtcagtgggagaggagaagaaggaggagaaggtggactacctcaacctcctctgccccgtgcccttcgaggagatccagcgcgaggctctcatgtctttgaagcctgaactttttgaaggattgaggtttgacttcacaaaagggttgaatcaaaagttttctcttagccacagcgtttttatgggctccttagaagttccagcccaggggtctgaaactattaaagttccaactgctcattatgaatttggtgccaattttttagatccaaagttaatgctcattggaagggtgatgacagatggaaggcttaatgctcgcgtgaaatgtgatttgacagacaatctgatgctgaaagtaaatgcacagcttacccaagaggcacattactcacaaggaatgtttaactttgactacaaggttgacgtttctgacaaggaagtgactatcgagcacaattccaaatagggaacaatgcattctatggtgcaaattatattcagagtgttactccgaacctatcaatgggaactgaaatgttctggcttggtcaccaaaggaagtctggaattggttttgcctgtcgctataacacggacaaaatggtgggcactctacaggtcgcaagcactggaatagttgccttaagttatgtccagaagatttctgagaaggtttcccttgcgtctgatttcatgtataaccatatgtcaagagacgtaacttccagctttggttacgattacttgcttaggcagtgccgtctaagaggcaaaattgactcgaatggtgttgttgcggcatatctggaggagaggttgaacatgggtgtcaactttcttctatctgctgagattgaccattgtaagaagaactacaagtttggtttcggaatgaccgtaggagagtaattctgctaaaacaattgctgagaagagcacatgaggactttcgcagtctgctttgcattgtatgttaagatacttcaggtctcagttttgattgatcaggttctgccccgtcgaaaaaaatactagctgttgctgctttacagggttttgtctcagtgtattggtggttgtttattttcagctacttgagcatgggggccatgattctttgttcatcttggatgtaactagctgattggtgttccaatgatgttgtatttgcagaacgattttttccttttaaatcaccaacaaccaccacactaggctttttctgtaccatcatggacgggccacaagattttacagttcaaagctttggcacttgccatatttgatgtcgtcttgtgcttttgctcatccatgtaagtcagaaatctcagttcatatcagtgcttttgctcatccatgtaagtcagaaatctctgttcatatcagtttttttattaaaaaaagtttccgctgcataaaaagagaatgtggaatcattgtacc

SEQ ID NO: 33340 - DNA, 630 bp, Zea Mays
cttatgtgcatgggagaagaaagagctataggatgcatgtcggttcttggttttagggcatatacaacacaatttaatatggagtctcttggatagtctttaaaggttaattgtaaaaaagtataagagacgaatcttcatgacgagtccgtctctacatgactctttgtacatattatctcttaattgcatttaaggtccagtgcttagggttgtatcatatagtcttttagttgtctcttgtacttgaaaacccaatccattgtctcagagcgaggcgccaagacaccagcgccgatgtcgcccaacggcggcgccgactgctccgcgaggatggccaccgcggcggggaggagtcgctgtctagcgccaccaagcagaaggtggcggcgacgaagcagtacatcgagaaccatacaagtcgcagatgaagtcgccccgccctccacctgcgcgtccgcgcccctcactgcgcgtctgcattcgtcgaatccgcatcactgtgtatcctcctcctcctctccccctcaccgcgcgtccgcatctgccgactgagccaccaccacctactcctcgccgctctctaccaccacctcctcggctgtcatcaatggaaggtactaggtctcc

SEQ ID NO: 33341 - DNA, 1194 bp, Zea Mays
ggcagacacaatgaaaaatgattgaaatactgcgagtgtggcaaacaaactagctagttccaattttgagcactgctactttacataagtaaatgaccaaacctatcaccaaaaaggaaattgtgtacacaaaatggaagaaaaaacacaggacgaaatacgcgagaaattccaggacacagcggcggtcacgcgttttctgacggctgacctgattgggagcacgccgctgccgttggagttgacgccccggcctggagccaccgtcatcgaggggggattgccgcgttcggcgccgctcgcggtgacggtcggcctcgcactcgctactggtggtggtggaagcctcgcactcgctatcgctagtcgctactgatggttccaagagcaaaggcccatgttgtttgggatccagtaggcccaatcaagccgttgactccgaggagagccgcttccgatgtcctcgcctcttgccgacaccttcacccactcccagcaggccagcacacattggcgacgcttctcgccggagaagggtgggcggaggatgccctgcctggcccctgccaattgacggccacatggcttcttctagcagggcatcatttcctctcctatggttaagttgattgaaacttttgctgttttttgcaagtctcagagaactgcttatagggagaaggtgttaattgaagcagagaaacaatttctgcatgatttcacttttttcaaggaaaagttatcagttgattttggccaaatagtggatgtcgaatgcattgatagtacttgccaagttctgtgtgacaaggtcaggggttgttgttcaatttgcaagtcaaggtgtactgaagctatcatcgattctctaaaaattttggctgaagcaatgactattaagcatcagaagtttttgaattccaacaaccttctggcgaaagatatggatattaagtcagatgagaaagctaccaaaattgataccaatgtgcagccagttgatgttaagtcgaatgagaaaggggctggtgtggacattgttgaggcttctcatggaaaagctcatgtggtttttagctagatgatgctggggttatggttaatgaactactacttactactaattaccaggatttccaggagaacaggttgttgatgtcatttgttaatttccatgagcaagagaagatctct

SEQ ID NO: 33342 - DNA, 2933 bp, Zea Mays
cacactccttccttccttccttctttctcagtcactcctcgctagctctatctgagtgaattaaactgctcagggctcactggctcctctcagcgctaagcccagctgtaaagctaaggttccgacttccaagcagtgtggtcgccggaagagcgtagcgagcggcgttcagctcaccagcgttgcattggaaggaagggcgagagacggagcgtgagatcgatcgagcttcaaggagggcaagatgatttcggcggcggacttgtaccacgtgatgacggccgtggtgccgttgtacgtggcgatgatcctggcgtacgggtcggtgcggtggtggcgcatcttctcgccggaccagtgctccgggatcaaccgcttcgtggcgctcttcgcggtgccgctgctgtccttccacttcatctccaccaacaacccctacaccatgaacctgcgcttcatcgccgccgacacgctgcagaagctcatggtgctggccatgctcaccgcgtggggccacctcagccgccgggggcggggcagcctcgacctggactggaccatcacgctcttctccctctccacgctgcccaacacgctcgtcatgggcatcccgctgctcaggggcatgtacggcgacttctcgggaagcctcatggtgcagatcgtcgtgctccagtgcatcatctggtacacgctcatgctcttcatgttcgagtaccgcgccgcgcggctgctcatcgccgagcagttcccgggcaacgccgccggggccatcgcctccatcgccgtcgacccggacgtggtctccctcgtcgaccacggccgcggggacgccatcgagacggaggccgaggtcagggaggacggcaggatacacgtcaccgtgcgccgctccagcgcgtcgcgctccgacgtcgtctactcgcgccgctccgtgggcggcttctccggcgccaccccgcgccccagcaacctcaccaacgccgagatctactccctgcagtcgtcgcgcaacccgacgccgcggggatccagcttcaaccacaccgacttctactccatggtcggccgcagctccaacttcggcgcggccgacgcgttcggcgccgtccgcaccggcgccggcaccacgccgcgcccgtccaactacgaggacgacgcgtccaggcccaagtacccgctgcccgtggtgagtgcggcgcccggggtggcaggccactacccggcgccctggagcgccaggaaggcggcgacgaacgggcatgccaagggcgaggacctccacatgttcgtctggagctccagcgcgtcacccgtatcggacttcttcggcggcggcgcgccggactacaacgaccacgccgcggccgccaagtctccccgcaaaatggacggaggagccagggacagggacgactacgtggagcgcgacgagttcagcttcgggaacaggggcgcgatggaggacagggacgcggaggacccggcggcggcgggcggggaccctaacgcggtggccgcggcgacggcgatgccgccgacgagcgtgatgacccggctgatcctgatcatggtgtggcgcaagctgatccgcaacccgaacacctactccagcctcatcggcgtcgtctggtcgctcgtctgcttcaggtggaacttccagatgccggacatcgtcctgcactccatctccatcctgtcggacgcggggctcggaatggccatgttcagcctcgggctgttcatggcgctgcagccgcggatcatcgcgtgcgggaacaaggtggccacgttcgccatggcggtgcgcttcctgaccggcccggccgtcatggcggccgcgtccttcgccgtgggcctccgcggcacgctgctgcacgtcgccatcgtccaggtactttgggggaacggggggagagagacgcgggaaaagtcttgcggtgcctgccggccagcaacagcaaagcatcaatccgacactgttgcagctgtttggattgctgcagctgcaatccatagagagaaaaatactgtagaagccgcagcaagccgcagccggattgcagccgcagcaagccgcagcgaacaagctgatcgtcgctgtgcgatgttgcttttcccggtcgcctcgtgctcgctgtctctcgctctctggccttttgcgctcagcgggcagcacaaaagttacctttcctttccccctcatctccttctcactgtgctctggtttttgctttgcaaaaaacggcggaacgagcaggcagctctgccccagggcattgtccccttcgtcttcgcaaaggagtacagcgtgcaccctgacattctcagcaccgcagtcatttttggcatgctcatcgccctgccgatcacgctcgtctactacatcctgctcggcctgtgaccgtctcatccccatggagtcgaggatgccaccccctgcagtgctgcaactgtaaagaccactgctgctgtcacatcccgttcatgggagagggagataaggccaggaaggacgggagatagagctgctacgacattgtttggcgcttgcaaaagagtggcgtgttttctctctctctatctatctagaagtaggtatggggattgggtctgggtggatcctcgcaaaaaaaagggtgggaggtggacaagatgcggtggcaaaacggaccaaaagcaggcaggcgcaagtacaaaggagatccagtttgagcaggtcacgagatcgagatggcttggttttttttcgacgggtttagggaattttggtaggccgcgctgattgatgtgaaatcaacgccattctgagttatgacaggagagatttgatctagcttgagataaagagctcacctcatgagtttggtggattgagacacgggcacgggatttggctggaatttaaggttgatctttcgtttaattgtaaa

SEQ ID NO: 33343 - DNA, 1490 bp, Zea Mays
gaattgaggatatgactcagtatatagggtaatgtatgtaggactcgagagactgagccctataattatttgatgaaattttataaaatagagccaatgttggaagagtgttttatggttttgattcatataattaaaataggattatgtttagagtctttatgatcttagctacctaattccactgccaatttttagccaaataactagctaaacaaacacccctcggcactgatagaagagagaagaaacagacagcctaaagcccttcctctctcctcggcgccggaatggcgaaaagcggcggcgagtccactgtggaggttcctattcccgcttccgcgtcggctacgaggccgaaggcgaaacaccgtatagagatcgaggggtaccctgtggatggcgtctccattggcggtcaagagacttgcgtcatcttcccgactctgagcctcgccttcgacatcggccggtgcccgcagcgcgccgtctcccaggagttcctcttcgtctctcacgggcacctcgaccacatcgggggccttcccatgtatgtggccacgcgggggctcttcaggctgcgtccgcccaccatcttcgtccccgcgtgcctccgggacctcgtggagaggctatttgaggtgcaccgcgccatggaccagtccgagctcaaccacaacctggtccccctggaggtcggggaggagtacgagctcaggagggacctcaaggtcagggctttcaggacctatcacgccatacccagccaggggtatgtgatatactcggtgaagcagaagcttaagcaggagttcattggcctaccagggagcgagatcaagcggctcaagctatcagatcacaaatacggtgtccacccctgaaattgctttctcgggggatacaacagcagatttcattcttgatccggataatgcagatgtgctgcaggcaaaaattcttgttgtcgagagtacctttctagacgactcaatttcagttgagcatgcaagagaatatgggcacacacatttatttgagataacaagtcaggccgacaagcttcaaaacaaagctattctactgatccacttttctgctcgttatactacagaggaaattgatgcggcaataaacaaattgccaccgtctttccgtagcagagtttatgccttgaaggaaggcttctaataaaaacatgaaccaggaaatcagtattgaagttttgtcggagcagttttccaaattggattgcgtgggtatttttcaccggaaacctttttgctatgtgtgctctgatgatactataccaatcatctgaaggttcatgcggggctttttgttgtcggtactcatgcttgtgacattggaatgtttgaatggtgaaatgcgaaacatcatgtccagaacaggaactctcctcacctcatctctgaagatatacaagtagtactaaatcaatttcacacaaaaaaaagagctacccattg

SEQ ID NO: 33344 - DNA, 774 bp, Zea Mays
gccgttgtcacatccttgcgcggactcgcgcacgccgtggctacaaatgtggttgcccctgttttcattgtgggccacttaagcacttagatagggaaccctcgccagcaactgcagagaccgtgtcatactccgccattgagagacgacgcagccgcctcgtagctactcgcccccaccgtcgtcgagtgcctgattggagccacagaatctcgcctgaacgcagggggaagtcactcagacccgtttctcggacaatcgtgcccttgggcgtgtggaattcctcgccgtagttgaagcttgccgcagagccgcgccgttgcgcggatagtgtcactcgtgctccataccaagtgttgggggccttcttcttcgtcgaaggtcctccaagcaaaaacaccttcgacaagacgatacacaagcagatacgacatgaagatatatgccgaagctacaattgaaagagcttctgcatgatgacatgcttaagacgaaggatggcaccgacttaaagaggaaaagaccacatagtccctgataatttgtattatggttatgattagttatcaaggacacgaatgtaatttttttcgggctgtgtctggtgcctataaatagatgaacagtaaccccgtactgttcacgctgacttgtaatcactcacgcgtcactcctggatctttaccttctatcaagcgaaggtacaaatgtaatttaaatatcattgatgtttgttcacgattatataatgataatgtgaatagtctaatgatt

SEQ ID NO: 33345 - DNA, 1918 bp, Zea Mays
gatgcacccgtacgtctccatccctccctccctccctcccccctcttcttttcttcggctcttccgccgcctccacgcggcctacgccacctccccctcacctcccgccgtgcgccccgatccctcgccgcgacctcatctcgccgaggactggatcgccggagggacatcgtgggtgggtgggtgtgtccttcgcacccatgcggcgttagctgatgacgacctcgcctgagaggggagaagcaccacctgcgccgccacgcgattcaccgtgcgaggacgccgccccagctgccgccgtcgttgcctcttcctcctctggctccgagcgcgaggaagacggcggctccaggcagcccaaggcatctgtcctgtccggcgtcttcgcgccccctctcgccatattcgaggggcagcagcaggtctcctcgacgccgtgcgacgccagctcgacaaagccgccctcggggtcctatgcttggtccaggattctgaggagggtgtcgcccgaggaagaggagtctggcggctcggattctgacagcggccatgctgcgtttctggaagatttctcttccaggatatggatcacttaccggaaagggtttgatgcaatacctggttccaagctcactagtgatgtgaactggggatgcatggttagaagtagtcagatgctggttgctcaggcactgatttttcaccatcttggaagatcttggagaaagccatcagagaagggttgcttataatgaccaaatgttcatatgcagccatacgacccagattatatacgggtcttacacctatttggtgactctgaagcttgtgctttctctattcacaatttacttcaagctggaaggaattatggtctggctgctggatcatgggtgggtccatatgctatgtgccgggcatggcagacccttatccgcacaaatagagagcaagctgatgctgtcgatgggaaggaaaatttccctatggcgctatatgtcgtttcgggtgatgaagatggtgaaagaggtggagctccagttttttgtattgatgttgctgctcagctttgctccaatttcaataaaggacaatgtacatggtcacctattcttttgttgattcctctggttcttggccttgacaaaattaatccaaggtacatcccattactaaaggagacgtttaagttcccacaaagcttgggcattttaggtggaaaacctgggacgtcaacatacattgctggggtacaagaagatagggctctctacctagatccccatgacgttcagatggcggttgatattgcaccggataacttggaggcggacacttcctcgtaccactgcagtgttgtccgagatttggctctagaacaaatagacccatccctagccattggtttttactgtcgcgacaaagacgatttcgatgatttctgttctcgggcatctgagttggcagagaaagccaatggagcgccactctttactgtcatgcagtcagtccagccatcgaagcaaatgtataaacaggatgatgggctgtgctgttgttctggcagtagcatggccaacgaggactacgaccttgacgcctctggcgaggcaggagaagagtggcagatcctctaaaccaggggaacaccgatgacatgttgggttgaaaaactcatggaacatgttgcctgaatgccctcgtttgcgtgtgaatacaggggatgatttgttgtctctgagtgtcgttgggtgccaacgtctcttaggaggaaaatgttcaaaacgtgacaggtggaaatgttcaaaacatacacttgtgaatgatcatagataaatgtatttaacattccatttgctaacaccatttcaccacggcgtgttcgcttttcaattgcttgctagaaatgcacctgcca

SEQ ID NO: 33346 - DNA, 3444 bp, Zea Mays
ttcactgcccagagaccaccaaaggaaaaaaaggggactcgctctcgccaactcccctgctccacagccacaagcccactcggatcccaatccgagccctactcgtcgtcgacgacgcgacggccccgcgtgcgaagccagccagccagccagccagccatcgccgtggaccggggagcccggagggatggaccccgagaagcgcggctacgagctccaaaattttgtggcgcatgatgcggaagttaggtccctgtctattggcaaaaagtctaggcgtgtgttcatcaccggtggcaatgatcgcaaggtcaaactgtgggccattggcaagcaaactccacttctgaccttgtccggccacacaagtgcggtggaggctgtgcagtttgattcagcagaggtgcttgtgcttgctggctcgtcaaatggttccatcaagctctgggacttggaagaagctaaagttgtgcggtctctcactgggcacaggtcaagttgcactgctgttgaattccatccatttggcgagttttttgcatctggttcgtcagatacagacctgaagatatgggacataaagaaaaaaggatacatacacacatataagggtcacagaggagcaattaaaacaatcaggtttacgcctgatggacgatgggttgtcactggtggggaagataacattgtgaaggtgtgggatttgacagctggaaagcttctacatgatttcaagttccatagtggacaaatcaactgtattgattttcaccctcaagaatttttgcttgcaacaggctctgctgataggacagtgaaattttgggatcttgaaacttttgaattgataggttcttctggacctgaggtattgcaagtttttttcttaaatcaagctggatctggttatgaaatcgataatttgaagaccacaaactatggcttctcaaattctttagcatgcatgttctataggcatggtaactacagtacattcttgctgtggccttgtattaatatctttgtctttcttataaatcgtaactgtaagaactttctcagaggaatttagctcgcatttccctacagctgattcagttttataagagttatggtctgacatctagcctgagcttcacgtatgtgttgttccctgttttttaaccgttgctctaaaagcacatgaggagaacatccatcttcctcttctgtgatagcttacatgactcctctctccagggtaccggtgtacgttctatggtctttcacccagatggtaaaacccttttctgtggattagaccaaagcttaaagggaaactcttgggatgctcctaccatgagtgccgtgttggtctatgggctgctgatatatcactcattggaccctatgctcttggtgtattgcccaaagcgaatttttttgctgagcttgtgcagtctatggaagataatcctgtgaaaccagttgatagcactgcaaattctcgtcctgcttcagcaatggcacattcaagaagttcatacaaaatcaaggagtctgggattgctcaaagcagggttcgtggctcacatttgactccagcaagtacagataagaccaagaaagataggagcagcactattccacgaagacctgattcgtctttaaagtcatctgttcagagtactaccctgatgaggcgtatgaagcttgttgatagtccttccaccaacacaaaaaatgtggaacgtaatgttgggcagagagacatttcattagcgtctcgtgcagtgatggctaataattctgcaactgctaagaaaagcaatcttacagaatcagctttagtgaaagatatttacactacatctcaggctgtttcagcacctattgttgtgcccagagacattttagaggacaaaacagtaagcaatgttcgtcgagggactggagagacagctgcagtcccagatgattttcggatccctgttcacagaagaaaaccctcacttagtggcagtgctgctgatagtgatagctcatcaagatcagtgttcactgaacctgatgtttgctcagagggtttgtctagcttaaaattctcctttgggctaactccatatcacaagaaagaagaatttggcgatgtggataatgaaggtattgcacaaatagcagaaaagatggaaagaacagtgtcgctggaccattctcagcagttaaatgatgataaatcctttgaatcaccatgctcaacaacagagactgccaaggtcaaatatgttagaggagttgctgtgccactggggaaaacaaagtctcttgttgagagatgggaaaaaagagagacttctagcactgattattcaccacaaactggttcttgtggtgatcgggcatcgagaaatgacaaccatccattccatctggcggaaccaagtacaacatttgaaaaggacctgtcaactgtagatgaagcgatggctcctgtcaatttagtgcggaaccatgatgaattcctaaatgctgtaaaacttcggctgacaaaactagagatgatgcggcatgtctttgaacaaagtggtattaaaggagcaattgctgcagtggcaaagctacctgacaatgctgttcaagcagatgttgttagtgctctcaaaggaaagcttgatcttttcaacctggaatttttctcaaattttctgcctgttcttgctgggttactgtgtagcaagactgaaaggcatgctatggtctctttggaaatgttgttggatcttataaagatttttggaccagtaattcattcagcattatcagcaaatttaggcgttggagttgacattcaggctgagcagaggttgcaacgttgttcacggtgctttaaccatttgcaaaagatccaacagagtctgaatccattgattctgcggggtggtcaaacagcacaacttgcacaagaactaagtctttcattgcaagatttggtggtgatctaggcaagatgatgtacaatgtatacgacagagtagataccattggttttggcgaaaagtgcccacagttgtgtagcttgtaattttgtcatagctttgcaagtgggttttgcaactgtgttttaacattgggctggcattcagcctggtcccctgttgtaaatgtgagcctagccgtgaatgagtctgtaattagccagccacatctgctgtgtgagcagccctgaacaaaaagactagttgaaaggaaacaaccgcaaaggggatcattttggttacaccccaggtggtaggatggctcatgtagcatgcggtgattggcaattccattctttgaaagcatctgtgtttaacgtatattttgtagaagtaaattgagttatgccatagtaacgatgactgattgggctaatatgccttttgtttcttcaactgaccaagaatactaagagtcggctagttttaa

SEQ ID NO: 33347 - DNA, 2267 bp, Zea Mays
actccacccacctccgccgcccgccatggcctccacccaactcacgtgcagcaggttccaactcccaagatctaggtcggacaccggcgcacaccacgtcagcgacgccaagcaccactcgttcgacctcggcaagcacctgcctctccgtcatcgcccccccccccccctccgctctctatcgcttgctctagccgatctatgtgcatggggctcaacgactggaacaaatcctcgtcgatgctcagggatggttttagggtagatggagcatcccctacatgtgtcttccatgggatggcccaactgcagatctgttcctgggatactacacaatgactacattgcatactcggagctgctcgacaggagcgtcgtcggcggtgctgtaaacatctcctagagtcctcgggcacaagaaggtcaggcggtgatgccaatgcagatcatccaatcagatccagaatgcctgccactgtatacttggagctgctcgacaggagcgccgttggcggcattgcaaacatctcctatagtcctcgggcacaacaaggtcagccaatgacgccaacgcagatcatcccatcggatccggtattcttgacgaaaatccctgaagatgggaaacccacgctgctggtgcaaacaccgccggtgatgccagtgtaggccccattgcccttggacgggatgtcactgactacaatggagtacctttctttcttcgatgtcagtcgattatgtttactatggaatatggatgttctcttatatgcttggttgtagctcctgacatgcagttgtagcttggctcgaggcgggcatcagcgacgacaaacatcctgctcaatttgttgtatgataaatactgcgaaacaatgctggtgtttcataagatgaccgtgcagctcatgaaaatccagagggtggagtcgagcgagacgacgtggccggcgcggcgccaggtcgtggcgtgcgccgctgtttgctggtcgtggcgtgaggtcaccaaggaggtggtgaagacgctcaaggagtgcggcaggatcaccttccccatgtcccttaagcaggttggcactctctgccttttctctactttgatgatcaatcacatgtcttcacctttgcagaggcttatgattttgaagatctagaatctatggttgaagaaatagccaaagcattcaagacaaagataatgtttatatatgttgacactgctgaagaaaaccttgcaaaaaccattcctcactctttatggcattgaatcagaaaaggcctactggtccagttcttgaaagggtgggaatgtgtccaagaagacaaaggcatcgacccgccaattcttcgctacaaattaaaacagcactagggtgagatcagtgggcttgagagtagcatcatccttcaaacatgatgatgggtttctagctgatggtgtctctatagctcactgcttcctggaaaaaatgtcttttgaagctaatcttgctccatacagctaatcttcacatctttcaaagcatttgctagggccccttcggtgagcaatagaatacgacttgcgctaccaaagcgtccataggttgaggacctccatgacacctatgttggtgtgggttgtgccgccccatcgtgaccgtcatcgattgggcctccgagtccaggagaagacctccgatgaagaaagagacatgctgcacatgcacgagggtacttgcagatagatgtcggctctatggacgaacactcgaccaagtcagatgaggagtatgagggcctagccatgcgagacatgatggctaccggtccaacaatgagcagcaagctgtgagttaaagatgaactcacctgtcctggagagcaacatccataggagtgaggcaaaatggcgggtaccaccacaacatggacccgttcctgaagatgtccaaggaggtggtagccgacaccataatgtcttgcgcgtcattgtgtcaccggccggcaacacgctgcgctggtaccggcgggtgttatgtttcttaggcgtatgtttctgtgctttgagctgtgctatagactggttgtgccaactactgattttaaaagaaaaaggtgagctgaaaatcattgttgaaaacaaacatgtaacggttcgttctcatcagttgtgccaactaccaatcatttcattgatcagaatctgtcgttgctcatgagaaccaaaagtaagacacttcttaataacattggatgcaaatttctgctagcttatcttcact

SEQ ID NO: 33348 - DNA, 263 bp, Zea Mays
cttactggagctggagttcctcatttgccctcgcccttcctttccacgcgctcatggagctcgcttctttatccttgccggcgagccgggagactctgtggctcgttacttggctactgggaggagaagtggcgtgctcctcgcatggatccaccgtcgaccacggctgccttcatcctagagtgtccctcaccaccggttgtgaaggattcggcgccatcctattacacccagttttataaggtaaaccgaatgcaaaccaa

SEQ ID NO: 33349 - DNA, 803 bp, Zea Mays
tctagacatgtgatgactaatcatgattagtcaggcggctagggggtgagcagcaagaaacatattgcaattgctgagcagctgagacattgggtgcatctactatggctggagccacttcggtttaagtttttgggattaatttttttggaccaatttgcaacccttcccatcctaactgctgctggtctgcgaggatgagctcacgatcatggtggtagcataccttctgatatcgtcatcgtcatcagcaactgctcgagcaagtgatttgattgagaactgggggagcgattccttcccgagcatggcgaacggctccattgccatatctttcgtggcatttgttgttttcgccatttgctccctcatctccgcatacaatctgttccgccgagacatgtagctgatcctgacaacttcatttctgaacaaagtttttggtgcaggtttcatgtgtgtataaatgtgatgggaactctgaacttctagcgatgatgtatctacatgtcaaatggcaactcacttgtgtggtaaatgaaattcagaagttctcgcaattttttctgcatgacatcacaatggtcatcagttggtgtgcaatcagccaatcaccacatacatatactacggatcaaggttcataaaccataatgcagctccaacaacaccgtttacaagttgcaacagctggaactggcaagaattgcaaagatacgcaggctactacagcctaactgtctggattttgtctgcctctgcaacggcttggagctccacgtgagctcctgcacggcggccgg

SEQ ID NO: 33350 - DNA, 223 bp, Zea Mays
ggaagactttacaaaacattcttttcatttctaaaactgaaggttattacataggaagttacatttattacaagtccttatatactcaaagtgcataacttattacaataacaggaaggtaggaaccctccaaagcttaaacataagcctaactaatcttcctccagaactggaaacaccctccagcctaaggaacacctagagtactcctcatcaccttctt

SEQ ID NO: 33351 - DNA, 4655 bp, Zea Mays
  misc_feature (4654)..(4655): n is a, c, g, or t
aagacgagctgctggggcgcacacacacatcaccgccgcggcgcgccagccatatccagcccagaaaactcgccagaaacaaatccgtttccctttttctgtgttcctaccccgcccaccaagaaccctgcgcgtgcgaacaagccgacgattcatcaatcgccgtcgccacctcccgctgcccctcggcctccgatcccgagacccgttgccgccgctgagctgccgcatttgctttgggggtggagggtctgagatggcgccgtagcggtgggacggggagcagcagcagctggatctcttctgggttgcagctgccgccgccgccgccgccgccgccctccctgcaagcaacccttcgcgctctcgccttgctcgtgctcgtgaagttaggaacattgcttctctttggcttctggtaatatggcagcgacgtcgccaaacaacataaggcgcaagtactcgtggtggtgggacagtcatatctgcccaaaaaactcgaaatggttgcaagaaaatctttcagatatggatagtaaaattaagctgatgatcaagatcattgaagaagatgctgaatcatttgcaaaaagagctgaaatgtactaccgacggcggcctgagctgatgaccttacttgaggagctgtaccgtgcataccgagctttagcagaaagatatgaccatgcggcaggagaactccgtcaagcacatcgaaaaatagcagaagcatttcctgatcaggttctaatggacttggatgatgaccttccagcagaaactgcttccattgaaactgacatggacaatccagacatggctccatatttcctctctttcatcaacgctagtgatttgaaaaggaatgctaaagatgaccaagattttgagagactgcagaaagaactagcaagcttgtcacaggaaaaccaagacctcaaggacaggatctcgtccatgttagagcaaggcaacaaggctgagtgcgagatccttcgcctcaaggagtcccttgctcaacaagaagcagaaaaggagtctgcagtttcactatgccagcaatcaactgctagactacaaaacctgaagtctgaaattatgcatacccaggagaaattcaacaggctgaaagaagagatgcaaactgaactacaacctttgaggaaaggagatgaacatttatttttacttgaaagagctaatcaggacttgcacttggagctagataacctgaaacttctgttgaaacagaagcatggcgaagtaaatgaaaagcaagatgagttggaaaagcttcatatctctacagaagaagagcatctcaagcgtatgcaagcagaaatggcacagctttctttggaaaaacagttatcactggcacaagacaaactgaggcatttgactcttgagaagcaggttgaagcacacaagataaaggaggtcgaaacgagcaaagttgtgattcagaaagaactggagaagattcttgaagagaaccaaaggttgaatgaccaaagtcactcttcttcagcagtgataattcgtctgcaggatgagataatttccatgaaaaatgtgcaacgaagattagaggaagagatttttcagcatgtggaggaaaagaagacacttcaacatgagctttcttatcttaaagaggataggagtgacttggagaggaaacactctacaatcaaggaacagataggatctatgaacttgaatttggaatctctacaagcactagcacaagagctgagggatggcaatgttgagctgaaagagattgtcaagaaccatgagagcattgaacttgtgcatatcgataacctaagaaagttggagaggatgtcagagacaaatgcacatttagagaagtctttgtcagctgcaacaactgagcttgagggactgagggagagcaaggtggcattagaagaatcatgcatgcacttcagatccacgattaacactcatcagtctgagcgagctgtgcttgtagcgcagattgaggtaatttctcagaccatggaggagctactggagaagaatgttttcttggagaattccttatctgacgctaatgctgaacttgagagtttaagaatgaagttcaaagaactaaaagaatcttcagaagcactccaaaatcagaattctgtacttcaatctgataagagaactcttgtccaccaggttgagggcatcactgtaactctgctgaatttggaaaggcaatacaaagaactcggaaggcggcactcagatctgcagaaggagaaggacttggtgcttgatgaagtgatcaagatacaggaacagataaggcttgagaggaaggagcatgaagattgtacacagtcaagcaacattagatttgatgctctacagaagaagattagtctattgctagaagagggcaggagtagagaggtgcagcttggtgaggaggagctcaagattgtcaaagctgagatagagatatttgtcttgcagcagtgtttgaatgacatgacagaagtaaattctgaaatcgcagaacaactgcgaaagaataaagaaatatgcaaggtccaggagggaaaaatctacagcttatcacagcataatcagaaactaactgaagggattgattcagtagtgagagtattgcatctggatcataagtatgaatccttaggccaaatgaagcttgaaatcattgtgcagctcatcttaaatgagatcagctgcctgctgaataacatatctgatgcccaggatgtgaagcagaaggagcttgttgagaaatcacttgtagttacacttctggagcatttcgggcaagaggtggctgacttgaggtcagagcggaatgtcttgaggcaagatcagcagataaagattgaggaactgctccagctgcagagagaaaaggaggaacttatgaagataagtgatgaattcttggaagaggtggaggctcgtaatcacaaagtggatgagctaaaggctgaggcgaagttcttggttgtaaggttctccgaactgcaagagtctaggaggtcattgcaaagcgagatcaccaagctattacaatcgaactcttttctatcaaatgaactaaatgattccattgaaaaacagaagaggtttgaacatgatttcagcaatcttgttagtgaagcagttagtaaagatatcctcagtgtgatctttagaagccttcatgaagagaggacattgcagctgaagtctttgcataataactttggctgtcttcaaacagcaggcggtgagctttatcaggagatcaagatgatgaacaagaggcttggagacatagaaatggagaacaagtaccttggcaaagaactaagtagaactatgagtgtttatggtggatctattgtgcaaacagcaacaggaaaaggaaatccagggcgaagagatgccaaccttctgaattcaaacaggaaaatccaacaagattgtcatgtaaatctggaggtggaacaagaggaagtttgcaatgctgattttcaggagtcaaatgaaacactacaggatgaggtccgtaagttaaggagcgaagtggaaatgcttaggagcaaggagaaggctgtgttcaacatcaaatcctgtgatgaagagatcatgaaattgctggctaacatgcaaatggctatcatgaatgcagctctgttcaaagagaaggttcttgagctcatcataacatgcgagagttttgagataagtgccatggtacagaaggaggttctgaaggaagaaatcatacaaagaaattcatatgtagatgagctgaaggacaaactaaatgctgttgagattgaaaacagaagactgaaggtcgacctaaatggtgatttcacaatgttagggtcattgcagactgaagtcagtgccctggaggagcaaaccttatctctcgctaacgaccacttgcatacaaataagctcaggatggaggaaaatgcattatctccacaccttgtgaagaccacaacaagatccagtggcgaagaaaatgcattgaggatggtgaaggggatggagctgcaaaaattgcatggaacaatcaaagcccttcagaaggtggtcacagatactggtgtcctccttgaacaagagaggcttgatttcaatgccaatttaaaagaagcaaagaagcagatcgaggtgctaaagctcaaggagatcttggatgatgatataattgaaatgaactacgagcaaatgttaaaagacatacagcttgacctcattcaaacttcttcaggccagaaaaccagtccgtttggtcaggaaaagaaaaatgtagcacaagtagatgacaagatggtaaactcacgcggttctattgggccgagccatggacatgtggctgacgacctaagaccgccgcaaagtgagtcatttgggagagagaacaatttaatggtcgtgaaagagctcagcattgacaagcaagagttaccgaggtcgcttgctatggagccacacgaggagtggagaaacaaggtcgtagaaaggttggcttctgatgcccagcgactcagtgccctccagtccagcatccaagaacttaaaacgaacgccgaaacatccgaagaggtagagctcgggagtgtcaggtaccaaataacagaagctnn

SEQ ID NO: 33352 - DNA, 1873 bp, Zea Mays
gtggcgtggcgttgcctccccttcgcttcactccgatcccctatcgcggccatgacgggagccaagcaatctcgccgatgcaacctcctgacgtttttctccaccatattggccaccgttctgcttttgatcttccagcgattctcgccgacggcagctgcagtgccgcagtggagaaggggaggaactcaggaacatatcgacgttgcgcggggagccgaggcagtgggccacgggcaaggacgatgcgaagattctctccgaggcggaagctcgcgctggcggcggaggagagggtttgctgacggcggacgagggacgcgagttcgcctcgctctacagcatgctgcagtgggcaattgggaactctgatccggataagttgagagaaaaggctgcagaattggtgaaactatcggcagaggaattactcaagagacagatggagattaaggagttgatggagaagttcaaggcgccatcagatgctgagttgataaagattgctattgctgacttaaataattcctctctggaggaccgccaacgtgcactgcaagagctcttaattctcgttgagcccatcgacaatgctaatgggcttcttccgttaattcaggaacttggcaatgcagacgaaggaataagaactacttcagcatgggtgctgggcaaagccagtcaggacaatgttcttgttcaaaaccagatcaatggatatggagctttggacagattagtgaagatgggttattccagttctggaccagaagctgcaaaggcattgtacactatatcctctttgattagggacaacgaacatggtcaggagttgttcctttcagaaaatggttatgcaatgttgcaggtagaaaaaggaaatcatatattgaacatcaaggcaaaagcgaggttgaaatgtaccaacgcgttgtttgtttgcagcacatattgtcaaccacaaacactagtgttcggcttcagaaaaaggttgtgtctttactggcatatatagctgactttcagctaaatacagggaagtcacaagctcaatccttactcaaccactttttcatataatcagtagttgagatgatatcagcagtgcctgaccttgacctccaggagaaggctttgttagctgttaggaatctgctgcaccttacgtcagctgatgctacagatcttcagaagttttcaggcctggatgattccctgaatgcactgaaggtgcaattggatgagttgacatctcatgaggaacaaagagagtatgctccggaaattgaaattctccggagagaagtccacactgtcttccagcggaaaactgaccaggcaagggtggtgacaaatgaaggcaaatataatggttagaaacatttgctgtccatataagcgtttgttcggttcttccccaaaccaagagggttgggggatttaatagtcccccctcaattctctccaaccccttggtttcgggaggaaactaacaagctctaaaggtgatcacataacaattcctcaactgaatgacaagttgtcaatagaacgagttgcatgggatcatagatacttcacagagataggatgtcacaaaatggtgattgtctatcaagttacagaacgaagaagtgcagtggaacagagttctcattctcactgatttctgcttcgtgtgaaactgtttcatagtacacttgtagcccattgaatgtcgatgttgttcatacgcaaggactcaaagttgttactgggcctgaactaaggctacaatcgcaatagccctgattcagttgcttcctgttcaaatgaaatgttgctcgagttctttcatacgtaggcattttgcgcaacttccactggaagtaaa

SEQ ID NO: 33353 - DNA, 2355 bp, Zea Mays
caagcaaaccgagtcgagtccacagtccacaccaccaccgcgaggtccactaaaaaaacaagagcattaccggcaccaatcaatcaggctggcagtggagtgacagcggcggcaacaccacgcccacgcggcgccggagccgatcccccgatggatctcccgccgctctcccaccaggccctcttcgccgccgtccgatccgccgacgcgcccgccgtccgcgcggtcctggccgacgccgaggcgtcggccacctccttggccgcgctcgccgccgctcagacggacgccggggaaaccgcgctgtacgttgccgcggaggccggcagcgaggaggtcgtgcgcctcctcctccctctctacgacttcgaggcagccaccgtccgctcacgccttgacctcgacgccttccatgtcgccgccaagcagggccacaccggggttgtgaaagagttcttggggcggtggccagggctttgctcagtctgtgactcttccaacactagtcccctctactcggctgctgtcaaggatcacttggatgtggtaaatgctatactggacactgatgatagctgcataaagattgtgcggaagaatgggaaaacatccctacatactgctgcaagaattggataccatcgtattgtcaaagcactcatagagagagatccaggaatcgttccgatcaatgataggaagggacaaactgcacttcacatggctgtgaagggcaaaaatacagatgtagtggaagagttattgatggctgatgtttccattctcaatgtgagggacaagaaaggaaatactgctttgcacatagctacacggaaatggaggccccagaatatctcaatgtgaaaaacatgtcgtatgtaagccatggtggtttcttagtggagcagagcatctattggaagagcaaccatatatctaagaacacacgaccatcttataaagcactataaagacattagttgctgctgctattaactgtctgccactagtcttactaagtcattgcaacggcgcaggaatgtatctggatgctaatatctcggtatcactattgtggaagtgtggctgacttctcaacacactattctagcagtccagcccaccccacataggccttaaagtattatataaatgatgcttgtgtgttaaaggaagatcaaaaatagccatccagaaactcacagaacgatgggatggtacagcttcttcttagctatgaatcacttgaagttaatgctatcaacagtcaaaatgaaacagctatggatttggctgacaaagttccttatggtgagtctaaaacggaaataatagagtggctgacagaagctggtgcaaagaatgccagaaatgttgggaaaattgatgaggcatcagaactgaggagaactgtgagcgatatcaagcacaatgttcaggcacagcttagcgagaatgctaaaaccaacaaacgagtgactgggattcgcaaagagttgcagaaactgcatagagaagctatccaaaacaccatcaattcagtcaccttggtagcgaccctgattgcctccattgccttcgtcgccatattcaatctgccaggtcaatacttccaggatgtgaatagtgggggagacattggtgaggctgaaatagccaagcttaccggtttccgtgtcttctgccttctgaacgctactgctctcttcatctccctcgcggtggtcgtggtgcagatcaccttggttgcctgggaaactggtgcccagaagcaagttatcaagatcgtgaataagctcatgtggacggcatgccttagcacgggtgtggcttttatctcgctggcctatgttgtagttggcccgcagcatgcctggatggccttcacggcatcagccatcggagggccgatcatgattggaactttcctgttcctagcctatcttctgttgcgcccacggttcaagttcggcgaagacagacagcgccgcatcaagagggcaagcggcagcaaatccttctcctggtcaatccatgatgggttttcagatctggaagccttctctgatcatgagaagaggatctatgccctgtaggagggtgtaacagtaactactcccacaagaggcaactgggagagtacaaatggttcatgtatatatttggtttagccgttttagcctagccgctgttagacctttctccccatgtacaatatctaataatgaagagctgcagctattgtaaagtgcaagtattgagcatgcttgaaagttgaaccggttgccctttgtgaattggctacacgttgtgtcgtattattattcccttttaaaacaaaaaagtggaataata

SEQ ID NO: 33354 - DNA, 2518 bp, Zea Mays
caaaaaatcaccagaaataaaataaataaaaatcccacagaagaaaaaaaacaccccgaaaattctccctcgctctctctcagtctctctctccgtgagggaggaagttgggcttcgttctcgagtactcttcgttctcaggcggcccccggctgcttctgctggtcgccgcccagctccaggtttcctcactagggttaccattttaacacagttattagagaaataagggccagcctggttgcccgaggctgacccagcacctgcgatggaggagaaggctgtcacaaatggagcggcagctgctgatgttgctgctcctgataataaggataacaccaaggaagaggttagcaagagcaaggagccagtagcgaataaggatgctgaagagcagaacaaaggctcggaaaatggtgctgagggccattcaggtggagatgtcaatatggcagaggctgagatcactgaggaaggtggtggtggtgatgctggtgcggcaaagcaggtggattctggagatgtcaaaacggatgccgatacaaaggaagatgccaatgcgagaacagaagaaggtgaagatgccaagatgactgaggctgacgtaggaagtacagaggtcaaagataaagaagagaaggaagatgaagttgagaacacaaatgagcaggatgaatcgaaggagcaagagaaaggtgcttcggctgagcaagaggaaaacgaaggaaaagaaacggatgctgatgagaaccaagaagaagaggaagcagaagaaaagggttctgctgataagaaagatgaagctgaagctgaaggtgacaagaagacggaagagaataaggagactccgaagaacaagaaagcaaggagtgccagggatagaagccagggaaaagataaggagcaggatggatccaaatccaaggaagccaaaagtttgctgaacactccaagcccatatggtaccaatcgccctcaacgtgagaggaaaatagtggagaggttggttgaggtgattgataaagagccaaacaagaatttcgtggttgagaagggacaggggactcctctgaaggatataccaagtgtggcacacagaatatcaaggaagaagccttctgatcttaaatttcttcacagtattctttttgggaggaaaggcaaggctgtcgattttaaaggacatatactccaattctctggatttgtttggcatgagagtgatgaaaagcagagagccaaggcaaaagagaagcttgataagtgtgtaaaagacactctgctggacctctgttggacccttggtattccaactccgaaagcaaacattagaaaggaagatattgtgtcaaagctgttggacttcattgctgaacctcactctgcagctgaatcttggggctctgatgatcagggatcaaattctaaaaaacgcaagagaggaggtgaaagtgcaagtaagacgcctgatggcacacctagtaggtcgaggaagaaatttgtcgatgacggtacttctagtaaaaggcagaataaagcgctccagtatgatactgaggaggatgaatccatgaagtctgacagtgaggaaaacatagatgaagattcagatgaagctgctgacaaacaggaagttgactatggatctgggaaagaaaaggcagggaagaagttatcggaggtaaaagaatcttcaggtaaaaagaagtcaaacacagggagtggccacaaatcaggtcctccaaataaaattataaaaaatctggtaaaaaaagtatcatccaagattcacgaggaaaaagaaagccccaatggtagtgccaaggttttttcgagaaagaagaaacccacagcagaaaaggagatcaaagagaaaaagtcgtcaggaaaaaaggtgacaaaaggtaaaggagaatcagctgaagcagttcttcccagcaaggacgatctgaggaagaccattactgaaatcctcaagaaagttgacttcaacacggcaactttcagtgacattctgaagaagctcgacaatcactacaaaatggatctgaccccaaagaaagaagccatcaaagttatgatccaagacgagttgaccaagctatcagaggaggatgaagaaggagagggagacgaagacgccgggaagaaacagcagcagcctcaggcgcaggagatcgaggcatgagggatccgcggaaccccgtagctgtagtagccactgttaattatcctgtacttagtgcgtatgtgtcgcatgtacaggcatcctttgttgatttcagccaccaacttgagaacctcaccccctgattgtgtatgctaaaagacatgatgtgtaggcagcctccacaccttttagctgactgatcggagagttactcttaggcaacaacttgtgtttctagatttgcaaatggtgtctgaaagactgaaactctgcattcgctgtggcagggcgtgtacttaattgttcgtgataggtctgaataacacatggatggaccctaaaaaaaga

SEQ ID NO: 33355 - DNA, 421 bp, Zea Mays
gacgccatagcacctcttcctgttcgcaccccttctccctccgtctccccgaccaagcgctcaacctggtcgtagcttctccacgctctctcggggctgctttctccccgtcttcctgtctgcaacccgtgtgcacaaccgtggccttctcaatcatgggcttctccttcccattccggcgcgcccgcgtggatggctgacgaagctcatccccacgaactacctgctccgaagcagccggcactggaggctgaccgtcccgtccgccaccggtgcgtccacaatttccttgtcgctctttcgctccctcaggaacaggaggatgcgcttctcgaagctcccccctcccggtgtagcggcttcacggcggcggtggtggatgtcgtcacattccgcgtcatgtacatcatcgactgtgtct

SEQ ID NO: 33356 - DNA, 568 bp, Zea Mays
cagacgccgtctggcgtactcttctcgtctccgtcgcttctccttcgccgctgctgatacgcggaccgaggacccaatcgctgctgctgctgatgaacaaggaagaaaaacaggaacattcactgaagaggacaaaattggatttgggagaacacacatccaaatctccattgcaggtccttgcgcgcgcaggcgaacttgtccacccacagcagcccaccggggcggagcacgcggtcccagtcgaagagcacgaagttgaaagggaaatgtgcccttgggccatttctaagtattttggtgattaagtgccaacacaagtgcttaaatgtgaatcaatgcccatagatgaacaaagtgcaaatcttcaacaaaggtatgtttctaagtcttagtatatgggttttgtgtactaatatatttatctaagtgtaagaaacagaaagaagaagaaaagaaaggaagtggagagtggctgtgtgcagccaaaggctgtttcgggctggggcaccggactgtccggtgtgcaccggacagtgtccggtgcgccagaccagcgtggagcaaa

SEQ ID NO: 33357 - DNA, 2768 bp, Zea Mays
cccccacttccgactccgagcagagctccacaacagttaccacgcctttcgctttttcttttgtcctccactccacttcccctcttcacgagaggagagagagagagagagagagtgcgtgcgaatgcggagttactcggggactggtacgagcggagcaggggtgggcggtgggggaagcgagtggaagattgggagccaagagcacggagagtgccccgggatcttcacctcccatcattcgagtgtggagtttgtcctacttccgggagttgcttggcttggtggcgcccagaattagtctggaagcagggtggagtgctgtctgcgcagaaatctgctcaccgggtgccaggaaacaggtggctgtagagaattgcttggggattcgtcaagaaacgacccagtaggtggttgtgcacttgttatgctgagactgaatggaggctgtagacaagattgctgagcccaaagacccttttgtgctcactgcccagaaggttcagagctcggagccaccgatacctataaaggcgtcatgtgaagggaatgactcccaacagcaagaagagacggatttgccagatgatggcgaagagagcttccggagcatggattcctctgatgaaggtgtccggagctccttctctggggctagtcaccctccagagcctattgacatggatatcatgaagacagtctatgttgcaatcgacgagaagtccgagccaccggttagtttagtgcgaggagtctcggtgaaggggcctttcatagatgacctctcgatccgtgttacaggcgcaaaggcaaatctggtggtaggtgcaggcggtgctgaaggtatggctgaagagaggaaggtatctgcttctgcagtggcatcagtcaccacagcaaggtcgtctcaggctacctctttgcctcaggactcggaggagaaggagtgcgtctgggacgcttcactccctccgagtggcaatgttagccctcacagtagtattgacagcatgggtgtggtcactgctatgagcaccctcaacagctgcacgagcacatataaaagcgagaccatagctggtgaagcaatgctcaatgtggagaggaactgtgagagtgtaaagggtgttcgaggtgacttactagaaagtgcaaaaaccagcatgagtcgagcaagtgatagcagtgttgttagtgatgacagcagctggagccacatcactggaggtgccagcaagcctcacaaggggaatgatcctagatggaaggcaattcatgctgtacgaactcgtgatagcgtgcttggaatgagccattttagactactaaagcgtcttggttgtggtgacattggcagtgtttacctctcagaattaagtggaactcggtgctactttgcaatgaaggtaatggacaaggcatccttggcaagtaggaaaaagttaaatagggctcaaactgaaagggagattctacagcttcttgaccacccattcctcccaacgttgtatacacattttgaaaccgacaggttctcttgtttggtgatggaattctgtccaggtggtgatctgcatactttgcgacagagacaaccaggaaagcatttctctgagtatgctgcaagaagtacttctagctctggagtatctacacatgttgggagtggtctatagagatctgaagcctgaaaatgttcttgtgcgcgatgatgggcacataatgctttcagactttgacctctcgctgagatgtgcagtctcacctacactcatcagaacatcagctttcgattctgatcccagaagagcaggtggttctttctgtgtacagcctgcttgcatagaacctacttcagcttgtatccagcctgcgtgcttcctccccaaattcttcggacagaagagcaagaagaagactcgaaaggcaaggtctgagttgggacataacgccggcaccctgcccgagcttgttgccgagccaacatcagctcggtcgatgtcatttgtcgggacccatgaatacttggcccctgaaatcatcaaaggcgaagggcacggaagcgctgtcgactggtggaccttcggcatcttcctgcatgagctgctgtacggcaagaccccgttcaaggggtcagggaaccgcgccaccctgttcaacgtggtaggccagcaactgaaatttccggagtcgccgtccacaagctactcgagcagagacctcatccgtgggctcttggtcaaggagccgcagagccgcctgggcgtgaagcggggagcgacagagataaagcagcatgccttcttcgagggtgtgaactgggctctcatccggtgcagcactcctcccgaggtcccgaggcctgttgaggccgagctgcctgtgaagtatggggtggcggaggcgatcgggagcaacagcaagcgggtagtcggagcagacgtgaagtcggccggaaaatacctggactttgagttcttttaagagcagtgcgtgcccagtggcagctattgtttgcgtactgtccgtgtatggtcggttttgatgtttgtgtgattcgatatggtgatttgtgcctcgccgtcgatgcacaattgtcaggtttgaatcgaccaaaattaggtaggtgtgtgttgccatttgcctgctttggcacatttcgagtttatgtatggaactatgtatagagtatgcattgcaatttgcagcaaacctgaaaagcagctaagaaggccctttcctccttgtttatgcaatgcatctgttcc

SEQ ID NO: 33358 - DNA, 2487 bp, Zea Mays
gaagcaaacgacgcctgaacggtcccaaaacccacaccgccacacggccacgcccagttctcccctctctcgctgcgcatcgacgacggcgagggcgccatgatcgtgcgcacgtacaggcgtagatcccgttccatctccgaaggcgggggcggggtctcgtcctcgcaggaggcgttcgacttcgatgccgacgtcgacgtgctgggatcgtcggcctcgcagccgctcccgccatcgcaggaatcctcctcgatgtgggatttcgacgaggacccgcctccgtccccgccgcggcccgggaaggaggggaggcgaagcgggcggggcggagccagaagaggaggagggttggagctcgcggaagctcccgcgatggcgccgacggtgacgctgatggaggcggaggagtacggagagatgatggagagcgtggacgacgtcacgttcgcgctcgacgggctccgccccgccgcgcagaagcggacgcggcgggccagcctgctcgcgctgctcgggatctgcgactccgccgagcgccgccgcgtgcttcggtcccaaggattggtacagcaaattatcgatgctattttggttctggacattgatgatcctccctgcgctattgctgcaggagctcttttatttgttttggcaagtgatgtccaagacaataatttgctgtcttcagaaacttgtgtccatttcctcctcaaattattaaaccctccggtgaatgttgttgatgccaaagcaccatcaataggttccaaacttcttggaatcagtaaatttcagatgcttaacggttccaataaggatgtggactcttgttcagaggacatacttttaaaagttgaagaaatcctcttaagctgcaaagagatcaaaccagcagacagggattataagagaacaacaaggccggaactatgttcaaagtggcttgctttgttgacaatggaaaaggcgtgcttgtctgctgttgcattagaggatacatctgacatggtcttagaactcggaggaaatttcaaagaaacattaaggcagttgggtggccttgatgatatttttaatgtcatggtgaattgccattcagaattggagaaacttgtaaaggatgcctccactacggttgtggagggaaaagaaggtgctcctctacaaagcaccacactcctcttgaaatgtttgaaaattttggagaatgccacatttctaagtgacaacaacaagacccatttgctcagcatgagtcgaaaattgagccctaaatgccgctcactttcttttgttggtgtcattctcaacattgttgagttactatcagcagacagtagaggtttgagcttattgaatcatcattgcaagtgcaataactcaaagaaaaagagcattttactgaaccgaaggtgccagtattgttcatccaccaaatcagaagcttctcatgttaccctctcttctagtagtgatgtcagtcagtcagaaaggatactcaattgctcatctttttcaagcaatgggacatcaagtggttcatttggagtgaaacatattaatggtgctagtttgaagctcaatgtaagaatggatcgttctaaagcttatccagtcagaggctcaactggttggatttctatgaaagcacaaacttctgattggaactccagagaaatggcaaaaaagcggcgcctatctgaaaatgtacgcactgatttgagtaatggtggtgatgatccatttgcatttgatgatattgatcaagaaccttcaaattgggatctatttggtccaaaaaggaaatcaccacagaagcgagcgaaaagaactaatggagaagtgttggatgattgtggaactgcattaatgggaagtcctaaattatgtcaacctgaagatatttatcagtcagttgcaacttctggttctaaggttgtagatgagtccaatcttttggaggattgccttttggcgtcagttaaggttcttatgaacttggcaaatgacaacccgtctggttgcgaacagatcgcgtcatgtggcggacttaataacatggcctccttgatcattaaacatttcccctcatttgatttctccatgaacagtaacaatcaaatgaatgaaagtgtgtcctctggtgatccgttgtcttcccagaacagcaagtcaccccaaatcaaaactaagcagttgcgggactatgaacttgattttctagttgccatattgggattgcttgtgaaccttgtggagaaggatagccttaatagggtacgacttgcgaatgctcgtgtttctgttaatctatctcaaaatccagatagcaaagaggtacagagggatgtcatacccctgctctgttcaatattcttagcgagtcaaggtaccggggaaactgctgaagctatatcaccggctatggtcacggattggactgtccacctcagttctctattgagagtcgatactttcgcttgg

SEQ ID NO: 33359 - DNA, 2043 bp, Zea Mays
gtgacgtcacctcttctaaggcccctgtggtgccaattcagatgggctccaggatgaggccaggcccatgggggcacgattcggccttttcttgtcttgctcgtcaaaagaataaaatcccaacccataggaaagcgtagcatagcaggggaggccgggaggggagaaaggcgaactcgaattgggggaagagagcgagagacgaatcgcatcgagccggagaggaagtcagagacagggaggagggcggcggaatcggcgccggcgggaggcaggcatggaggacctgagcgtggaggagctcgcctccaacctctccacctacaaagagcagctacgcgaggtcaagaagcttatcaaggagaagaaggatgatgctggaatttctgaatatattgatatggagaaggagcttcaagaggtcagttcatttcttattttatcctgtaatgtgatccctcatgctcgtgtagctacacgtcagatacatcggattaatgattttcacaaatggatgcttgatttctcctctgatttttggggcatgttgctatcgattcctctcttctttgttacaaggagccatgcccagcaaggtagcatgaaaaggccgcttgcaacagaagatttgttttggggaatttagatttttgtaaccttgaaaggtgagaaggttaattatggcaatggtagggactgtccgagcaaccatattaataataatgaacaatatgtaaaaattcagtggcttcaaagttgtccattaccctttatcttgatttattgcaggtttgtactactacaaatttcggtgttgctgctgctgttctaagttggatcttgaaatatgggcacatgtttaatactactgggaggttgcttgtgtttatgatgcttaatatcattttttgtgtttgctgcaggtcataacgttaaccgaagagattttggcaactgcaaagcaaactgagagtgcccagaatgttgcaggtctatcaccgccaagctattcagctggagtgcagtctgagggactggatgacctttcacattcccataagtttgccgttggtactagagttcaagctgtgtggagtgaagatggagaatgctgaattgccaggtataatgcaaccgttgaagctttgacaccaaatggatactatgtagcctacgatggctggggaaacagtgaagaggtggacccagataatgtgaggctgcttgaggaagaagcagctgatgccttgggacaagctgaaaaggaagctgaagctacaaaaatggcaataaagaggaaaattgaacaagcagcaacatctgattttcaggcgcgtagcttgccggccaaacttcgtatcgaaccaagtgaccctgaggatgttaaagctgcaaagcgtaagaaaatacatgctttcaaatcaaaatcccgctttgagcagcttgaatttgcccaaaacaaaaggcagaatgcatggcagcagtttcaaaccaaggggaaagccaaaaaggtggggttcttctccggtcgcaagaaggagagcatcttcaagtcaccggacgaccacagaggtaaggtgggtgtcactgggagtggcaagggcctgaccgacttccagaggagggagaagcatctgcaccttaaaggtgggtccggggatgcagcggatgatgacgaggagtaaactgaagaaccgagcctctgtttgtatcccgccgaacagacatttccatacctgttctttagcgccgacatggcctcgaggggactcttgacttaaaccagaaaatttcaatgtttgtcccattctcattgttgaatgtcgctgccgttttggagctgcattctggtggcgaggtcacgctgctagaggagggcgtcctgagcgtacagatcgacttgtcttgctagtctgtagtgaagtattaatccttaaacgtttactaaaattgtcaccggcctaagtacagatcctttgccccaaccaagtccattgaagaagatcaataaactcgctactgctgagtgtactctacaaaccg

SEQ ID NO: 33360 - DNA, 3427 bp, Zea Mays
cgcaagcgcggcccagcaactgctgcagccgtttccccacagctgctgcttccttctcctacactgccccgctccgctctgagatggatcccgcgccggcgaccccgcgctggaatcttgagcgaccgtaccttactggacgcttccaccaggaggcgaaggcggctgcggcggcgcagggcctcggatccaagccgttctcgcttgactccttcagccgcggcgccggcgccgggagtgtcatcggatcgtacgcagtatcagtgcaggagcttttggttatcgatgatttgctatcagctctggtgggtattgagggacggtatgtttctattaagagagttcgtggaaaggagggctatgttgtctttcagattgattcttctatggaccttgccctccaggaattgactcgccggattttccctttgtgcgaggattatgtgttggtaagccagtttgtggagtccaggtcacatttcaagaatggtttggtcaaccatgctctggctgcagctctaagagcattcttactggattatcaggcaatggttgctcaactggagcaccagttccgtcttggaaggctttctgttcagggattatggttcttttgtcaaaggatgatgagttcactgaatgcactggcagttctagtggagaaggctacctccaacaatactaatggttcagcgacacttaatctacttcaaagccaggcaaaggcgatgggtggtgatagtgctgttcggtctttactggagaagatgacagaatatgcaagtgcagcatacctcaggatgctagaaaggtgggtgtatgagggagttattgacgatccttatggtgaattcttcattgctgaaaacaaatctctgcagaaggagagcctcactcaagattatgatgccaaatattggcagcaacgttacagcctaaaagaaggaattcctagtttccttacgaatgttgccgcaacgattctaacaacagggaagtatcttaatgttatgagagaatgtgggcacaatgttcaggtttccttgtcagacaattctaagcttatgagctttggctcaaaccaccaatatcttgaatgtataaaatctgcatatgattttgcaagtggtgaattgttgactctgatgaaagataagtatgatctcatcgggaaactccgatccctgaagcgctatctactccttgaccaaggtgactttttggtccattttatggatattgctcgagaggagcttacaaagaaaccagaagaaatatccgctgaaaaacttcagtctctgcttgacattgctttacggagtactgcagctgcttcagatccaagccatgaggaattaatctgctgtgtggaaaggagttccctccttaagaaactggccactctgaaggacttggatcctgcagataagcttgctgcagcagatgttgatcgatcaatgcaattaagcatcacgggtttggaaacattctgccttagcaataaggtccagtggccgttatctcttgtaatttcaaggaaggctttgacaaaataccaattgatctttcgcctattgttccactgcaagcatgttagtcgccagctgtgtgcagcatggcaaatacaacaagcattccggtctgtcaagattctagggacaccaattctgcggtcatcaattctttgtcgtagcatgctcaagtttgtaaatagccttttgcattatctaacatttgaggttcttgaaccaaattggcatctgatgcatgaccgccttcaaacagcaaggagcatagatgaggttatccagatccatgatttcttcctccagaagtgtctaaaagaatgcttgctgttgtcgcctgaactccttgtgaaagtcgagaagctgaaaggtttatgccttcagtatgccacttccatccagatcttgatgccatctatcgatgtcgctaactctgagaacacatcgaagtctaggaagtcaagatcaagaatcgataaatcacaggacagagaccagcagctgaaactagcatcagagaatgttgtcatgtcagagtcgatcctgaaatttgaagcagcgttcaattcagagctgcagagtcttgctcctacgctgagtaacagttcacaagcggagccgtacgtgactcatctcgcacagtgcattcttggcgtgcgaatcggccaatgagttatttgatgggccgtacccatacctgcctgccttcatttggacttttggcacaatgccatactctatgtgcgccgctgcagtcaagggcttgccaacttctcaataacagattgtgggaaaaacaaccctgagcttgccaaagagatggagaagcaatttgtcgatcttcttaatgaggaactcaagctgcagcaggttgtagctgaggagcatagtcaccacatgaacgccactcttgtcgaagcaaaaagacaagctactcaataccagcgagaagccgaaaagtgtaatgcagctacagagacctgcgaggaagctcgggagcagtctgaagtagcaatttcaaaggagaagaaactcacagcaatgtgggaacagcgagctcggcaactgggttggcatgattctcgagccacgagcatgtgacagctttagttctgaattttcaggtgaaattatttctggtagctgcatgggttatgccttgcagccaaaccaaccggcgacgtttgtctatgtaatatcagtttccacgacaacattgttaattttgagtctcaacattatagttccagcttccttacaaatgtgactagcttgctgccgcctagatatctgaattttgtcatagtactgttgaaagccattttattaaggacatgtttgtttttctcctagattatataacctgaattatgacgaaagagtaagagggtaaaatatcactttgaaagcacaaataagctgaactaaactactcaatgccagcttatttatagttctaaagtgatatttttacccttctacccttacaccataatccaacttatataatctagaagggaaacaacagatctaagtgctgatttggtgacaaaagaatcactggggatggaagagggttaaaggagaaataaactaattttcctctcaatcccatctaattctcccgtgatctctggtcactaaaacagccctaagtgttgtggttgtggtttaatgccgaattgttggagaaacttaattcaaatctggatacaggatgtacagagtcttgatctatagcatcaatctggcggtacagcttacttgttgggtgacggaagtaccttcggaatataattgttgtatgtgttgacatattgatatattcttgtgggtcgaaggcctatttgttattatataatccagcttaaataagttaaaagataaacaaataacatata

SEQ ID NO: 33361 - DNA, 1909 bp, Zea Mays
cagcgctccccaaagcagaaagaccgcgacccaaagcaagctcaagccgctccgctcctccagtctccagtctccaccgcccgccaaccccgagatatacctcccttcctctcgaagcttcgtctgcagacgaagtcgccggctcttccctcggcgctggtgccggtgggttgcctgtggcggtgggtgggtggccgggtggtggtgttgctgggatgcccgccgcgacggcgaccgcagcccgcctccgcgtgccgctgccaaaagccgcccaccactcgccctgctcgagccggcgccaccccgactgccgccgccgctgacgagacgagcggccacacgcttggcgcgcgccatggatgccttgtcccgccctgctgtcgtcatcgacaacggcaccgggtacacgaagatggggttcgcggggaacgtggagccctgcttcatcacccccactgtcgtcgccgtcaacgattccttctccggctccgcccagccggcggtgaggggcacccccgccagggggaactggctcgctcagcacagcgccggcgtcatggctgacctcgacttctacatcggcgacgaagcgctggcccgatcccgcgccagcagctcgcatagtttgagctatcccatccgcaacggccaggtggagaattgggataccatggagaggttctggcaacagtgcatcttcaattacctccggtgcgacccagaagatcattattttcttctaactgagagccctctgactgcccccgagacccgggagtacaccggagagatcatgttcgagacgttcaatgtgcctggcctctatattgcagtccaacctgtccttgcgctggctgctgggtacactacaaccaaggaaagaggtgagaacattccagcagaagaatcttttgatgtagcaagaaggattaaagaaatgtactgctatacttcttcggacattgtgaaggaattcaataaacatgacaaggagccatcaaagtacattaaacactggacgggcaccaaaccgaagactggtgcaaaatacacatgtgacattggatatgagcgattcctagggcctgagatcttcttcaacccagagatatataacaacgacttcaccactcctttgcaagttgttattgacaagtgcatccaatcatctccaatcgacacaaggagggctctttataaggttcttatgatccgagtatcattatttattctaaggcattacatcgagtctgaaggatttccaatggcacagaatattgtcctgtctggaggctcgactatgttcaaagatttccataggaggttacagcgggacctaaagaagatagtggatgcacgggtccgtgcatctaatagccggcttattagtggggatgctaaggcccagcctatagaagtgaacgtggtcagtcatccgatccagagatatgcggtatggtttggtggctctgtgcttgcttcaaccgccgaattctacgaggcttgccacacaaaggcagagtacgaggagtacggtgccagcatctgccgaacgaatcctgtcttcaaagggatgtactgactcagagcggttccctgtggctgacgtcgtggatgatatccactcaaagcttaaatggggagaagtgacagtggtcgtggagacaggactgtcgagagggatcctgatcgtggggaagcatagccgtacgagctgtacaaaagagaagcgcaaatagataggtttatgtttcaccatacaatttagatgctggtaggcctgacaggatgggtttgccacccctgctgaattgggtggcattgtaatttgtagcgtcaacacttctggcggtgcgagattgctccttgtatacatgttgattcggcagcgatgttttctctctctcgg

SEQ ID NO: 33362 - DNA, 335 bp, Zea Mays
atcataataacaatggaaggtggtgcaaggagaaggtgtcatcaggaatactgaaggcagaagacaatgttatccatgtaccatttgttaatcttatgtgtaattcttaagggcataagtgtaatttcgtatgaagctgttcgattccctataaatagtttaatagtgcccacataaagtaccttttggcggattgagcaattgttatgtaattttctctctacaacaccttcattgtaattatctctgaagaaccaaaggtacaattgtaaagttagtttacaaaagggggaatatgttattgacatatctcaattgagccatcatgtgtaaac

SEQ ID NO: 33363 - DNA, 4478 bp, Zea Mays
aaacagtccatgtgccgcacggaacgcctccccgccgaccgacgggaccccaggcagcacggagcacgggcacacggacacgaaaacgaaacaccacaccgtgtcagttcccccactacattcctccgccatttaaacgcgggttccccgtttgtcccttttcctcgcgtccaccactccacctccatccatcactggagctccccagaaaaaaaggcaccaggcaattcccgattagcatctcgaattcgcgatatgacctgcggcggcgtcagaccggatgcgggaagctagtgttccattccatctggttcctgaggtttatctgttcttcgtattgtttgcagggctttgaagtagataaggagctgactgtttatatcagttccagtgttgaaagtggcaactattaacgtgtgcataagcaaaatggatagggaacttgctagcgacatggagcttgattctgttgtcttccaagtatcctcgcctgacaacaggtatgaagcaattgcttgcagtaagggaaaaacagaactgatagcttctggtccttttgaccagttagttctgcacctggaagatgccaaaacattccaatcttgttcatcaagtggtacttttaaactgttattggctggggatggaaaagactcttcctggtttaccaaatccaccttgcagagatttttgcatatcataagttcatttgatacatcaaaatcggtcaatggagttttagacgagatgtcacagctggaggaaacaagaaagtttcatcaatcactttatgttaaggagcaacagaatgttattagtggcgctttaacaggaggtttatttggtactggtgccatagcacagcagggaaatgatgggccaaattcatcggatacgacaaagaatgaattgcttcgagcactggatttgagattaactgcactgaaggaagagatcttggtcgtattgaaccgagcagttggatccaatttatcggcaagagaaatatctgatttatctgcttttgttcagcgatttggaacatcagagttttgttggttgatgcggtgtacgttgttgatatcggattgtaagccctctgagctcccactacagcagaattctacaactgagaaagttgacaaggatgagaatgcacataaaccttgcatcagtcctcagactaatcttcagatgcccattgccaataatgtatctccagcaaagcttgcacaaattgagcgtgagagctcaacagaaagtgatgattcctctgaatccagtgatgaaggtgaggccattgttgaaaggagccgtcctcttgtaagatctgcttcacctagaagatctgcttctccaatgcggagggttcaaattgggagatcaggatcacgtcgttcaacagcaattgctatcaagagcctcagttacttccctcctagtcagaggattcctatggataaagatgatgaaagtagtaccttcaatggtgaaactgatcagccaccaaagaaatctgacactaacgttagaaggatgagtgttcaggatgcaattaacctttttgagagcaagcagaaggatcagaatccagattcacaaaataagaaagctggcttgtttgccactaagtctgtcttgagaaggtggagtgcaggaatgggtgattctttgaatgaaaactcagaaggaaaagtctcagattccacatctgaaagtaaatcaaacaacatagcttctgaaactgagaaggttgaagctgaaatgaaggctgaactaggtaacataccaaatttttttgttacacctgaggctgaagatttaactttccatgctaattctcatgagattagagtgtcagaaacggagagtgctgtttgtagtaatgtttgtgcagaacaagcaaagcctggtctggaggaaagcagtgatcgggcaatggcctccgctgagtggaatcgccagaaggaagccgagcttaatcagatgttattgaaaatgatggaagtcatgcctgggaaatttgcgggtgctaatgccaccgctacaggtctcagttccaccaatcagcaaaaagctgtatctcatggccagcatacagagaagcgagacacaaaagtcagaactgagaaaggcacaaggcgaccagcaaaggaaccaagcaccaagcccttgaaggaaacagctgggaagaataaaccagcaatgacctcgaaatctggctcttcaacagagagacgtatttcaccagttccacaaagggcgcggcgaaattcatcacctccagtcctaccgaaagaagtagcatcaaagacaccaccagtcaggaaaagctcaccgaaaccatcacctgcacctgcatctgtgcctactacacgtagttcatggtcaggtggttctttgactaaagcaactacaacacaaaaaactaaaaggtctcctgggatggcttcaacgtccacacaaactagccgaaggactccaacaacgccctcgtcgtctcagccagcttcaaaagcggaaagggccattcaatcagtgaagaacaagaaggaaaccattactgctaccaagccagctataaagggacaagaagagaagaagaccaaaacagcaacaaagacaagcagaataactaaagtttcaccttcagaagaaaaatcaggtgtaaaaacgaagcaaagcttgcaaaaggtttcaaataaaagcagtgttgtacctcttgagtccaaaaccttgaagaaaaccactggaattagtcagagcattaggtctggtatggtgaagaataaggtaccccaacctaatgacttctcaaaagataccggaagtgttaaccaagctgaagataaggagcaatctcctgtgacaaccgagccaactactaaggtactggaggctgatcttgctcaaccagcacatgatgttgatgaaaatttagaaatttcgctcgataatgacttgaatattgaaaaaacagagaaaccggcctcgagtttaactgcaacagaaatgggctccagtatccaagttgaaccctctacggatgagttagatgaggccatacaacctcctgacgatgacatgggcatctcatcatctgcgtgggtagaagtagagcgtcaagaactagaagtcactgtttcgagtgaaaatgtagttgttgaggatgtaacttctccaggaattgcaccattgccgtcatcaagcccaagagtgcgtcattcgttgtcacaaatgctgcaagcagatagcaatgaaccagaaattattgagtggggaaatgctgaaaacccacccgcaatagtttttcataaggattctccaaaaggattcaagaggcttctaaagtttgctcgaaaaaacaagggagacaacaatgctaacggctgggcaagcccctcggtagtttcagaaggagaagatgaactagaagaaccaagaggcactagtgatggtacaaattcaagcaggagaacttttgatggttcaaagactaatagcatcttatcagctcaatcaactaccggcagcttcaactctttgaactcggataagctacgggagagatcaggtgctgccacatcaacaagagcatcaaggtcgttcttctcactctcaaacttccggagcagcaggtcaaatgagtcgaagcttcgatagtgtctgccttgtttgtccagcagatacatgggtagttcatctccgctcccattcaggacgtctagacttaaaaatggtttgagatttgattgttcggacggagccagcttgctgtgtttcgctctagtcacctgacatttgatatatagatagcttctgcctatgagatgccatacttcgcttctgccgtcctgtacatttctatattttactgcattgggtgcgagctgattgagacgaccgatatgtttgcatggcttgcaagagatttgcttcgaccaaaagccctttgctgtcaatagtttgtaccgaaaattgtcatgagcaacaacattaggaatgatgtaagttgtcacatttttttttgacgagaggaggaccccatttctattattgtcataacagaaatacaaagcggttcagatagtttccacactacaacgcaaaataacaggaagaacccgcaaacagaagcgctgacgagccaatccgcttcggatggctcagaacagccgagtcccctaccaggcaacatgccaaccgacgagtttagagttttacatcacacaagtaccagaccatacggcggaggatggcaagggcataacagacgacagcaaaatagagcgagtttctgacaaagctaacaccagacgagcagtcacgtcatgactcaacgcccgtgtggctgcagcatcccttctatctcatcgcccgacccgaggatccgatttcctctagcacttgcaccacgaaccagcatcttggcgccctcttgcagaaggtcctggagctctttcttgctaagccctata

SEQ ID NO: 33364 - DNA, 2445 bp, Zea Mays
cctcctccccgctaatcaccacgccgcgcacgcgccgcgcgaggcccgtcttcgttcccccaccgctaatctcgccgcggcatccatggcgctgccctcgccctcccccacctatccacgccggcgccccctccctcgcgccccacctcaatctcctccattgcgcgcccaagaacgcacagatcccccattcccgcgcccctccctcgtgcctcgatggaatcgccgcagcatccatggtatggtcctcaggatccacctccaccgcgtcgccacagttcgcaggggccgagggtgccccgacggtggggatttgtactgtggtcaggagcatgcgtgttcaagcaagcactcttgctcttcgtccacaacaagctctccatgtgccctaggcacgcgacaaatgtttggggtggtgggcattaccgtcacctccctcgtgtcccgtgccgccgtggccggggtctgcttcctcgccttccgcaatgagcaatccgcggggtacgccacctctgcctacgacttcctaacaagctccccgggcgccctcatcaccgtctccggcccaggatgcgtccacaggctcgcgggcctctcccacgccaccaccaacgcctggtcgctcctcatgatctccagatcctgcgaccaggctgacgctggcaggggcgacttccaggagctcgactagatcgccgcggtgtctggtttgctcacgcggtccctcacgctccaccaaactctggcgcaattcgagcaacttcagccctcacactccgtcaatccgagcaactccaacgcaattcgagcaacccgcccttcacgcaccgtgctgcacgcagtctcgccccaatcctcattggtgtcgacttcatctgcatggaagcacatttcagagatggccagattggcgtagagacacagaacaattgcaacatgtactggttgttggtacttcacctgtgttagacggaacaccacaattgcaacctggaaaggagaatgacaaatgtttgaacagcagtggccagataggcgtagagacacagaacacaatattgttctctctacttgagatggaagaattacaagacaaggaattggaggatgcttaggaggatagacaaaaatgtgaagctaaagaaagagaagctcttagagcttatcgcaaagcacatagagctttacttgaggcaaatgaaagatgtgcaattctttgtagaaaaagggagattttctcttcacaagtccatggtttaattgcagagaattcttctttggtgcagtctttgagtattcggaatcctgaagatggccttgcaatgccatcactgctcaattctcaaattcatgcagttagtcagattcctgaaaatcagggtggtagacacaggttgtgtcctgaagaaccttctaagcagcaaattgataagcatgaagatgaagcacgtccacactattgtgataagcttgctgccagcacagctgatcccagctctatgagtgctgtcaatgctgacaacatcctttcagattatatggaagatgttcttctgttcccgactagatagacaagatcagaatgtgctctggatgttgagaatcaaatggaagaaactatacatgtatatgcataggaaaacatacaagttcctggtgacggtggtcaggattatgaacttttagaagcttctttgaggtctagatgccaccgtctctgaaccaaagcaagaaaaagtcttgccccatatctaaacagaacagataatttgcaataaaagataagcaattccatgtgcaagaaaatacattgactaaatttctttggctcgacgcttaagaaatctcgtccttccatggtttttgccatccgctagaaacaaagaaaagctaccactcactgaaagtctgaaaccaaattcagatcgcaaataaaggacccgtctgaaggttatgctacctggacatagaacataccatgagacttgcttctctgcctctgtgggatataaacataacctatgccaatgaccagaaatcagatgacacaaagtttctcaactgtaatcagttgacgatatcacttcatcatcaggtggaagagactttgttcaaacaaactaaggtgtttctctgctcatattctggtgtttatttataacgtgcctttgttttattattttggttcttttgagtgtaatgcttatatcctggtttggatatccagtttaaagatatcccatctattggacgaaccatcaatgcatgcctatgttgtttcataactgttatttcactgtaaaaggcatgtagtgtttgttgccctatagcataaaccagacttcggggtttagcttttaattacaaaaatgagtttgccggaaatttggatttcatacatgtaaattttactgattgcttcggcgtttcttgattttattgcta

SEQ ID NO: 33365 - DNA, 1242 bp, Zea Mays
tcttaggcactaaagcaaagattttcggagccagatcctctaaacgccgaccgtgcagccacctctctttccaaaacaaggcctggaaaagatctttggatttctactctcatcctgacacaaatcattccacgaattatcaacccaatgaaaacactctcgctctgtacaatcctgataacacacaagaagcgcctgttgatccatacgattcagatatgactcaaagcctccaggaggctttgcaccggtcaactatggacataagtggtgcagagtatagagggaaggaggtgccactttttgtgctcccgacaaggtatctcctcaagctggacaccacgatgacctcgtactgtgatatgcaacgagtcctgtttgaagaggagcaatcagcatataatcaagctatgcaacaaaatatttgtgatgggaaaattcaccctcttacatccattcactgtacgtctacatacaactcctctctatgcaaactaatggagtattgtttgagtccagctgttattacgcttcaggaccgcctgaaggaaaatgaacttcggctatctatgttaaaagaggagtgtaagcaactggaggctgatacccaaggcatgagaaatggttctcctcgtcgcctcatgaatcacggagctggtggcagcggttcacctatggctcagagcaggcatcctttctccagccaagggagccctagaagcccgagcggcggcagccggaggagggcttgatgatgatcttgctccgcctgatgcgttgatgaactgtccgttgtggcttaaccagatgcttcctgaaaacccagatatttgacggacgaagtgcccccagacaacagacactgtacctgtacatacccattgccgttcagcgctgtgctattgtggaactccaacggtctcattgtgctttttttttgtagtattgggggggttccttatcctgttgccggagctgtgccattatcctttccatggttcatggttggcatgagcttttatagcctgtacactgtagactctgtactagaggttttccagaaaggctgaactgccgctgctgggatgtgttgttccgggcatattcaaagatgaaggctttctttgcttttgtaattgaaaaaaaaacccgacttcggtagcaatacattttcttgaaatgctataactctaagctacagccacagtgccacaccttgcctggatagtgccatagctgttt

SEQ ID NO: 33366 - DNA, 2769 bp, Zea Mays
gaaaaaaaaaactgccggcaaaaacaaattgtacaatctcctcgcggcggacgatgctaggtggtcgatgctgcgctcgcggtgtgtccgactgcccgagccaatgccggagccccagtcctctgtggcgtcaagcggaagcgtagatcgcctccgcaacgccttcggcggagtgctgtgcatcttcaccctccttctcatcggcgtcctcgccttctccatccgactattctccgtgatcaaatacgaaagcgtcatccacgagttcgatccctacttcaattaccgcgttacccagttcttgtcaaagaatggcatatatgaattctggaactggtttgatgaccgaacatggtatcctcttgggcgtgttattggtggcactgtctatcctggtttgacacttactgctggtacaatatggtggttgttgaattcccttaacatcccattgtcggtggagactgtctgtgtattcactgctccagttttctcagtcaatgcgtcctgggcaacttacctattaaccaaggaaacaaagggccccggtgctggtttgatggcagcaactattctagcaatggtcccatcatacatctcaagatctgttgctggcagctacgataatgaagctgtagctatatttgctttaatattcacattttatctatatgtaaagacactaaacactggatcactcttttatgcggcacttaattctctctcgtacttctacatggtttgttcttggggaggctacacattcatcatcaatcttatcccaatgcatgttctcttgtgtattgtgactggtcgttactcttcacgactttatattgcttatgctccccttgttgtgcttggaacacttctggcagcatcggtacctgttgttggttttaatgcagtaatgacgtcagagcactttgcatcatttctgggctgtttgttttgctgctgcagcaatactcattgcattgattgcatctagcccaacaaaaggctggagtggtcgcagtttgagtctgctggatccaacctatgcaagcaagtacatccctataattgctagtgtgagcgaacaccaaccaccaacctggccttcttattttatggatatcaatgtgcttgcctttttagttcctgctgggatcgtatcatgcttcttaccattatctgatgcaagctcatttttggtcctgtacttggtaacctcagtgtatttctctggagtaatggtccgacttatgctggtccttgctcctgctgcatgcattttgtctgggattgctctgtctgaagcttttggtgtccttacaagatcaatgaaatttcagcgtccaacactggatgatggctcttttacagccggggatgggagttctgatactcctacgaactctgaaatgggtttgaaggaaaaaacatccaagaaaaatcggaagaaagacaaagagtcagagggaagttcacctgttgatcatagaaccgaagaaaagcttttagtactgccttgtgggccatctgctgtgggcataatgctgctgaccatactttctggtttttacgtgatccattgtgtgtgggctgctgcagaagcatattcagcaccttcaattgtgctaacatctcgttcacatgatgggtttcatgtttttgatgatttccgcgaagcttatggatggctgcgccataacacagatgcagatgacaaggttgcatcttggtgggactatggttatcagacaactgcaatggcaaacagaactgttattgtggacaataatacatggaataacacgcacattgcaacagttgggactgcaatggcatctccagaaaaagtagcatgggagatcttcaattctttagatgtcaaatatgtgcttgttatctttggagggcttattggctacccaagtgatgatattaataagttcctctggatggttcgaatcggaggtggtgtattccctcaaataaaggaagcagattaccttaaggatggcaactaccgtgttgatgctcatagtaccccaaccatgttgaattccctcatgtacaagctttgctattacagattcgtcgaaactgatggtaagggctttgatagagtgagaagatatgaaatagggaagaaacattttaaacttacgcattttgaggaggttttcacaactcaccattggctggttcggatttacaaactgaaacctcagaagaacagagtcagagggaaactgaaatttaaatctagtttaaaagcaagttttatgcgtaaaactggtggaaagaagagcccatggaaatagagactacaaaggcagggtgctggagtcactagtcagcacagttactatcctgagaaaaccatgaattcatcaaaaggagttagattaaaagcatagcattggtgtgttctttgttattgtcatggagcagattataggggtgcttcatgttttttttggcatttgatctccttaatggcattataggggtctgatgaaatttgtggtaggttctcgagtgaggttttatccccattttaaacaaaatggactttgtttataggaacctgactgagcgcctggccgtttggaaacatctttaaaggttgtttggtttgaagaaatggtggcctatcttttcttttaggctaccttttggaaggaaggattttttcccctatttcctgcattttttctgtaaaaatgaaatgattgtgaaatgtcaaatacgattctgtggaagttctgctttccaaga

SEQ ID NO: 33367 - DNA, 1060 bp, Zea Mays
ctggagtttgggcaacttgtgagcgtcctggtttgagcctgggagagctgtctctcaactagatgttgtaccaaactatgctttggttctagtatgtattactgcttgaccaatgcttaatgatttctattattttcaggaactgtattcctgaatgattacctaagtaatatatttcaaatgtttaaaatatcccctgagtgatggatggtttcatctttcccaagtaactatcaccatggactgctaatataaaagtacaggctggcatattcatctaacttcagcagcatattgaatccgatagtcaagaacaactatcagctgttcatggtggaaaggttgataatgcaaggtgcgaggacgtttgtgaagacaatgaaagagttcgatgaagatcttgctctctgcgacgatccaaaaaagaataccaaagactggcgggaaccagtttatacagatgactgacggcagctgttttgtattcatagatgcttaggtccaactatatcaacgacatcaacaactaaactttttagtcccaagcaagttgggtctaactgtatcactgatcttaaaggtttcacaaagatgaccaattacatgccatttatgagatgacataatagcttgagatggatgcatgaactatatatggcatgacaggagaggaacagagaaagcgaatgttgtctgaagtctaagcttgaacatcagatgtgactgctcttttgttcagctacagtgttcaattggattgttttacttcatttgttttaaaaaaagtttactaggtggtgggagactgtcgtgtatgtatagcatgtaactgctgttggaggagctatcaactggaatactggatgagatacattacttgctgcttctgttgctatttgtacttgtgttaacagcatcagttatactagctctgtcattcctagaaaaagagagaatgtggagcatcttgtcttatttctagtgatgtagaaattcgtgttagcgacacagtgatatatgtaatgtataatcaataagctataggatatttagcagggag

SEQ ID NO: 33368 - DNA, 532 bp, Zea Mays
acgcacccgccgacgcccgcgcggccacgcactaggcggcaccgcagcgacggtcgacgatcgccacacccggacaccccacacaggcacccagccacgcgagcggcgaaactgcgggagccaatcagaacctacagcgatgcaatgatcgccgtcgcatcgtccttcccctcgcgcgcccacgcggctccgttcggctcggggacactgccaccgccgtctacgcggcgcagcacgtccctccgccacccgcgcgtctcggcgctcggtggaggcctcgaaggagagccggggaagatactggatccgcgcgccacgccgttccagatcctcggcctcgacgccgccgccggctactccgccgccgaactcaaggccgcctttcgcgcccgggttaaggaattccatcctgatgtttgcaaggacccagaaaatgcagatttaataatgaggcgagtgatcgaggcctatcagtgcgagtgtggccttaaaggtttcagaattgtgaaggaactttagaaatctgactcca

SEQ ID NO: 33369 - DNA, 3154 bp, Zea Mays
tgcccctcgctcttatgtgaagttctggacacgaccgctttgctcacttgcatctaggcttctagctgtactcctcggccggtcggtcccacccatggacagtgacaatgattgcggctccgacgccggcgccgagtgggtctgggtacgccgtccgtcggaggttgaggccgctgccgcggcggccggatggctggcggatgaagaggcgcggccgctcaaggtggtcttcggctccccggctaagtacttcaccgacgcagcgccgatcgggaacggccgcctaggcgccatggtctggggctgcgtcgaatctgagaggctccagcttaaccatgacactctatggacaggtggacctggtaattatacaaatcccaatgcacctgctgttctttctaaagtaaggagccttgttgagaacggaaagtaccctgaagccacatctgctgcatatgatctatctggtgaccaaacacaggtctttcaacctcttggggatattgatctggtctttggtgaggacatcaagtacacaaattacagacgagagctagatcttcacactgcaacagtcaccgtcacatatactgttggggatatagtctacacaagggaacatttctcctcaaacccacatcaagtcattgtgactaagatctctgcaaataaaccaggaaatgtctctttcacagtgtctttaactagtccactagaccacaagattcgtgtaacacatgcaaatgaaataatcatggagggtagctgtccaggccaaaggcctgaagagatcaagactgctgctgatcaacctattggaattaaattttctgcgattctttatctgcagataaatggtgccaatagcacagtggaagtattgaatgataacatgctgaaacttgattgtgccgactctgttgttttacttcttgcagccaccacttcatttcaaagtgcattcatcaaaccttcagaatctaaactggatccaacagtgtctgcttttacgacattaagtattgctaggagaacgtcatattcacaactaaaagcctaccacattgatgattaccagactcttttccagcgtgtttccttgcaactatcacaaggctctaattatgatcttcggaggagtaggctagttcagtcagcagagactagttctcagggtgctaatgtatcggattatggttttcaaatatctggctgcaccagattgacatcccttaatagttttgtgaagcctacggtagaaagaattgtaactttcaaagacaatgaagacccttctcttgtggaacttctgtttcagtttggtcgttatctactcatttcgtgctcaaggcctggaacccaaatttccaatctacaagggatatggagcaatgacacttcaccaccatgggatgcagcaccccatccaaatataaatctacaaatgaattattggcctgcgcttccttgtaatcttagcgagtgccaagaaccactgtttgactttattggttccctctcaatcaatggagctaagactgcaaaagtgaattatgaggctagtggttgggtcagtcatcaagtcacagacttatgggcaaaaacatcaccagatgctggtgatcctgtatgggctctatggccaatgggtgggccttggcttgcaactcatctctgggagcattactgttttactttggacaaagtgagccgcactagaacaaaatatagtaatatacattacttatttactttcgtgtatcaaactaaaatgagaaaattgtttttccatagttagatattaaaagagacaaagagtagtttcatggtcatttttattttgcgacctcttgatgacacttccattcttctgggcaatatcttgtgctactattagttgagtctcatctgctgtcatcctgggatggcatgctctctatttggtcaaggtacttgtcttttcaacactaaaagcacaatacaatgaacactagaaagggtgttaggaattgagaatcatctgaactacatgtgttagatgtagcatctagcaccagaaagatgtatgttttcatgtgtgccaacttgttatgtcaatagtgtgctgaagatgctcaatgattcacatgctgcacttcagtgatatcctaaaaactgcactagtgtcatttactaatacacaagctttactgattgtaatatatggatagtttattttgattacatggtgaagtttcggtgttaatgcccttgactaggagggaacgcatgtcgatagctttgaactgactgttttcttttaacaaattgcatgctcacattccctgaatattttaaaatttacataaaattgaacaagatcagatgcgagttattccactttcgttgcagcattttttagagaaaacagcgtatccactattggaaggatcagctaggtttttgttggattggttaattgaaggacacaggggatatttggagaccaatccttctacatctccagaacattattttattgctccagatggtaaggaggcctgtgtgagctactcaacaactatggacatctcaattataagggaagttttctcagctcttatattgtctgctgacattttaggtaaatccgacactaatgtggtgcagagaataaaaaaagcactgccaaatctcccaccaatgaaagttgctagagatggcacaatcatggagtgggcacaagactttcaggatcctgagattcatcacagacatgtgtctcacttgtttggtctttatcctggacatactatgtcacttgaggaaacacctgacctctgcagagctgttgccaatagtctttataaaagaggttcccagctgcgttgtcggaaatgctggtacagagcactgggaccgacttgtaccttctccctgctctgccccgcaacaagtggcctcaaggctacgttaaaggtctgaaggcccgaggtggtgttactgtaaacatcagctggaaggaagggagcctccatgaagctctgctatggtctagcggcgggcagaataccctttcaaggctgcactacggggaccagattgccaccgtcagcctatcatcgggtcaagtttacagtcctgccctttggagaggttgtcaaaaaagtttaag

SEQ ID NO: 33370 - DNA, 1866 bp, Zea Mays
atggagctcctcgttcttggaccctttgaggttctcagatccgagcttcaccaggaaggagcgccagtggagcctctcctccgcgggaaccccatggaatctgcgcaagagagacgtgtgattgtctggcctcgtcgtcctctggacgacttttcccccgtcttccacaaccccgagtccccaacccaccacggcgttgcggaatccacctgcaactgcaagcccacgaaatcgagccgagccccgacgccaccaaatcgtgtggcctcggagatcgagcagggtctggaagaaccaggggagagaccgtcagaagaggaggaccagcagcaggcaggcggtggtggcgaagtcgtcggcgtcggcggccggggtatctacgatgataacccggtcgaagctggtggagcaactgcgcgactaccagatccgatcccagcacaagtaaatcccccgcccgtctccattcccctgaacctgaaaccccaaccggtaactccgcctagtaataatggggtagtcacggtcgcggtgtgctcagatctcgtgggcctggacgcgggtggtgctagatttggttccattagtctgtggttaggttttgtgtcggaacttcagtgggtcgagttgcattagttgtagctaatggtggttttgccgattgaattctgtttctcttcgcgcatgcattgttagttcatagtgtagaactgtagctaatccaatacagtcggtggctattgatctttcttagagcagtgtttgtgctagtgattattttgtcgatcttgccgtgttctctatcgtgatatgtgatgttaacctcgggggagtattggtacttgacatgcccatactcaagcactgaactgtcaattccaccttctgccacttgacccatgaccagtgacccgctctttgcaaatgaacaggggtactcagattcaaactgtcctggtttttgcatctcataactttgcctgaacgtagcactatggcatctggtgggtttgatccctggttgataaattgtcttgactcttgacttactatttaccactgcatttttaaccacatcactataaggaacttattgtctgtgccctaagttgtacaacatgcactttcttgattatcctagagtggcaatggtaaaccttgctagcgtaccacttcatgcttcatgtcagtctggaagctgatagttctttaacatatcatacaataccgatggaaagcataaaactatttcttctctctgctagttgttacttggtagatcacacattcacacctgcttcttcaacgacctgaacatgaatctgctttctgcattctgtaggcgtgacgttatcggagctatatcatggggcttgttgtgttgttttctgataatatcatcgtacatgacgctatacttcaggcacttttggcttagtgccattattatctcactcggtattcttcttcctgctggcctgtatattttgaggcaaagaaagctggctaagaaacgagagagaagactgttgttgcctctctctgtgtaaggttgttgtgttgcagatgttctcctgtgatgtgtgatgtatcagcagggtaatacgaaggcaattccacaatgatggtcgcacaaacgaatatcgccatggacctggtcatacgatcatatacggttaagtcagataaacaagaaattatggctttggctaatgtttgcaaggaaatatagtagtttcaaagtagcagcaatggaatgtttcatctgaaaattcatcttacgttagatgggatggttgattataagtctatcgcttaaactttgggggaaatgaccgaatgtgatagtgatatattattatctca

SEQ ID NO: 33371 - DNA, 4389 bp, Zea Mays
ctcgtccccgtccccggccccggccccggccccgcatctctctctcgccctgccgtctccggagtctggagctgctctcacaaccccacacgcgcgcactcgaccccgacccccgacctcgtccaccacccgcttggcgcgcgcgcagtccttacagatttcctcgcccggggtggcggtgaggcctcgcaccgatgagctcggggaccgtcgcggcctcggaccctgggggtggcgagacgaagctggtggcgggagatgacgtcacaatatcggaagctgcgggcgatatgcctgcgttcgccgccgatttgaaagtggaggagaaggctacgttgacgatggatgtggctcatgaaaggggagatatggcggtgagcgacccactctacgcgactgagtcggctgggatggttggtaccgaagggcacggagatgagcccgtggaggacgtggatgcggtgaacggagaggacggtggcgaggaggggacgcaagaagcaggagctggtggtctgctgactgagacggagaggaagccggttctagtggtagatgtgcctgctgctgctggttctgccgctcctgaacatgctgaagccggagagcagtttcctgacagtggaaatagcccagacagcaacttagaggctgctagtctggggaatgttgatcagggtgctagataccgcctcccacctcttgataaaggcaggtttcaagttgctgatcttgtctggggtaaagtgaaaagtcatccttggtggcctggtgaaatttttgatccaacagatgcatctgaattggcgctgaagcatcggaaaaagggcagccacttggtagcttattttggtgacagtacttttgcatggtgcgatgaatcccagttgaagccttttgtaacaaattattcacaaatggagaagcagagcagttcagatggctttgttgggtcagttaataatgcacttgaagaactgtcaaggcgggtactgtcaggtttgagctgctcttgtttggcagaagagcttgctgataatggtatgtcatatacggttgataatgctgggctcaaggatggagttacttgttctgcagttaatcggcctgagatcttgaactgtttcagtccagaaaaccttcttaattatattaaggagttagctctatttcctggccagggaggtgatctattggagttagtgatagcgtgttctcaacttacatctttctatcgatctaagggatgtcctgaacttgcatcatttcaaactagtgatgcgtgggttgaggatgatctggatggtatagacactttgtccacccagaatgtaatggtggaggaacctgtgattaacgaagtgcagcctactcaagataagcccaaaaggggcagggggagacctcggaaacaaaaggctggtcatgaccaggtggtgatggagaaaaggagcacatctaatcaggtcaatgatactagctacaatgagaagaaaagaaacctcaaatcatttgaagattcagagaagtcatcagctccaactggtggtggttctttcaagattggtgagtgtattcggcgagctgcaagccagctgacaggatcttcatctattatgaaggctcagaatgaaccaacagtctataataacgctgctgaaggagagaatggggaatttgatgtctctagtgatgatgctggtgatgaacttactgtggagaaacgagcaaaaaggaggcgtctgcacataaatcacgctgcagatcccagggaattactgtcacaactatgcttggttgcaacagagccaatgaatggatatagtttctcagcaatgataatcggttacttcaacgattacagaaactatattgtttctactactactgaagcaaacattgttgataaaggtacatctagaagagggaggaagagaaaagaagttataccttctcctgaggtagagacaacggatcatatgcaggactcgtattggtccggattgagcttgtataatcacccagttcatgacctaaaaagagagagtccgactacaaggccaagacggaaacggagatcctcaagacatgcatatatacctttgtcggaacttggggagccggttcctaaaaaacagatacaagtgatggaaagatctatcatccatgtcgatgagaagatggttgatgagttgaagcccactgcacttgttttgacctttggcaggcaagtatagcacttttggaccttcgcttcgaagttaccgtcttgtcagtatgccactttctccagagacacaatcagcaaataatcctgaaaatcatggcttggagattccaggtttgaatatgtccgaagctcctaaggattccatggaagttgacctggtgcagaaaacagataaagtaaaagttacaggagaactgtcatctgaagaagttgagactgtaaggcaaacatgtctagtggaagctgcagacagtacatttgtcagtgaagttgacaggcttgagaaagcaggaaatattgatgctgagctaattgtccatgtgaatcagattggggaaggtgcagaagctgcatctgtatctgaagagtcatctcagcaagtgggtgacattgagcaagcttacactcaaaaggcagcgtcagtcagtgatctacccacagagatagaaaccttacattctgatgctataataaaagagttgcctcagaaggctccagataatatgcaaactgatatagccacggccccaaaacagagtcacaatccaggagataatgctgtatttgaagctgtcactgaagtgccaagtactgcacaagatcatagtgaggatgatgttggggatgaagttccagaagagcacactgtatttcctgtgttacaaagtcaaacccctggtgagaagctagtggggcaatctgaaactgaacaaaaagtgggacctgaagatccaaagtcacaagctgaaaatttgactgttgaacctgtcgtacaaggtgcagtcgagcaagtagaaattgaactggaatccaaaactactgttgaagtgtcatgcgaacaaggctatagtattgagcagactgttaacatggaagctgtaattgaagcatcaggtggacaacttgaggtgggaagacgaatttcagaagatgaatctatggctgatgcaaatattgagcactctatggtcatggttgatgaaactgtggaggcaaaagtagtaccactcgaggagagtacagagaataatgctgctaccataggagtagttgaggagacagctgaaggtgaaactaaggaggaagcaccagacgagaaggggaaaatagaaaataatgaagatgctgacaaattagctggagagaccagggcaggtgaaattacagttgaggcaccagatgagaaaacagaaattaaagcagatgctgacacaccagctggtgagaccaaagaatgtgaaattacagtagaggcaccagatgagaaaatagcaaacaaaggtattgttgaaccaataatcagggagataactgaagatcaaactgcagctggagaaccagatgaagaagctacaacaactgaggaaacggtagaggatgttaaggtgctagatgataagtctacagcagatgggaaacctgtagagaatgccacagtcgcgacaaatgaggattcaacaacagttgagaatactctgaaggatgcaatggttgcgccaccaggtacaaataccaccaacgccgaagaaactgctctgggtgccacagttaaagcactagatgaggatgctctagcagtggagaagactatagaggatacctcggttgaggcatcagatgtacaagcaggcaggtgcaagtgagtaaaccagcttatcgaaccttgcgttcctgtcagtttctgttgatatcgacgtagtttgctcaactgattctctcatctagaactttagatgatgtgttctgtatagaaaacctgaaactactttagcatcataaggccattaggtattgacaactagggcatctatatccttctcccccttttttgctctataaacttcacctagttgtattgggcgcgtacgtgttggtgttgtcataaacacaatttcctcctatatgtcagttcaatgctcaggtgatcagtgactgagtgaaagccttgaatcaatagggggaaggcatgttcattactacatttaacggttaggcttgcgagtctttagattatctacttggatcaaatgattcttgtatcatttgccatttgtaaccaactgtgttctggaatccttttatcatattacgtagaatatttagataattctatcttctcattggtcatcgagaagtctgcaaaccgtttagcatttttt

SEQ ID NO: 33372 - DNA, 2058 bp, Zea Mays
gtgccccaccggcggcagcagcaccggtgacgccggcacgcctaaatgcgtcgtcccctcgcctctgcggccctccgcctccgcttcttctcttccacctcccctgcccgccttctctcgccctgcccattccttctatcccgccgtgacgacgacggcggccgcgaggcctcctcgtcgccgctgcccccgctcccgccttctggctcggctttctccccacgcccgctcctcttctctgcatcagctgccgcgggcctcttcagcctccatggcgggtggtggaggcaggctcttcctcctgcagcgtcgcggcccctcggctccgtctctgacgcagctcccgtccggctcaccatctcccgcagttattctctgcgtgtggccaagggcaagaagaaagcacattttgacgatgaacacagccatcgagcggttaacatggcactatggtgcaacttcctcgttttctccctaaagtttggagtgtggatttcaacttcaagtcatgttatgctagctgagcttgtgcattctgttgcagactttgctaaccaggctcttcttgcttatggtttgagcagctcaagacgtgctccagatgctctacacccctatggttattctaaggaaagatttgtatggtctctcatatctgcagttggaatattttgcttgggttccggtgctacaattgtgcatggagttcaaaatttatggaattctcatcctccagagaatattcactgggctgcattagtgattggtgggtccttcctaattgaaggtgcttcactgcttgttgctataaaggctgttaggaaaggtgcagaagcagagggaatgagtatctgggactatatctggcgtggtcatgatccaacttccgttgctgttatgactgaagatggtgctgctgttacaggccttgctattgctgcagcatctttggtagctgttcaaatgacaggaaatgctatgtatgatccaattggctcaatcattgttggcaatttactggggatggttgctatttttctcattcagaggaataggcatgctttaattggccgggccattgatgatcatgacatgcaacgagtccttgaatttctgaagtctgatccggttgtagatgctctttatgattgcaaaagtgaggtgattgggccaggtttttttagattcaaggctgaaattgatttcaatggagttgttctggtacaaaattatttggaaaggactggacgtgggagttgggcaaaacaggtgccttaccttgaaaatacctttatctacagtcattaatcgatgtgcattttgatattcagtattcttgtcaggaatgtagtgaaataatcgcaaactttttagtctttaaactaggtgatttattgccttatattataattctgttcaacttgtgtggctaaaattctagctgccattttattgatgtttggctggtttattctgaaaaaagaatgatgtcaaggaagcatattacgtcctagtttcatcttgttataaaagggcagacctggtgcagttgtgagagctatctcatggagccggtcacggacttgaagtagcctccgtgcatttgcgagaagaaggctttcctcaggtcatgaattcgaagcagctttacttgtagaggaaggtttggctcagttccgggaagctgcaatgtccaaggatgatacggaattgctaagggtcatggccaactacggggaggatgtagttgaagctctgggatatgaagtggatcggctggagtctgagatccaaaagcttgtgcctgggattaaacatgttgacatcgaggcacacaatcccgaaggacttgctcttagagcagaagttttgtagattacctgtgtacattgcatttgattaacactgttgctggtcgctgccagtttgatttgggtccaccaccattcgataagattgtcttccattggcaatgtaagaatcagatggctgttgttgcgtagcgaggcggtttttttatttggaagaagacgtggtcgcgcctgacatggaaggctt

SEQ ID NO: 33373 - DNA, 3155 bp, Zea Mays
gcgcgtgccacgattgtgcttgcccgatttgaggttctgccggcggggaaatgacggctccacggcggggtctgggctatgggagggcgcgctgctccaactaccgtcgggagctcgttaccaacatttgggcgcacagtgggaaagctcgcctgtagattcgagtccgtttgggggtagtgggagcggcggattcgagttcacatgtagtcttccaggcgccagcagccatggaacaatcaatacggtagagattgtgcagcctatgcttaacagtgaggaggatgtaatggacactgcagcagatactaggcagtttcatattcgtagtctctgtggcctccttgcttgtggggggaaaaagtaatcttttttgtccgactccgatgcttatgttttattcaaacgcactcgtgtgtaaaatcgatgggtgcgagagtggacaaatctgaatgaggtgaaacaataccttggataatgaatcgggaaatggcatagctatcctgtttaaattaacaatgccaagccttggcaaagaacatctgatctgctgaacatgtatcatggtatgattcaaatgatcgagaaggtcggatactaatgtgtcagttaataatgtttggcacaagggagtggaggtattttgtaattcagatggaacacaagtgtgtgtttatgtgcatatggacatttctttctctgcctacaattgtatcattcaagggcatacgtaaagggcagatatgcttttttttcaggaattcctgaagacacattgagaaattttatgtccaatgtcttgcctgctgtattgatcctggagtttctcagtgggaccaatttgattgttcaaacgtttgctctagaagtagtcgcccctgccatgcctccattccaagatctatcacgtcctccagtgcagcataccagacacttagcaacagctgctcctgctcacgtagatgctgaccctccggatgcagcttcaaattctagcgcagctcctttgggattagtgcagcctccagtgtctcctcacagtggttgttgtgcaccgaacatggtacaaaaacgagggacccgggactgccattgtgtttatccagtgagaattgagctcttccttcgtaatgtttccttgacttcaaactggagcaacaaatttcttcaagaacttgcttctcagctcaacctgcgcgttaatcagtttgagattgtaaatttttatgttgttggagcttctgggctaaatatcacaatggatatagctccctacactggaattagctttgctgctgatcaagtcaaggcaatgaattattcacttactctgcatacagttcggattgatcctgtgttggtcggggactataatcttcttaatttaacttggttcaggtcattggctccagctccagctccagcattcacaatggcacctagggcctctccatctacagcatctacctttccaagacagagtgagggtccaagcaaaaatagacatgcaagcctgatcacagtggttattatatgtgttggttctctaattggagtcttgctgattgttttaacaatatgcttctgcacatttaggaaagggaaaaagagagtgcctcatgttgaaactcccaagcaaaggacagcagatgcagtttctacagtggagtcccttcctcgccccaccagcacaaggttcctttcatacgaagaactgaaagtggcaacaaataacttcgagccttcaagtgtgcttggagaaggtggttttggccgtgtcttcaagggggtactgggtgatggcactgctgtcgctataaagaagcttactaacggagggcaccaaggagataaggagtttttagttgaagtggaaatgctgagcaggttgcaccaccggaatcttgtgaaactgattggttattacagcagccgtgaatcatcacagaaccttctttgttatgagcttgttcccaatggaagcctagaggcttggcttcatggtacacaaggtgctagccgccccttggactgggacgccaggatgaggatagcacttgatgctgccaggggattagcatacctccatgaggattcgcagccttgcgtaatccacagggatttcaaagcatctaatatattgcttgagaatgatttccatgctaaagtgtccgattttggtctggcaaaacaggcgccggaaggtcggacgaactatctttctactcgtgttatgggaactttcgggtaatctgaatgtccttttacatttagccatgggtccatggcccagcaatttattttctgaatttaccttcaccttgtacttctggcctttttgcaggtatgttgcaccggagtacgccatgacaggacacttgcttgtaaaaagtgatgtatatagctatggagttgttctacttgaactactaactgggaggaggcccgttgatatgtcacagccctctgggcaggaaaacctagtgacttgggcacggccaattctccgagaccaagatagattaggagagctagctgatcccaggcttggcggccagtacccgaaagatgattttgtgcgggtgtgcacaatcgcagcagcctgcgtttcgccagaggcgaaccagaggccaacaatgggcgaggtggtgcagtcactcaagatggtgcagcgctctgtggagttccaggaatctgtgccaacacctcccgctcgccccaacgtccggcaatcgtcgacgacctatgagtctgatggcacctcgtccatgttctcttcgggccccttctcaggcctcagccccttcgagaccgaaaccattccaaggactgcggttttctcagaagatctccatgaaggtcgatgactggtggggggtggctgccttgccatcgccgagccgagccgtttctctagagcctgtagccatgtagtcaagcattcaaaggctggtggtccaattggcctggccagccattgggaggaaaggggtacctgtaaattccatttttctgcgccgtctcaaaagactactactagattattacaacccacaaggacgttctctggctttgtatggaagaaatggttttgttcgaagttgctgctgtcctcagtccatagctcctgaattacgcagacagacagtcctaac

SEQ ID NO: 33374 - DNA, 535 bp, Zea Mays
tagagttctaaattatttttgatacgtaaatactacataataggctacaattcttcagtcagaatcacaatctatgagtaactcatcttcggagtcatccgtcgcgcaatcctcaacaacaacctcattccacttgctgcattgtcctacatcacacttgtcaccagttcttttgtaataattggcttctgcttcatctgcagcttgggagaatagctcatcctcagcctcagcctcatcagacttcttcttgtaataagctgcctctacctctgcggcggcctgagacataaactcattctcttcctcttgagcacgtaatcctgcctcagctaatgcgatgagctcactcaaccttgacgtgtcgtcctcctcttcttcatgtaatcctgcctctgcgagggcgataagctcactcaatctagatgtgtcgtcgtcctcctcctccatcagctcaaccgttgccattttatcctgaacatatctcgcatgcgcctcatcggccaaatagtttacgtcgcttccaatctctgca

SEQ ID NO: 33375 - DNA, 1318 bp, Zea Mays
gcaaaatactgcgtgctctcttcttctggttctcctcatcacattcaccgtcgtcgtcatcacataagcttttatctaggcttgcggctacttgcatcggagcaagtcagtcacatctcacagctcagtgagatccagagccaaagggcggggcgtctcccactcccaatcccaagtccagccgccgccgtctcttgctcgctccaaaagccgttttccagagatctttttcagggccagacgccagccgccgtctctcgcttgcctgcatttccgatcctgaggcagtcctcatctcattctcatccaaccgggaggttgggaacgagatcacagctacagttacctgagtagtaggatcctcctcagatcggcttcaaaaatcaaagtgggggggacaacaaggcaggggatgagtgcagctgcaaccaaggtgaagagacgtgtgggcaagtacgagctcggccgaaccataggcgaaggcacattcgccaaggtcaggttcgccaagaacaccgagaccggggagccggtggccgtcaagatcctcgacaaggagaaggtcctcaggcacaagatggccgagcagattaagagggagatttcgaccatgaagctgattaagcaccctaacgttgttcgcatatatgaggtgatgggaagtaaaacaaaggtctacattgtgctggagtatgttaccggcggcgaacttttcgacacaattgctaaccaaggtcgaatgagggaaggcgaggcgaggagttacttccaacaattaatcaacgcagttgattattgccatagcaggggtgtgtaccaccgggatttaaaaccagaaaatctactgcttgactcatatggaaatctgaatgtctctgactttgggctgagcgcgctgtcccagcaaatcaaggatgatggattgctgcacacaacttgtgggactccaaactatgtggcaccagaggtcctagaagatcagggctatgatggtgcaatggctgatctgtggtcatgtggagttatcctgtttgttctgctagctgggtatttaccttttgaggactctaaccttatgacgctgtataagaaaatctcaaatgcagaatacacatttccaccatggacatctttccctgccaagaggttgttgacaagaatccttgatccaaatccgatgacgggttgattttgcgtccatattatagctgagcaactctttcattcctagcagattcatctctccatacgcccgagatcccaaagcttcccggcgccggttctcgccgctcgctcggctgagatggcggctttaggt

SEQ ID NO: 33376 - DNA, 299 bp, Zea Mays
cacacatatgctacgagcaaaaggaccaacgtaattaatatatccaaatcatcaatcaaacactatctgaaacaataaatcggcttatcattacctaaacccaatctgaattcgtgagattgacgacgatgtccggtgggagcatttcacagcacaccatgggagcgatggatggggttcgctttttcttcacctaggttccctagatctctttctcgcggcatacagaacaataacgaatgaacgtggctattgatggaatcgacggtcgacgatgccgtagacggggcttgctgaaa

SEQ ID NO: 33377 - DNA, 1514 bp, Zea Mays
cacttgtttaagccgcgacctgcgtcccagcatcagtcagtgcatcagcattcatcgccccctgcctccccttccattcgccctcctcccactccaccagctcctgcctgcctataaacccagggccgccctttgactctccttccctgtccagtggcggggccgcttcccttgcgttcgcggagagtctgtctgtctgtctagctagctagctagctgccgagagcgtgaggaggaagggggatccatggcggcggagaacgaggagaaggagacggcctgcgcggggtacaagcacgggccgccatgggtgttcaaaggcagcgcattgtaccagctgcatttggtgaaggcgtcgacggcgcgggccttcgtgccgcgggacctccgcctggttgaggccttcggctacacgctcggcggcatgttcctggcgcgctaccacgacagccctgccggcgaattcgacgagctcgtggtgatcgccggcattgtgtggaacccgccgacctcctgcgcgtgagttcgccttcgctccgcttcatgcctgcattgcattcgcatcttctgtggcctagtttaatcccttgtaggcttcttcgccgctttctcctgcctgattggcctcgatcagggaccccccaacagaaaagaacaggggcaacttgcagtatgcgaaggggaaagaaaaaaaacgaaaaccctcgtgcttgcgccagccggccataaacaagcgccttatcccccatatgattgtacttggcagcacggactgtgccttgcttctttcaattattcgtaggctggggaggggtgtccgggtgcgctgcacttgctccgcgtggccaacttgctgccctgcgcagctcagctacagcctacagccgcccgtggtttcctactttcctccgtcttcgaaatgcagcagttggatggaactctgaatagtggtgggctgccagggtgctggtgaacagcgtcgaagcctgccggcacggccgcaaggaggtaggactgccaagccatgtcgccacattctcgtcaaaggtaccgagataccaaagccgttgctacttgctacattccgaacgcttgtggcagctgattaggactgcaaaatgtcgctgtcgtgagacttgtaacctgtctgtgtcacatgatgagacagaacgaggctgcttcgcttggggatagaccgttggctagaccaaacagcttcctcaacatgctggggatcgggtcgacagccttcgagcaagggaatggccgcgagattgaggtttcagagtccaagggcggctcgtctactcggcatctgtgcaacatcagcctgccatttaccgcggacgtacagtggaccatcctgatcttctcaagtactcctgtcaagtagaatgcaggtgatgacaaaaaacaaaactctgtgaacgtcctgggctagtgagctatccattgatggcgtacgatctacccgtattcgacgcactgttgacatgtttccttccacagggtgc

SEQ ID NO: 33378 - DNA, 2158 bp, Zea Mays
ccgtgctcaacattgccgccaagaatgcgactctcctcgccgcactgctctatctcggggacctcgcctagcattgccccctgccccgcatcgacgaggtggagtccttcctcgcccgcaccttccggatgatccagctgacttcccgacgccaccctcgcacaagatcccgatgtggcaatggcgaccagcgacgggcgctcaacgccaccgcgccgcctgcgaacccatggtgagaagtgtggtatcgatctagagccgaaggacttccccaacaccccttcctccatcggcgtgacatcggccagctcatctgcgacgacgaggcatcttcgaccgacttctcgacaccccatcctccatcaatgcggctccagtaccccttcctccatcggcgcagcagcatccaattcatctacgatgacaaggcatcttcgaccaaccacgccctactacaagtggtgtcagtccatctcagataagtggagtaatttgtttgtatctgtatcttctattttatttcttccctaatcctgattaatagcctaatcacgcgacaactaatacatgttgatttctttccttagtcggtgtcgtgcgcatgtgagatctagggagaggaagaggaggaagggttgtggggaccgggggtgcaagatggcggattcacctgcaactacaagaaaagaaagagcgagagatttacagaaaccttcagagccgcggaggaggagaaggagattaggaggatctctacggcgctgacggattagttaaggaacgaaatatcacatcgtgtccggtaaccagattcagatgtgggcaccatgcgtgggtgcagggccaggccgaggtgaaagagattcgacgattgagaatacatcaaagaataaaaatgtggaactcggattttcagatgaagagcgtgaccaagaatttcccgattttccatcatttattccattcttacctcctctgagtgcagctaacctaaaggtctactatgccacacgtttcaccatcatagttgggataatggtgttcggtggttttcttgcaccaatcttaaacttggtctaggggcacatcttatgaagactccatctgcagcgttcatctgtcgacgtagttgagatgaattctctatgcctacttctagagtgatgttcaaagaggttgacgctccttcaccatccccagctttgtggaatgggccacaggtagccatttaggatgacaaagccacaagggtgtccttcatcaaggctatgctagaagcctcagacttgtgtctgaggaaaattcataaaaatggtacacagaagaaagtggaagaggaatttagcacttgccctctgtcagtcctaatgatgagcgttaagaacaacaccaagatactgaaagcaaacatggcttgttcagtcgggcagcggcagcagaggggatggggccaatgacggaggcggagaggagaacccatcgatttggtggcgtaagtgggagctcatcgaggccgccaccggccggtccacctcttcaataatcgtccttcatcgcccttcagttgacctgagatctagaaggacacaacaggcaagaggggcgagggttgttcagtgctttgacatgtgtgcaactattcaagcacaatgactggaggattatagaggactaacaagtgctactgggagattctcgagcaccattgaactaagagattccaaatagttctttggagtctattgttgatgttggcggggataatctagcagagatttgtcagattttttgtgcaacacggaggctacatgaggcagcaacgatcccattcttctcgcatgccactttacacaagctaaggatagcttctggtctcactcatggttgtggcagggaaagccgagtcagtagggtttgtcatgtagctggagttatctcagaccacatattagatgcagtgatgatgttaatggaggatgtttacatttaccgtgcaagcaagatgacttatattatgccttaggacaataagtattgttttcactctaatgaaatacttggtaaaaagttgtctctgtagttgtatatttgactgtgaatatttgaacccactgttacaattgttgctaattgaggtcagatttcagaggccaaataa

SEQ ID NO: 33379 - DNA, 1676 bp, Zea Mays
cgaggcccgtgccgaccctccgcatttcaaattccctcggctttcccttctcccttcgaccgatcctccggccaggccagccttcaaacacctcgccgacgccgccgtgcccgtcccggcgcggacgggcgctagagccttaattgctaagatgttagctgaggatcttgggttacaaaccattagaagcattgcagatacagatgatctgcattgttctacagcttctcacgaatgttctagtggcatgggaccaaaaatccgtcagcttgaagttaaaataggacgaaaagcttgcaatggtgcatcagaaaatgaacgccgttctcactatcaaactaccatgaagggcaattctttgagaggttccacactgatgaagcctactgccagccaattagccaagcaaaacagaccggcacagttaaagaatttgacacagaataaaaagtcagtgggagttataagagagagaagtaccataagctcaaacgattgcaattaccaatccactaaaagacaaagattagagaatgggcatctcaacaaggctgctgctactgctatccagcatgagtttattcataaaaatcatgaaaagaatgttatgaatcaaaacatggatcagcccactgttctgcccagattgaagattacaattcctagatcacctgatttggcaacaaagctaagagcagagaggtcaaaagctcaaagagcagtgccaactcttccaaagcagttaaatgacttaattcaacgggttgcaccctctgctcctacagttcaagtcgcaccaactagaaagcaggtagttcaacctttttgggctactggtcatcaacatgcaagcagacaacacgaggatgttgggtcaaatgtggcagcatgtacatccaatcatgcaaggcatcttaagagcgtagataacaaaaccgaagataccaggcatggtctgtttaaatttaaagcccgtccgttggatagaaagatgttagagaacaaaggtgatggtgtatttcgatgtgcaaaaaggaatacaactgtgcctaaggaatttaacctatcaacaggcaggaaagccaatccagctccgttgtctgaactatttaacaagctttctttaactgcgggtgcacatcaaaatcgtggagtagggcgtcagatcagggatctgccaaattatatcactaccaagagaacatgattggtaacatgcatcgctagtctgactcatgtcaatgaagaagtagaatatacaggatttctcttttgatagttagtgcctggtttaggctcaacgtcaccccacccgcacagagaccaagcgtttgttttggtgttttggacagttgactcagaaggaagctcgcatcctcctaacctgctcatacattatttgagattaagagcaccatcgctgaggtcgagtgtggaggcactgattctcgtctcggtcatagagttgcttctgctgagcatgttacagttatctcagctgcccggagccaatgagtcatggctgtgatggggtggtttttgtacagcaagagataaaccatagtgtaggggcggctcactcggtggatctgcagccctgcgggctcccgcagagactccaaagtgtaacgtattgcaatcgtcttggcaaggtcgtgctcttcttttcgtctttg

SEQ ID NO: 33380 - DNA, 1411 bp, Zea Mays
ttccgccgggccgacgacggccggggccggcgatggatcctgcgcgaggagcggaattaaatagcgcgtgacccccgaggcgggcaaatctggatgcttccttccgtttccacctcaacccgtcccaccgctcccagtcccgggacgtacggtgaccccacaccacaccaccacaacccctccgtcctcttcgcggctgcggtgcggccccgggagttccttgattcggcgggcatcgccatgggagggcgtcgctggctagctgtggtagctagtattccagaggtgatttctcctctcctgatcgacagagggcaaatctggttcgtgaccccccagtatcatatcagagagggccacggttttgcttatcaatgtgttaggagttaggaccaagtactggagctatttcgtggttccgatggagtctaagtgtgtgaacgaccaggacaccttgatcgacctggagagtggcaacggcactgcagtgatcaaccatagcaacgacctggagagtggttgcgtgtgtgcgtgcgccaacggatgtccgagggatgacaggaacaaccagcacatggactgctcttcaccggcttcggacgccgttgctagaagtggagacgacaggaagtccgagggggaggagaagctgggcctgggccttctggacagctcgggaggggacaaggcgaagaagaagcggtcgaagaagaagccgccgcggccgccgaggccgctgacgcctacgccgctggacgtctctgaccagaagctcctcaacgagctgagcgagcttgccgtgctgaagcgggcgagggtcgagcggatgaaggccttgaagaagatgaagaacgccaagcaagggttctcgggtggcaatctgtgccccctgatcgtcaccgttatcttctgcgtcgtcattctctggcaaggtttcttctcgggacacgggccggcggtgagcttccatggatcaccggaatcgtcgatcagggggacgcgcagcagtctgatctccatcaggttctacaagaaccattccaacacgaggccaccaccattcagcgagaccactgcagctcccgagtacgtctggatcggggttgtgcctcgccagccccactatgggatccgcctccgaacttgaagcgtatggactatttagaggtcaccaaatccctctcgatgtcaaaaggcacaggatccaacactacgcctttgatgtactcgaagcctcgtagctgatttgcggcatgcaataagggttaccatatataaaactatagatctgaaatacagtgaaagtttgaaacacaaggagtctacagaactaagatgttttctcttcctgtttcttgtacaaaacagaaacaagctacattcaatactacattacgatactttaaggtga

SEQ ID NO: 33381 - DNA, 362 bp, Zea Mays
ccccagccgccgtccctgccctatcctccctcaggccaccgccgctctcccctggtagccgtcgcctctccctgctctgctcctctctctcccaagcggctctccctctctctcctcgcttctctcccctcctcttctccagccgctgctaggcaaccggccgccgagcagcgcagccacgctgttgctctcgccaggacgccaggaaccgctgccatggctgcagcaaatctgagcacagttggcttctttgcagtttattcctgcattttttggggtgattaattcctttttcaaggaacgtggatgcgggcgataaattgaagctgtgggtactctgttttctgaaagacaaatgatag

SEQ ID NO: 33382 - DNA, 1953 bp, Zea Mays
acaccacaaagcaatcgagtgcttccaaaccgggctgacccgcgtcgggacgttccggtccgtttcactcgctgttccaccacgcgctcgcccctgatccaccaccgcggccgcgatgagcaccgcctctggcgacggcgcggacgcaggcggcgacggggccgccgcatcggcgcccgccgggaggcggatcccgcccgcctcgtccatgccgtgggtccgcaatctccgccgcttcgtcggcacgggcgccggcctcggatcggaggccctcatggaactggagactaaaaggatattgcttgagattttcaaggagcggcagcggaagagtgccgaggctggttccatcccaagtttttacaagaagaaacctgaagaaggatccattagctctagagttcaaaggttggccaagtacaggtttctaaagaaacaatcagagcttctgctgaatgctgatgatcttgatgccatgtgggtttgtctcagagaaaattgtgttattgatgatgctactggtgctgaaaagatgaattatgaagatttctgccatatcgccacagtctgcacggagcagattggtcagaaatgcaaacgatttttcagcccttcaaacttcatgaagtttgagaaggatgattctgggaggattgctatcctaccattttatctttatgtcatgcgaacagtttctcttactcaagcaagaattgatatgagtgagcttgatgaggattctgatggtttccttcagcctcatatgtactgccgcatagctgcacgcaagttctttttcttctgtgatccacacagacgggggaaagcatgcataaagaaagtgttgctgagcaattgtcttcaggagctaatggaactacatcaggagagtgaggaagaggtaaccgataccgagcaggcagaaaactggttttccttaacttcagctcagcgcatatgtgacatgtttcttgcactagataaggatacgaacggtacactgagcaaacaagagctcaaggaatatgcagatggcacgttgactgagattttcattgaaagagttttcgatgagcatgttcgccggagcaaagttggaggtggaaacagtcgtgagatggactttgaaagctttcttgattttgttttggctctagaaaacaaagatacccctgaaggcttgacatatttatttaggtgccttgatctcaatggaaggggtttccttacaactgcagatattcatactctatttagagacgtacaccagaaatggattgagggagggaactatgagctttgcatagaagacgtgagggatgaaatctgggacatggtgaaacccgcagatcctctcaggatctcgctatcagaccttctttcttgcaagcaaggtgggactgtcgccagcatgcttatagatgtgcgtggcttctgggcccacgacaacagggagaaccttctccaggaagaggaagagcaagtggaagaggcatgagttctccagctgccaagtaaccgtacctggtgcctcaaaattgcaacatcctcggaactgcctgtaccgcagtatcagtcattgtaacctagatagtgtattaaatctgtcaccaccagtttcctgaagctgaagcttgttcttaagtgtgccatagtggtcttcgaaacttgttgaggctagctagcgccgtttggccatattgacatctatccgtgagggcctgattcctcggcagcctgtatgtacatctagatttgcaccaagcgcgcaatcctcaatcctgactacggcatcacgcctgtaagcatatactccgtatgtaatacattgtgtttagttcgtacatggcttgtgggtcgttacttgaatgcctggtttatgccatttttgctgcatagcagaaccttgctatgtatcagtggggactgtgtgatcttgaacgcccaacttcc

SEQ ID NO: 33383 - DNA, 1998 bp, Zea Mays
cgagaacgagacgagaggattatttctgcgagagagagagagggttggggaaggtcaggttcagagggaagaggaagatctcagtcaaaagtcaagaccctcgtttccacctcctgcggcgtgattcgggcaatcgggctctgccgctcgtctctcctttcagcatccatcgccgctgcttgagctctgcctccacttatctactacagtctacaggctcttggctggaactaggaagtcatgttgagtggccacgccgtgacactgagcgagaggagcgcctccggtacgcgcttgatcgaggatgtagcgtgcgaggcaggcgatgaggaggaggcggacgccgccgcgagagttgtgtaccgggcctcgttccaagagctgatgcccaactaccttcagtacgacaccatcatctgggcactcatatccctgctgcttgtcctggcgtgggggatcgggctgctcctgcttctctacctgccgtacaagagatacgtgctgaagaaggatatcctatcccgccaactctttgtcaccgagagtaagatagtgtacaaggtattggcgactaggccttcgtacatgccattcatggggatagttaagaaagagattaaagtacctctccatttgattgttgatgttataattgagcaaggtgactgtgtagttcctatttcggtttcaacttttggtaactacttgtttatgtgaaccaatacgacaaaacaatttctgcattttactaagctgaaaatactactttatggtgtttttcaacattgtttatggttgatatgaagttttgctagcatcagcttttgtttttcctaattcatctatatactccgctttttattggaacaatgcaggagagctgtgcatacctatataccccacttgatggattcatttgtgtgaagctataattcagctatgtacttcagccaggcattggttctttgtaaaaattcactgaatgttcaaggaaaaaatcactgatggacgtattaatgcattttactcatctaaatgttacaggaatatatgccttatcttgtactagttcgtatctcatgcataaacttgaacagaaaattgtgaaattgccttctttaaaagttaggactgtatgtgtgtatgtttctgaaaaaaaggatctattatgcaggctgtctacaatctgcttacagcttatacacatttagaatagaaagcatagcccatgggaaacctgcttcagtggatgaactgcaatttcatggtgtccataatccagattttctaagaaaggttataaccagagaagcctccaggagcatcagagaagtccaaagttggaaaaatagattgtactccgaggaaggtccttctcatgttcaaagtagtggattacactcacctagtgcaaaggtcagagcttccccaatctgtgctgcctttgattctaagggtaaaatttctgacaatatattgctccataagattgaagaacttaatcgatcagtgaagaatcttgagtctctactcgtaagatcacatagaagagaatgatctgatattatatcatctttgaaaattagctcaaattaaacatggaaagaacaggaggaacaagtggagtatatgaactctgtttttctatttagtccttcagatcagataccatgggaaattgcaaagctgctcatgccgtgaaggagcttctagtttgattcaagtttcacaagttatctgttgtacataggtcttgctgattcttccaagtttcacaatttgatgtacaaagaatcacagaatcagtggacagtggtctagggtcacaaagtagatcaacgtacatgtaagcttgtttactgtataaattctaaaatggtaatctgtgccaatacgtgtactgtaatgggcttaggctcagcccatatatgtttatagctatcaatacaacattctaatcctagttagggttttctattccaacatggtatcaagcct

SEQ ID NO: 33384 - DNA, 1044 bp, Zea Mays
aactgccgcaatgccgctctcctatccttcggccgcgtcagtgcgtcacgctagtagccggtaggcccctagggatgtccatggcggcgagccgccgcctcctccatctcctgccgcggctggagctgtgcctgcggtcccgtgcgcttagcatccccttgtcttcgcgggcacaggggatggctcgtcggaagcttgtgacctgccgacaaggtgctttcgagcaggggaatgcagcgagggataaggccgtgccgattccagataaagtgctccgtcattgcaagtacgccaatggcagggccctagacctagagcccattgaaaagaacttcgccaacgagtctatgcaattttctttcgaagaggagactgacgatatggtgtgcgaaattagcgaaagcgtggtgcgggatgtggagaaggctgcaattgaattgcttgctgccaggggtttgttgaatgatggtttttatgctgaatcattttcgcgatcccggtggctaacatcaacatggggtccaaggcgaataaaacaggcacttcaccaaaaaggtgtcccagaggcagaagtagatcaggcaacgagaagagtgttccaggatggcgacgactatggaaaggaggcaacgttcggcatgtccgaagcttccatggatcatctgtttgctcaggcgtccaaacagtggcagcgtgcgcaaagcttgaccctggagagccgacgtgcgcgcatggtgaggtggcttcagtaccgagggttcaactgggctgtgaccaatgccgttatcaggaagctggaggctcagcaccctccaccctgactcttctgactagactaggtgtgtgtccgtgcgttgcaacgggtgtacgctgggatgagtatagacacatatctaatcggatcttatatttcctgggggggtctgtagaaagtttactcgaaagccaaatatgttaagacctgaacatgtgttacccttatgtcccatcagcatactgttccacgcttgtatgagtcttgttaatttgcatgcctcgtgcata

SEQ ID NO: 33385 - DNA, 1844 bp, Zea Mays
ctcctccagccgagcgctccaatcttcatccgtgcacacatttgttatccaccgccgttctctctccatggaaaaaaatcttgccgccgttcatggaaggagactagtaactgtcgcgcgcctttgcgcgcgctacaaaacatttcgtaaaaaaaggatggttaatgtgctagatgttttagagacaatcaaatcttcaagcacaactccaaagaatattgctaaaacttccgaagcgcacactgaaacctttgacgccgaagcttcaaagccacagtctgaaactgaagccgggccttcagagcccgccaaggtgaaatccttagaagccgaaaaaacaaaaatagcagaacaaattttggctgaagaaactagcgctgctgcccccgaagcatcttccaaagtacttgattatattgtatgacatgcttcggggaagaaattatctgaagaagaaaattttgaagctaatcactatgcccgagaactgaagtatccgaagggggccttagtgttcaatggcacagacgaagattacttcttatactgtctcccagacaacaaagaattatctgtctaccgggagatgtctagaagtatggggttcccgaagcttgaagctgggctctgcgctatgacgaaggacgatcttgcggatagccttgcatataatagcctgaaggtatgagaattgtatatttggaaatttgtaatttttgaatcattcttttattcttatactaattcttttttcatatagggtttaatactgagcaacgctttgagagcacaaaagaacgccgaagacgagagctacaatattgctttcaacaacctacgaacagaggttattaagctgaggaacgaagctttgtaaaaagataaaattctgcttacattggtagataagataaaggaagacgaagctacctctaaggctcaagctgaagcccaaaaacgcgaaattcaggatcttcggaaacagctggctagagctaaagaagaacgtatacttgaagaaatagaacgagaacttagtgatcaatgggcaaatcatttggaaataaatgttgaagagcttcgtgcatccaagaaaaggtgctatgacaaatccatagaatgtgttaagaagataaaatccagcttcgccagcgttggcggattctctagcgaataaaatttcacaagggggaatccagaaggcccgattgaatggatcagtcacgaagccgaggccttcgaggaaatcttgaatagccgtggagacatatgtgctttttcaggcgccagggggattgttactattttggaaagaaaaggctgtgatcatgttaaatccttagcgcaattcgaaactgtcttgacttccgaagatataaaagacccctcggccgaagcaagcctggttggtgggaaatttttcaccgacatctgggacaatggcggccgagaaatggcccaagaaatcattcaaaaaagcgaaaaaggcatccatgacgctagaaaggtagccgaggctgctgagaaaagcgcagagcccgaaggacaaatagaacctgctgaggcatctccgggcccccacccgaagggggacgacgaaattagaaaaatggccgaagccatcatggacaaagttgtcgatcagctactgaacgaagctgcagaaatagttcttagggaagattaaatgctattgtaaaaacatttggagtgtaacatgtgtaatactttgtaactttgaatgtaatatataatctatttatggttcaattctttacgatgcatgaaattttgcatacataccgttttttgagcctccggcgaaaaaacaccttcccttcttt

SEQ ID NO: 33386 - DNA, 3087 bp, Zea Mays
cccacgcggtttttgtgtttgctgccgccgcggtttccattgcttctcccgtcgctagggcgctcgtgaatacgtgatccatcgtctccatctccgtctggtgtggtgaggtttgagagactcgaggtgtgagcgtcgcttcgtctggaatcggctctctcatttgttagatagatccttctatctccccacgtttgggcgtcgcttcgtcggctgcgacttgcgagacgccggcgccgccggcgccggtggacgaaggcgatcaaggattaggcgatccgatccgatccgaaccaattctccattcttcgattccttccttgggtgggcggctgccctcagattccttccacatggctcgttccccgccgccgccacccccttccccggcgcaagggaacgggaacgggagtgggagcgggagcctcaccgccagagacgccctcgcctacatcaaggccgtcaaggacaacttccaggaaaagcggcacacgtacgaacagttcctccaggtcatgcgtgattttaagagcaacaggctcgacagcgccggcctgatcgcccgtgtcaagaccctcttccacggctacccggacctagtcctcggcatcaacgccttcctgcccaaggggcatgccatcaggcctcaggacctcagcgaggacaaggagcccgtcgattatcccagggccatcaaccttgtcaacaggattaagatacgattccagcaggaggaacatgtctacaagtcattcctgggaatcctcagtatgtaccgcatggataacaagcccattcaagatgtttacgacgaggtcaccttgctgttccacggccatccagatttactcgaggagttcactcatttcttgcctgatacgcccatacctcctccggaggcaggcactacctctaaagttaggaatgatgacaagaatgctataacgcattctgccatgagagctcagacagttcagagtgagagagctcttccatcagctgctgattcggactccagtgttgatcgccttgatcttgagcatgatattcaaaaagagtgtattgaaaaggacaaagtccgtaatgcctgccacgatcagcatagaggagattataaaaggaacaggatgaatgacgaatatgaaaacgaagatttggatgcagaacaatctggtcccaaatctcaaagaaaggtggagggtactggtgatgatacaccaggggttgttaccatgtcctcattcaattgtaacgagggggacaacgatcctgaggaagagtctaaagttaggaatgataacaagaatgctataatgcattctgccatgagagctcagacagttcagagggagagagctcttctatcagctgctgattcggactccagtgttgatcgccttgatcttgagcatgatattcgaaaagggtgtattgagaaggacaaagtccgtaatgcctgccacggtcagcatagaagggattataaaagaaataggaagaatgacgaatatgaaaatgaagatttggatgcagaacgatctggtcccaaatctcaaagaaaggtggagggtactggtgatgattcaccagggattgctgccatgtcctcattcaattgtaacgagggggacagcgatcctgagaaagagagatataatgaaaggggaaaatctgaaagagtattgaccttcaattctaaggaaggagcagctcatgaagctagtacattccctagcaaagagaagtataacttatgcaaaccaatatcagagcttgatctgtcaaattgtcagtggtgcactccaagttaccgacttttgcctaaaaacgaagtggagcgtttaagcatatgcgcaaaaatcagtatgaagaaatcttgtttatatgtgaagatgacatgtttgagctggacgtgctgttggaatctgttagtgttacaattaagcgtgttgaggagttggtggaaagtatggaaggcaactcactgaaacctgatagctctatccacctcgatgaacatttgactagtttgaatatgaggtgcattgagtggctatatggtgaccatggacttgatgttgtggatgttcttcaaaaaaatgctggtgtgacattaccagttattttaaccaggctgaaacaaaagcaggaggagtggtcaatgtgccagtcagattttaataaagtttgggctgaagtatattcaaaaaattatcacaagtctcttgactacggcagtttctattccaaacaacaaaacacaagaatctgaacacaaaagattaacgaaatcagtgagaagaatagaaagggggatgatgtgttacttgctatttctgctgggaataggtggccactagtaggcaagaagcagaggactgctggaaagcgttgggctctgaagaagcacaggcacccgcccgcctgggcttctggtaccatgccgccgcccttgcttgcgtcgagggcctccaagaaccgcaccacctcgtccatgtcagggcgcttctccgggctcgcgtcccagcacttgtgcatgatgttcgccatcgggcttgggcagcagcgacaggccgcaggttctgcacacacagaatgtcaggccgcaggttctggcacatgcatgttcagttcagtatgtggacgattaccagcagtgaatccaggaactgagaacaaacctgatgaacaacggcggatgatacgtctgcaaagctgaggtctgcatgtcacagatttcccacaagcatatgccaaagctgtacacatggcacttcctgttgtacggcttgccttcaagaacctgcagacgccgacagaaaaagaccaaacagttgctcaaaacacttgtcctggtacagaacggaaacacagcaacagtgattgctttttttttgtacagatctaaaacagtagcggaagtatagattatagtgaccccatttttttaaaagaatttaaaagtccctttttcatatatgtcttgcttaatgcttaccctctagcaagatccattgctatctgaacaacgactttgtacgcgagcttccttcgcctgttctttatcaaatactgtttcagtgttcc

SEQ ID NO: 33387 - DNA, 2095 bp, Zea Mays
tccctggttccctgcctcctctgtatactaactctcctctctcccagagtcccggtcagctcgactgctccagttcttcccatttcccagccgccgcggcgccacgcagacctagcagagaaacacccacccgagatggcgatggctctgcgccgccttgcgggcgtgtccggatcgccgtcggcctcctctgccgcggccacggtgctactccggtcggcgctgacccgcccgatctccaccggcttccgcgaggagcgcgacaccttcggtcccatccaagtccccaacgacaagctgtggggcgcgcagacgcagagatcgctgcagaactttgacattggcggggagcgtgagaggatgcccgttcccatcatccgtgcctttggcgtgctaaaaaagtgcgccgctaaggtgaatatggactatggccttgatccaacaatagggaaggccataatacaggcagctgaggaggtcgcagagggaaagttggatgatcacttcccacttgttatctggcaaactggcagtggcacacaaagcaacatgaatgccaatgaggtaattgcaaatagggcatctgagatccttggacacaagcgcggtgagaagtttgtgcacccaaatgaccatgtgaataggtcacaatcttcaaatgatacatttcccactgtaatgcatatagcgacggccgttgagatacattcgaggtttatcccaagtttgcaacagttgcatgattcacttcattcgaaaactattgagtttaaagacataattaaaattggacgtacacatacccaagatgccaccccattgactcttggccaagaattcagtggctacactacacaggtcaaatatggaattgaccgcattaattgtacattacctcggatgtaccagcttgctcaaggtggaactgcagttggaactggcttgaacaccaagaaaggatttgatgccaaaatagctgctgcagtggctgaggaaacaaacctaccctttgtgacagcagagaacaagtttgaagctttgcacatgacgcttttgttgagagcagtggtgccgtaaatacaatttctgcatctcttatgaagatagcaaacgacatacgtttgctaggaagtggtcctcggtgtggtcttggtgaactaatcctaccagaaaatgagcctgggagcagcattatgcctgggaaagttaatccaacccagtgtgaggctctgacaatggtttgtgcacaggttatgggtaatcatgttggtgttacaattggtggtgccaatgggcattttgaactgaatgtttttaagccaatgatcgcagccggattacttcgatcattgaggttgttaggggatgcatccgtgtcctttgagaaaaattgtgtcaggggaattcaagcaaaccacaagagaatttcacaacttttgcatgagtctctgatgttagtgacatctttgaaccctaaaattggctatgacaatgctgcagctgttgctaagaaagcccacaaagaaggaaccacgttgaaggaagctgcattagaccttggagtattaacggagcaagaattccatgagcttgtcgtcccggagaaaatgattggtccttctgattgataaccccatgttcactatgtttctttgaagcattcaggttgccacatccgcgagttctggtggccctgtgtttccaagttaatgattctagcgcacccataaataaagcaaataatttttcatatggtcattaggtcctcaccgtaccgcactagagaaatgatttttgcatggcggatggtatctgagaaaacagttgtattcttgttcaaatagggagcagtgcactttgattcatgaggcgccttccattatcttggcatcagtcaaccttttcttgccaagtagctagtgctatgtaacaagtgacatggcaaccatgtatagaaattatttgcatgggtttgtgttcttgccaggtagctaatgttatgtaataagtgacaaggaaacaatgtcatgaattatttgcattgggttttgacgagtgaaatagaaatatacgccctgttttagttttcttttta

SEQ ID NO: 33388 - DNA, 1860 bp, Zea Mays
aagggggagaaggaagacgaagaggaagcgagctgggcaagcaatcgacgcgagaagatcagaaggtgggggcaccagaaccgcactttatatgatttcttgtggtggtggagattttgacgactttcttgatgcgtttttttttggccttcgctcttttggtacggtaattagcaaatttattaggagatggttaaatgctattatatactagaagtagaaatgatttgtcttatgaatggtttgctgattgggagcttggaggctgtttagagttgtactggcagtgactaacaaccttcttctgcttgtgttgcttaattttgaagaaatggttccttgtggggttttttttccgaaaagatatgggcttagaggcggcaccgcagcgacgtgaagtgggcggccgtgacttacaaacggccacaagaaggttcctgaacgtgttgccgctcagacgctcagctgagcgtgacgccgtcattttccccctttttttccttcttcctattcttgttttttatgtgaaccataatttgttgcggtagaaataggcacagatataacatgactggattaatatgctttaataataaggaaatttgatttggagatggggccggaaatgatagagcaggatggatggtaggaaaaggaaggggaaattcagaaattctctcaggcgtatggctatggagtgcctgtgctctggtgagcagttgaaggcgtcagatgagaccatgcggtcatctgattctacgatcacaaaggatttctcggccagtgggtactcttcttggaatggagagattgagcagtaccttgataatggcaacatagaggaagccgagttgtcgctccgggagggcatttgcctaaattatgagacatctgcattagttcctaagatgaaaatctcaattgctagaaaaacaggccgtgggaagactcattcacagtgggattccccaccaatgcccttgcatgctgtcagccttctcatggaggccatatatcttaaagcaagagcacttcatgatcttgggaaagataaaggcctaatgaaaggcaaaacaattgtcgatgttgtgggaaagttcacctggacccaataaggcaagaaaacggcaaagagcacaatagttctcatatgcctaattattcccttgattcatgattataactttgcctcctgatttaatgaccctttcctatcatttgagatatacaggtcaccctaaggcataaaagaagaaaggccatttcttgtggagatttatgcagatgacataaatccaactacaactataaaagggaagcactacatcggctctgaacaagcaatcatggaatattgagctaaggcactggagtctcaagaaaaggtctaggaatcctaagaatggatggataacgatgcttaaatatggatgacatcatttatgtcttgataaccatctacatgccggtgataatgttttttgacattcattcatggggctcacctttctaatgtgtaagaaagaaaactacgttgatcttaatctgagttgtgtgttgatggttgatgtagtaaagaaggggcacttagacattgttgttcatggatttatgtactgccaacaaaccttctcttctgattcttataggcggtgcctggctgtaatggcttgcatgtattttatgcattgactacatgataagaaccgtgcacgttgttgatggcccaattattacctctgaatcaaggtaatgtttacctttatcgtgttgtcttttgttctatagaatcattgtggatgactgtttgtaaaattgctatggcaaatatttactgttatcatcgtatataacatcaaa

SEQ ID NO: 33389 - DNA, 1838 bp, Zea Mays
ccacctccacctaaacggcctaataatcctcagatccgacggcccgcgctcgatccccgccgtccatcttgtgctaaaccctgtcgccaacgaattaaattgaactcggcacgcgcacacgtccgcggccgcccgcacgccgccagcaacccccctcccgctccccgcaaaaccctagcgctctctacctctgtctctctctgttcgtcggcgatggcggcagcggggggcgaggaggaggccggcgagagccggaagcttttcgtgggcgggatcccggccggggcgcaggagcccgagctgcgggcccacttttcgcgctttggggaggtgcgctccgtcatcgtgatgcgcgaccgagagacgggccacggccgggggttcggcttcgtcgagtttgaggaagaggctgccgctggcaccgcgctcggcgacggggagaagctcaagcacttcctctgcggccgcatggtggacgttaagagggccaggacaagagctccacgaaaccagggcgagcagcactcgcagcctcagcaggctgagcaaggccggggtcaggggaaccaagacaatcagtcgcccgctggtaatggtaccgctgactgtggcaacagtgtgagctatgattcaaaaaaggtattcattggcggtttgcgggataatatcaccgagaaggagttccgggcttactttgagacgtttggcacggtaacggacgtcgtggtgatttatgacagcgcgacgagccggtcgagggggttcggtttcgtcacctttgattcggaggaagcagtggggaaggtgatgcggcagagctttcacgacctgaacgggaccaaggtagaggccaagattgctatccccaaggatgagcagtattaccgtaacagaggaggccatggtgctcgtccctttggcgggagggatcctgccgctcctggctatggagggttcatgtaccaaacatacaatgctagatctggcccctacaatggctacatgccccaacctgctcccacacatccctactttcctgccccctattttgctgcggggggctatccctatgggagtggatacccaggtcaaggcgtcatgccaaacattcctggcatggggcctaggcggggtcctccggcctatggaacataccctcaaatgtatccggtgtataacattatacatagagctggttatggtggtccagccacttcttttcagcatgaaattaatggtggaggtgattacaaaaaggatcaaacgaatgtagatatgcagcaagttgacaacactgctagcgttgcgacaaagttggaaaatatgaagctaggttgacaatgactttcagagcatgtgcctgatggagtaaagttattaataggcaattatgtggtaatttgatttgcaaatctgtatcctgttgcaaggcgactgaattaaagtttgagctaggaccttgtttctgtttggggtctgagttttgcttgcacatagttaagctcgaggactattacttctacaacgatgacactggagttagtctattgtttgggaacccgcaactgtgaagactttgagctgagagattctttggttgacaagtacatcattagaattcttcaaacttacgtaccgttcctatccccactgcctgtaaaacagaaagcatgcgagtcgctggctggctgttgacctcacctcccctctcctctcctctcctcttgtaccaatgttaaattcttacgaccgtttaatgtatcttaatcagacaatccagaatcgaccctaatcgtctgctttgctcaaccccgattgtttctgtttctgcaatgtcg

SEQ ID NO: 33390 - DNA, 483 bp, Zea Mays
ggaggaccatatcccacacacgcatatgatcggtgcgctgtgtgtgtcgtctccacccccgcttcttctcctcttcctcctcccgctgtccgctctcgcataagccaactcgaaccagcgaaggctagctagcgcttccgccaagcctgcaggccacgccggccggaaccgattgctctgattgattggtcaatcagtcatcaggccgcaatcgtatagctcatcagctgagcgaagacactgctgctagctgcagggcgggcgagagctcatctccaccggccggccgtcggcggctcagcgctttgcaggggcggcgcgcgcgctccggccgacggcgaagcgaagcgaattaagcggccgagaggcgggttgttgttgtcccatcgttagccatcaatcatcgtgtgattgatagggaaggctaacaagtgtaaaaaagctttgcctgtagccgtgcggacaggctcttgcaatgctgtg

SEQ ID NO: 33391 - DNA, 5008 bp, Zea Mays
gtatatccgtaggaaacttttaaatgcttcagcatttttacctaatatggaatccccatttgttccaaattcgtttactgggaagagaaaatcaccagttggtaattcagccatagttcaacctcatgttggatcacgggctgttcatgagtatcagttccttcctgagcaaccaagtgatacatatgagagggcaacccgatctcactactatgacactccagtggaagtttcaaatgctaggataccttctatcacatcaggatcacaacttctccatggatctgaggaggctgcgcctagttatgcttttcaaggtcacacatctggttctagcctgttgcctccgtccagcaggccccaagtgtttccagcagcaccaacagattatgagatgactcagtctaatagcaaccttagttctgttcctgttgaaggacagtttgatatttctcaggttgctgcatttgaaaacccacctgtatcatctgaaataatagcttatcatgatgaagatacttctcgcgtggaaagaaaacgaaaacatagtgaagaagcaaagattgcaaaggaagttgaagctcacgaaagacgaattaggaaggagcttgagaaacaagatatgttgaataaaaagagagaggagcaaaggcgcaaggaaatggagagacttgatcgtgagagaagaaaagaggaggagagattactgcgtgagaggcagcgagaagaagagaggttccaaagagagcaaaggcgcgaacatgagcgtatggagaagtttttgcagaagcaatctagacgaagaaacaaaggcaaaaggaggaactccgaaaagaaaaagaagcagcaaggcaaaaggctgccaatgaaagggctactgcacgtaggattgcacgggagtatatggaactggtggaagatgagcgtttggaatcaatggaattagctgctcaaaacaaagggttgccctcaatgctgtatcttgacagcgacacattgcagcagcttgattcctttcgaggcatgctaagtcaatttcctcctacaacggtgagaatgaagttgccattttctataaagccttggactggatccgaggataacgttggaaaccttttgatggtgtggaaattcttaattactttcactgatgttctgggtctttgtccagttacacttgatgagtttgttcagtctcttcatgattatgattcaaggttgttgggggaactgcatattgctctgctgagatccattataaaggatattgaggatgttgctagaactccatcaattgcactgggggtgaatccaggaggtggccatccacaaattgttgaaggggcatatgcctggggattcaatatacgtagctggcaacgccatcttaatcttcttacatggcctgagatattaagacagtttgctttatctgctggttttggacctcaattaaagaaaaggaccgtagaagattcttactatcgtaatgataatgagggtcatgatggtgagaatgttatattgacgattcgaaatggtacagcagcagtgaatgctgctgctaagatgaaagaaagaggttacaccaatcgccgtagatcccgccaccgtctcactcctggaactgtaaaatttgccgctttccacgtgctttcgcttgaagggagcaatggtctcacaatattggaagtagcagaaaaaattcagaaatctggattgagagacctcacaacaagcaagacacctgaggcatccatagctgctgccttgtctagggatacaaagctttttgagagaactgctccttcaacatattgtgtgaagtcgccttatagaaaagatccggctgattctgaggctgtgttgtcagcagcgcgtgaaagaattagggcttttcagaatgtgctttctgactctgaagctgaaaaggaggtagatgaagctgagagggatgatgattctgactgcgatgatggtgatgatgaccctgatggtgatgatgtgaatactgaggtggaagacgacaaggatcctcttcttgctgtcaagtcacaagatgaagtaccgagtacaactacagttattggcataaaggccaatttagatggtgtgggtaatgcattgaactcatcaagtagttttactaaatcagcaaaaggcgctcctctcccttctttaggcaggtccaatgcagcagatacttctaatgatttgcctcttggagtctcatcagctaatcatgaagtagtacctgatgattctgaaaatacacaaattgatgaaagcaatcaagccgagccttgggtacgtgcactagcagaaggtgactactgtgaccttagtgttgaagaacgccttaacgcactggttgctcttgttggtgttgccactgaagggaactctattcgtgctgtacttgaggagcgtttggagttagcaaatgccttaaagaagcaaatgtgggcagaagcgcaacttgacaagaggcgtttcaaggaagaatttactagcagagtacaatataactctgacatgggtttgaagcctgatatatatcaagaaaacaacgtgacagagattacttcaactccagcgtgtgatgcttatagagagaatgatgaacatgtcgggacaatcaacaattgtgagatgcttgatcagcataatcagggtaatgctggtagtctaccttatgagagaaatggcgtatgccaggaaatcctcgcaaccccagatacttcgtatgttcagcagtatgcttatgctgataaaaggcgatctcagttgaaatcgtacattggtcaccgggcagagcagctttatgtttacagatccttgcccctaggtcaggatcggcggcgaaacaggtattggcagtttacaacttcagcatcaccaaatgaccctggctcaggaagaatcttttttgaatccaaagatggatattggagagttatcgactcagaggaggcctttgattctttattggctgccctcgatacacgtggcacccgggaggcacagctgcattcaatgttgcaagtgatcgagccaaccttcaaggaagctattaaaagaaatgtgagtatagaattatctgctggaaggtatccaaagaatggagctactgacatgataagggcaaattatcacagtgaggttggaagctcaagcagtactcctagtgctacatctgacagtataacagcatattctgattcttttaaagtagagcttgggcgtaatgattttgagaagacagctatctcaaaaagggcagatatatttttaaaatggatgtggagggaattctacaatcaggaattgacatgtgccatgaaatacggcaagaaaagatgctctgaattgttgcattcgtgtaattgctgctatcagatttacctagcagaagaaaggcactgttcttcttgccataagactttcaaatccatttacaatttttctgatcatacaacacaatgcgaagagaaacagagaacagaacctttctggaacatgcaaaacactgattattctgtcccaataggaatggcatatataccatcagaagcacttcaaccattttggactgatgtgtatcgaaaatcttggagtgtgaagctgtacactaccaaatctattgctgaaatattccagcttttgactgttctggaaggtgcaataagaccagattgcctctcttctgattttgaaacaagtgagtgtctaaactcacaggttggatctgcttctgtccttccatgggttcccgacactacttcagctgttatgctccgaatgttagaccttgactcagctattttgtatgttcaaaatcaaaagatggatagagatgatggaggtttcatgaaatttccgtcaaggtatacagttgctaagagcaaacaagaaacaacacctgaaacagctggtttggatctgtatgatggaaggtggcttcctggtagtggccgtaggggtcgtggacgtggaagtagaggaggtagcaggggaggcagaggtcgaagtcgaggtggaaggatcccaagaggtgttagcagctcatcaaggatcgagttcaagggtggtattgttgcttctgataaagcgccaaggaagaatgtacgccgagggcgtggtcgtggtcgtggtcgtagacgtggacgtcgaactgtgaggcctcggcagccatctgttggcagagccagatcaattccaaaggaaaatttgttgggaagctttagcatgcttagcagctcaaaggctgctaccattgaggagtctccacgaagctctggcgcagacgagtggggcttggagaccagaacgacatacactgaatgtgatgagaacagctctggatcacagtcagaagataacgaggaaaatggccagcccatggatgatgattatgaagatcaagttccagattactcaataggctattctaccggctcgaggcaccatgtaatgatgtccatgatggaccatgatagtgacgaggaggatgaagatgctgaaggtgatgagaatgtggaagaagatgcagaccttgcagttgacgatgccgatgttgagatggacgaagatgatgaaattggtgatgatggagaggatggtggcgttggaggggagatgaatgcggatgaggatccggatgctacttcatattcatccgattacagcgactaagaaagcagaaataagggaaccttatcccagattcctccctcggcatggaatgcatgtagtaccgagtaggcattcccccccgttgtgagccaaaagggagcttagatgcttaggttcgaaggagcgaggaactgttttttaggcaccgcaggttttaatagaatttctgacgcattcgacgaagtgtttggttgtaccgtggtagttgtgttactggggaattccccgagttattatacaatgtgttaagacaaaatactgtcatatcgcatctggttgccatgcgtctaactggttcacggttttaccgtta

SEQ ID NO: 33392 - DNA, 5404 bp, Zea Mays
atccaattttgggtccgcagaacctcctcctctcgctccgccgccgccttcccctcgcccaccacgctttggtcccaaacccacggtcgctcatcctggacctccacgccatcgaggcagtgaagctgggctcattcgtgcaatcgtgctcaagtctggcatcaactcccccatctaccgggacctccacgcgctcgtctcccacccacgcctgctctccgttgttgcctcgctcctccatatgcccggcctcgtctgcaacgtcccctacacagcgctcccgtcgtcgtcctctgcgtcgaccgctccatccccatgctcatgcgccgcaaggaggccaagccttacgacatgattggtgagaccagaggagcacgagcgcaacctccgtcacccctaagatctcctcaccattgtggccatcctgcaagatcagtactcattatctattaagaaggttacggttagcttggtgtgtaagtgtgttggacaaatgaggtcccgtttttttactggatttatttgccttttcttttctgttttggatatttgaagtcttatttactagctattaatacattgtttttaagtcatcggccttgcaagcattgcctctttctttaaaattatctgatgactggtgaattctgttttgatcttttagattattggcattgaccttttatctcaaacgctgcgacccgtcattgttgaacttgcagaggataggcactggagagtttgacttgcgatatttgagtacatcccattgctggcgctccgagtatctggtatcttgttctattgttgctaccctgattcttcatcacctatgaccgtgatagtgcttaccctattgagtgcctaactcagtttagtgcataagcgtgctcttttgatatatagtttatgactttgccatcagctgttttgatgtattcctatgcttacaaattctataatgttaactgtatatgtttccttacatcttaattcatcgtgtttcccattgcacggtttattccctacatttccctgtcctacatttggtacttgattacttgttagaaggtgcaaatcagctcctcaattgctgtgagatcaatacaatttaatcattaatgattattttttgttacacattatcttttattacaaattaactcgagtccactgatctgagctgaaaagcttaagagtcctctctgggtatgcttaagtgttagtagtaccggtttcctgaaaaaaaagaggggctaataatttcaagctcttttcatatagttctataattatgtgccgttgtgaacgtcgccttcttcatttcctacctgtgcgatccccttttaattgagttttcacagttgccggtatattttttgtcgcatcaaccttaagaactccatgtattaaggttgtaggatattattgttggattaggtgaactataatcaaaacaaaaaaaatatccagatactctcataattatgtgaatattttttctcaaatcaagtaggagaactgcttgtcatttcattgagaggaagaaaattaagtacatctaaaggaaaggatcctcaaatactagaagaaaataagtacatctagaagacattattagttgtagggatacacgcctgaggacaacaatcaaaagccctatgccgccatcctcaaggtctatgatcatatcagggaccaaacgttgccgaataaactgctgatatgtttagtttcatgaaattttaattttacttgattcatttgtaggattgaatagatttcgctgaacttgaagggttggttactattggtgttcttttaccatgaaatatgagatcaggctaggttttggctgtagcattttcgtattgacgttgtgcttagactataattcacctttatttacatccatggattagttgttgtattggtcagtttgctcatatcctctttctttttgttttgttttggatttttggactttggttgctttagatctgtgagctgctacttgtattttaaattgatcacaaaccgcttactgcaatgcaggccatactattgattcacataccagctaaatttaggaccatcccgattgaaggctcttcccacttaagtgattcttccttctgaatccattttttagcttattcattcggattatgacccataattatgtttttttgtttgcttgaattcggtcaaacaaactgagaaaagcgtggatcctctgaagaatgtctgaaaaaaatgatagacaagtccctagatttaccccaatttcacttgctctatagatttatagttctataatatgtgcttccttatcaatctttgttactcaattatgctagataatcacttgtccttaatctaattaacagtgttgtcatcatagatgaagctgacaacttagttgattccttgaataagatatacaagtcaaagcttacatcttcttaggttactctcacctttcattaacctttccatcacagtctggcaaatagtattttgccttgtgccataggtcattatacttagttgcaattgtattgctttgtgtttcattcaatgaacataaacatctacattccatgttgtccattagttatgatttttgctggaacataaatggcatatagctctgtattttgtgtgcctgatgctcattcagtactattgtcaaagcacaaaagggagatttaggaatttatttggcttataaaggggcataaacaaagagggtcttttagtggtggagttagcttagcttgcctatggggttgtatggcacattataagagattctatatatggtttcatctggtttaggtttagaattttcattttgaaagcaacattcagtccatacatgacttgagcatgctttctaaattgacatttttggtgtttacttgggctaaaaactaggattcttgcatttttctgccatgtgctgtttacaggtgaaattgtgttgttcagaaacaaactttggcatccgtttctcattctcctaactgcatttacatgtattcattttccttttggattgtagctgaaagcagtcctttcccacctagatgaataccttaatagattttacaatgttttgggagctaggaattgatgatacatccagaccttggtagttttaacaaggtcttccacacatgttctgatcaacaatcaagatggtagcactgtgtcttctatgaccacaaaccaattcttgttttcccttgacatcgataacataaacatagttgaattttgtcactttgtgaaagacatcaatataatccacaaggtaaatttcttaatctataaccactgtttgaaattggtagtctacaatctatttgatgctttaagtgaactttagaagtttatatcatttccaagaaaagtttacattaccttttccaattaatgttgactcaacatatataagtaactaccaaaatttatttggaatagaaattgaatattaacaaacaaaaaatatcttgtacttaaaatttgtatactaatataacagaactgcgacaaactcaatgatgggcacaaaagagctttgcacaatctcattccaggatcaacgactcatagatgtttttatcaacactgcacacattgtttgctgaaattagctcatgttattgatggtgtttgaaagaaacattaaagttttgcttcgacaaatgtcttttgctcagggcatctggcttggtgtttcttgtttggtgatacctgtacaagcaaatttggtgacctgctacttaaaaagtccgtgtttggtttacttgcttgttggcaccattgcaaaattgcatgttccttgtttggttgtatgaaaactgactatattatgacttgttgtatgcattattggtgtattatgcagctgtttctgcaaagaggtcgtcttgactgatcgcaatgatgaagttctggaggcaaggttcagttgtttaggaattcattcactgatacatcttattattcagttgaagcgccacatatattggtagataaatgctactgatacattcaagtgatgaaccagtccattcatgagctaataagtgcagtaatcagtacaccgcagagagcataaacatacccaactattatggtggtggtggctatattatatgttatataacatgctgcataactgttaagatcatgaacattttagatgttgaataccttgcttgcaaggagtgtcacgaataccgaaacttgttctcgcacatgctgaatcgtatcacattcctattcctctgtctatttcagcccttctatttttggtttctggcagtgttgttgttatgatgaaggcagacccaagtattgaaagggatgatctgattttgctctaggagattgccatgtacatgcttcttgcatgtggagctgtctatgtgatcttgataagaaagatttgtggatgttgacccaacaggaaattgctactgaggtgcaaagtgaatccaagtgaaagtaattaggggagttagctatgtcaaatggaaagagagtggttgctaaaggataggaagctgaagctggatgaaggaagcaactacatgcaaccgatggcaataatgcattgcagggttgaggctcgttagaaatgtcaagttggtcccggacgtgggtatggtgcccgcaaggccgacagagctgagatcaagcactgagatcgtgccctcgtgcctacggctgcatgtcacacctggccagaggcataggctaccactactgttctaagaggacaacctgctcgatagctagcctaggatggccttcagttccagcaaggcttgtcggctcgtctcactgcagaacgctattgttggcgcctaattgaacgaagttgataccggtaggatcccatgaagcaacataagcagcagaagtctgacgaggaatgacatagatgcagtgctttcgtttgttgctactgaaaaaagatctgaaccaagtatttctgatcactgcgttgaaaaggaaaaaaagagagacaaaaccagaaaaaaggaggaaaactggctatatgggcctaccttggcccactgcggggatgcgacccactgcaaaagccggcccgcgcgcggccttctcgcacagaggcggtggtcacattccaatcagaatcctataattattagtaataactcgcagcctatgtgtactgttttctattgttcattggactcgatcggtttgcgctcaacactcctaggagtttttcttcttcttcttcttgtttcttggatgcatgcttgctagttgctacgtaacacttctttttaatgcaagtaacttattagcgttgcctgaaattcatgtcggtacattttgcacgtcaaaatccaagtttggc

SEQ ID NO: 33393 - DNA, 2109 bp, Zea Mays
ctgccaccggcaacaagtacgtacacgcgcgcgagggtctccgtcccgccttcgctcgagcaccacacgcagctgcagcttacctcagccgccggcgggcagggctgctgcggctcgcgcagacgctcccccgccgtccccacctgcccccttccgcctcggctagagcctacagcgcccctctcgccctgacggcccaaccgagccggttataaacacagccgtccgccgccacccttcctatatcccagactctctctctctctctctcaggcacattcccctggctggacccgcgctagctcgcggccgcggcagctagatagtagtagctctccagcccatagcttaggtcggtcgccttgtttcgtagggtctggttcggccgttggtcgataagtcggcgggcgatgggggaagcgccgcagcccaagtcgccgccgaggtacccggacctgtgcggccgccgccgcctgcagctcgaggtgcagatcctcaaccgggaggtcggcttcctcgagcaagagatacagggactcgagcgcattcagcccgtctcgcgatgttgcaatgagtaaataataaaaaccctctcccgctcttccgctttctctcgtctggaactggaactcaaacatcgtcactgcaccattattttctgttatttcattttagaatcatttcacttgatattcagaaataagcagttgtaacagcagttaccacttcatttgtcgcgacaagaaaatagggaaaaaacaataaataaaatatcttcatttgtggcttgatattccttgaccccacgcattgcattcccccctgggaagaaaacagactcacatgaacagcgagaagaagtacactgtagtttttcttgaacgtttgcttcgtgtactaattatatcttgtcctggtcgtctcatactccacatttggactgttcacacatagctcagattccatttacattcctgtttgaggttgcaggataagtggtagctagtgtatcaggaaaccaacataatagtaatacagtagcgtcaacgagtttgtcagtgcaaagaccgacccaatgataccagtaagcaaaaggagacatggatcttgcagcttctcgcggtggatcagatcaaaattgcgcacatgcttttcatgcctgtgctgctggtgccactgcttgccgaagcccaatgcgccaagctgcttcagctgttcttgttgcacctgccgcgacacgcagtgctgtactccgatctgccgctgttcaaagaccccttcgtgcagccccggctgctgcacctgcagccttcccagctgcagctgcaagacgccaccaggctgcggccattgccgaccccagtgcagcagctgctgctctagtggttgcagctgcgcggactgcccgtgctcctgctcctgccccccgtgctgcagctgccccggcttcttctcctgtgaggggtgctcggctggctgcctcggcgctctcaaccggtgtctcggcggcctgtcgtcgtgctgcagtgagatgcgaccttcctgctgcaagtgccagtcgtcgtgctgcgaggggggttcgtcctgccgcggcaccggcacgggagcgtgctgccgcggttcgtgcctcggtgccccggcgtcgtcgtgcccggagtgctcctgcggctgcgtgtgctcctgctccaggtgcaaaggaggatgccgctgcccgtcctgtggtagtaatccctgctgtcccggtggatgcttgtgctagatcagagtattatattactactagctagtgtgtctgttgctcttcttttcctgttgtggatgatttggcgtttgatttggatggaacctcgctagtgcataatattcactgtcatgaattaactttgacgcccgtcgccactgcgccagctgcgtacgtaacggaaattgatttagatctaatttcaaaattaaacaataatctgaaaagattagtatcacgaaccttgtagaacagttagatgtcctcgtaatggcctcgtaatggtctagatgaatcaaaacactagtaacaattgaaaacaaccagaatcaagctaagaatgtaattggtcaacaaataaaaaggaa

SEQ ID NO: 33394 - DNA, 939 bp, Zea Mays
agaagcgcgtaaggattaaatccagcgaagtgttcaccttcttcaacttgaactccttgtggtccggactgacgaatcggggacggagattcacatcaacgcagatgtggaccccacgaccgagtcgtcgcgtcgtctcctccgcttccgacactctcctgctctgcctcctcctgcttgccggcgccgccgacgccgcgccgctgctcgtaggcgtttttcccaaagatgaggcgtacttcgcgacgcaggtgatcgcctgcagagacggctcgggctctttcccgaggagccggctcaacgacgggtactgcgactgcggcgatggaaccgatgagccaggcacttcagcttgtccagaaggcaagttttactgcagaaatatcggagatacccctcgattgttgttctcttcgtttgtgaatgacaaaatttgcgattgttgtgatggaagtgatgagtacgaaagtggtatccattgccagaacacctgtagaaatataaaggatactgctgaggctgatggtggtggtggcgacctcgcagtaacacatttagattctactgatgattttatgagtaaacatgcaattgctatggaagaccatatccagaacaacagcaacagagaccttgtccagaagataagaggattgagaacagccctagttattgagctgggccttgttgtatgtatttttgctttttgcattgctcggcgtcgcactagaacacgcaggagacagcatattttgaaacgttagctgaacagtagtaatatacaaagacgatagatcggtgctcatttgcaaacattaaagcttccggagatggtggagaatcagagatgggatgaaggagcctgcacgtcatcctctttaaatcacgagaaaacaagccatgtggaggcggagccatgcgggggcgcgagttgtgcgg

SEQ ID NO: 33395 - DNA, 1377 bp, Zea Mays
cggcggtcccctccacccgggatccatgtggacgtatgcggatgcggtgagcaggtagcatccactgcactctgcagaggaggaaggaagaggaccgacaaagatggggatggcattgccattgccgccggcgtcacaggggttgttgcgttccaggaggatgagcttcctcgcttcgccgccgctgtcgctcaaggcagccggtggaatcagcatcccatgcccgtggcgattggatggccgccgtccacgagcagccccagccagtgttcctcgactagcatcagtgcgaagcgtggtgctggacatcgagggcacgacgagccccatctcgttcgtgacggacgtgctcttcccctacgcccgcgacaacgtccgcacgcacctggacgccacctactccacccgcgagaccaaggacgacatcgccctgctgcgcgctcagggccacatctggaggactgggttcgagtgccaagaaatcaagggggtggtgttcgacgacgtgccgccggctctcgagaggtggcacgccagcggcatcaagacgtacatctattcaagtggcagcagggaagcccagaggctcatcttcgggaacactacctacggcgaccttagaaggcacctgtgcggattttttgacgcaacaattgggtacgctgtacatctagtatcacacctttccgctcactgatgattcgtatgcgtcactgtgactatggctgttaatctatcctttttggcctggcgcgcgtctgcaacgaaaggaccaagagagacgctcgcagctactatgagatctggcagacggtcggggtggaccggccgtctcagatactgttcctcacggacgtgtgccaggaagccacggcagcacaggctgcaggccttgaggtgctaatatctatcagacctggaaacgcgccactccctgctgaaaaccatgggtttgggacagtcgagtcatttgctgaaatcttgacatgaagggaggatgcatcctcaacatgcatgcatgctgtgctatttaaagatggaaacggattgaactagtttcaaaaggcagatggaatggtttcatggccatgatttgcatcttcatactagctttatttacattgcccatgttcagtttgtcggagaccataaacacatgggatcaccaagttatcttacccttgattggtttcctttaactcgtccggtttgctgttcgtttcttcagtttcgtcaggcattgggtctgttagtcagggccaggggcaaagctaggtagaagcctgtggatgcacatgcaccacaattttttgtaaaactagtgttttgtccaaatttttaccatatatgcaccacctacaacttattactacgcat

SEQ ID NO: 33396 - DNA, 2171 bp, Zea Mays
cggccggcgcctgcacggcgcccgcggctccgcgcgctcgtcctacttgccatccgtcactggacgggccacgcgactgcgatccctgccacacgagcgcaacgcgccatgggtccggcgtgccagtgagagcgggagaagctcggacatctccgtggagggacatcttctccagcgattcagcgcgggatcctgctggactggcctgatccctccgtgctggtgtcggcgagcatgcaaggaaggatgcgaggcgcgcggcggagcgcgcgcggggaatcgtcccggaaggcggcgggccgcgaggtggagccattcacgctgtgcggcgagatgtcccatctcaccagggccacgtcagagccgtgccgcagggctcgcggcgccgccttcgcccgccgggcgaggcccttctcggcgtacgagctggtgtcggcgcgggaggccggccgcgcgggcggcgccgggttctccgcggccgatcgagcctacctcggcaggcagcacatccccaccaaggggccgtggggcgtcgacgacgtggaaagcgaggcctacgtctcgcagttctccgccgatggctcgttgctcatcgcggggtttcggggaagccgcatcagagtctacgacgccgagaaagggtggaagatccacaaggatataagctgcagaagtgtgcactggacggtttcagatattgctctctcacctgaccaacgattccttgcctatgcaagtctgacacctattgttcacattgtgaatgttcagaatgctggaaaggaatcacatgctaatattactgaaattcatgagggattggatttaaccggtggtgatgaggatgaggactttggaatattttctgttaaattctccaaagatggtaaagaagttgttgttgggaacaatgaaaagtcaatatatgtttatgacctttcagcaaataaagtgtcagcccgcatccgtgctcataaagctgatgtcaatgctgttaccttcgctgatgaaactggaaacgtgttgtactctggaagtgatgatagtctctgtaaggtgtgggacaggcgttgcctttcaggggaaaagtcagcagagaatcaaactttgggacatcaggaaaatgtcttccgtcgtgagatcgtagggtcttgcattatagcaatttattatgtaggatattttttttactggaccctaagcttctctgaaatttgctataggacattaaaaattattaggacactacctagtgtcttctagattttttttgacagtgtcaggcagcaataaaaaaattggacaatgccttgagcaaaattatcctgctatgtacttttaagttccatttcctttttttgcgggtctagtttctattgttttgaatttgattctgttgttttcacagtcgcccagtgagtctagtggactgggactataggtggatgccatttccatcagaagctcataatcttaagcatccaggtgatcagtctgtggccacatacagaggccattcagttctgcgaacacttatccgttgctatttctcccctgtgcacagcacgggtcagaggtacatatacacgggatccagtgacaagtctgtacatatttatgacgtggtaaccggggaggctgtcaagaggctttcgtggcatggctccatcatcagagactgcacctggcatccatactacccaacgctcgtcagctcctcctgggacggcttcgttgcccggtgggaggcctcgggcgacgacgacgaccattcggtgctcgtcgccgacgagatgagaggaagcccttactaccggagatacggcgatcccttggtgatgtagagatgtctgcaaagtggttaacaccaaatggtagtgagcatgtactttgctttgttgtttgggaattacaactgagcagcatgtacagtgccgtttggctcatgtggttgtatagccttacgataaataatatgtagggatacagaaagaacacatgagatcgaagcgactttataaatcctatggaatttatagaaacagacaagatcctctttccttgtttttaaaaactttataaatactttttcgaattttgattggattggaatacaccgttgttggattcagaaattatccattcatctcactcactatgggacaatgtac

SEQ ID NO: 33397 - DNA, 3726 bp, Zea Mays
gttgcccccgacctgccgggcatcgcctattcgcctgttcctccaccagcgagacactcagatctgcctttcccgacccggagccagccaggtgagccgaggcaggggggacgcgccactggccatggagcccgggttgagcatcgagtccggttctgccatccgcgtcgcggtgctccccgtgggcggcccgattccgccgccgcgcctgcgcgagtacgcggccctggtggcgcgccacgcgcgcgtcgacctcgcctcgctccgcacctactacgcggagcaccagaagagccccttccagcaccagccctgggagaccggatgcctccgcctcaagttcgtgctcggcggctgcgtgccttcaccctgggaggacttccagtcctcgcgcaaggtgctcgccgtgatcggcatctgtcacctgccgtcctcgcccgacctcgaccacgtggcggcagacttcatagacgctgcgcggtcgtacccgtcggcgctcgccaaccgctgcttcgccttctgccccacggacgcacagctgtcagcgaagaagagggacgatattattatgttccctccttctgatcagcaatcgctggaacttcatatgcttacaatgatccaagatctcgctgcttctttgttgatggagtttgagaagtgggtcttgcgtgcagaatccacaggaaccattttgaagacccctttggattcacaatccagtcttggctcagaggaggtaattaaggctaaaaaaagaaggcttggtcgtgcacagaagataataggagattattgcctcttggctggatcacctgtggatgctaatgcacattacaccaccgctatagagcttgcaagattgaccggtgatgttttctggcatgctggagcccttgagggtagtgtctgcgcattagtggtggataggatgggccaaagtgaccctattttggaggatgaagtcaaatatcgctattacaccattatccagctatacagaagagccactttacaagataatgctcaaagagtttcacctgtgagctttgagcttgaagctgccttgaagttggcaagatacttgtgcaggcgagaacttgccaaggaggtctcagatttgttaatgggagctgctgatggtgccaaggctcttattgatgccagtgatcggctcatactatatattgaaattgcaagactttttggtacacttggttataagcgcaaggcggcctttttttcaagacaagttgcacagttgtaccttcagcaagacaatgcatatgctgctatgagtgctatgcaggttctaactatgactacaaatgcataccatgtccaaagccgaaagactatgaaaatgaatcatgatccgtccaaggaacctcgtgctggcaatactgattctggaaagctcgtcttcttcgatcattttacccactcatcacaccagctggtcagagtggcctagcaagctcacttgcaaacgctgctgacaagcttccaacaggcacacgctgtgccgatccatgtcttccttttatcaggttgcattctttcccgcttcacccttctcaaagggatatagtaaaacggaatccacataaaaaggagtggtgggctggtgcaggtccttcaggacctttcatttatactcctttcagcaaagcaggagcttctgggacttccaagcaagagcttagttggattgtgggggagccggttcaagtcatggttgagttagcaaacccttgcagcttcgacatagttgtggagagcatctatctctctgtccattctgggaattttgatgcctttccagttagcaacacctattcaaagaggtcgattgtttgctccttggagctgcacaagggcttgtcctttctgatcctttcagatgctgtggctctagcaagttcaagagtgtcaactttcctagcatttctgttgttcctcctctgccattgttaattgccaatgttgtgggtggagatggttctattcttctttatgaaggagaaattcgtgatgttctgataacactgacaaatgccggaaccgtgccagttgaagaagcaaatgttgcattgtcagggaagaatcaggattctgttatttcgattgctcatagcacatggaaatctgcgctccctattaaaccgggtggagaagtgacatttgcagtgactctaagagcctggcatctcagctcagcagatttggaagcagatggcagtagatctcctgtaaattcaaggagaatagcaagagaaggaaccaatccattcttggatattcactatgctggtcctgctgcgaatcttgagaatggagatgtttctcttctacctggaagacgcctagttgttcccttgaatatctgtgttgtgcagggcatgcgtcttgtaagagcacgcctgttgtccatggaaatacctgctcgatttactgaaacacacttaaaacctgtcagtggcaaagacataaacttattgaaggttgatccctataaaggaagctgggggctccgccttctggaacttgagcttttcaatcctactgatgtcgttttttatgttgatgttgctgtgcatttggatgacacggatgtggaccaagaagtaatttcagacggggatgctgcttgtcacaaaactagaattgatcgggactactctgccagagttctcatacctcttgagaacttcaaattgcctgttcttgatgcttccttctttgtaaaggcaagtagtagtgatgaacctcttggatccagggccgccgccatagcagaaaggaatgccaaggcagagctaaatgcgtctatcaacaacttgatttcaaaaataaaagtgaaatggcactctgggagaaatagctcaggtgagctgaatattaaagatgctatccagacggcactacaagcatctataatggacatactgttgccagatcccctgatgtttagctttaagcttgttacgaatggaactgtggtcaatgtcgattctccaaaggattctggcaatgttctgaggtgcaaagatcctatatctgctcatgaaatgacccatatggaagttcagattcgcaacaacacaaaggaaattatccggatgaaccttagcatttcatgcaaagatgttgctggagagaattgcttcgatgaaaatagtgctactgtcctctgggctggtgttcttagcgatatacacctggaagttccaccgttgcaagaggtggtacatcctttctccatgtatttccttgtaccgggtgactactcgctccaagctgcttctgttataatcgatgccacagacgttcttcgtgctcgtgcaaaggcggagtcaccagatgaacctatactgtgtcgcggatccccattccatatccgggtagtcggtacagcataggcagttcttctgagttactcctagtctagaggcctcattttactgtgacaattgtaggtgtggaaaatcttgtacaagagtgatccctggcgccctgcccctcatgcgatatgttttttgtcctttttgttggcttctttgtaagtcatgtcatgtacagtgtacaagcatagtgagtattgtttcaagcacagaaattgtatgtcgatgattccacaatcttaatttctggttagcttatatgattttacttaacattttttacattgttcattgttggactgagcgcaccaccagcagcttg

SEQ ID NO: 33398 - DNA, 1611 bp, Zea Mays
agcagctcgagggggtgacgaagtaaaagagaacacgaggacaggactgaaagcaaaagagagcaagatggtcccatgttcgtgttcccatcccagtgggacgtttgaacgggacaagccagcctgtggctactcaattaccatccgtgaaaccatcactgcgacatcggtggatttcacaggtgctaaagcttttgagatatcaggcacgccggttgactgtgtctcgttggccttatctgggaggttgtttccttggtcgtctcctgctttggtgatcagcggtatcaacacaggaccaaactgtgggtttcactcttctgccattgctgctgcaagggaggccttagtgtatggggtgccttcaattgcaatctcattgaattgaaggatgaaaccaaagacagcgacttcaaggatgcagctcaggcatgcttaccattgataaatgctgccttggatgacattgagaaaggaactttcctcagaggatgcctattgaatattggagttccaagtgcaccatctgcaattaagggtttcaagttgaccaaacagagtggatatagtcctgctcaaagttggcaagctgtgtcagcaagcaggccctcatctgctactcacttcatgggcatgcaccaaagccttggtattcagctggcgcagcttgggaaggatgcatctgcagcagcagctgcacgtagagttagtggtcaacgaaaggcggtcgaggttgagtctgttgcaactgctggtaaacaagagactcgagaagtagtgaagaagttattccgtgctgagtttgtcgagaggcaacatcaaggtttagatgaggataccgatttgagagctttggagaatggatttgtatcggtcacccctctgaatgttcatgggcaagtggagcctgaaatccaagccccagcttcagattggctctcagcagctgtatcactagagaaagaaaaggaagctgctccagctacagctgaagctcattcagcagcctaacaaacacgcagacatgtacacactccgtggccctacattttggatgcaaccatgtaggctacggcaactaccagatgaatactgcccagccccccactattttttcagtgtggtttgttctaggaaggtgttgtattcagcatgggatatagttgattttgtcttgcaccggtctgaaccgtggccaccaaatatgttttggccgcttgtaaccagaaatgcaatcgcaaccattcaagggcctgtttgttttatcttaattcacattgatcggagagaattttaggagtttaaatctatagcaaatcaaaatctgtcgacctctcctagtcccctccagtctatatgggatataaataactgaacaaggtctaattctgcaattttacttttgcatttaggtcatggctatcaaggtgattatactattcgttggccttgcaattttgatattaccctttatttttcaactttatgattttacccatcgtgttttgataatgaagttattgtttgccccttcctcttaacgatgttagagaaattcagaattagtgattaaaaaataaaaaatatgaaaagtaatgagtgaaaggtttg

SEQ ID NO: 33399 - DNA, 1118 bp, Zea Mays
ccctatttcacattccaaaccacaagcgtagtcgccgtcacttctcccatggccgctccctccctcagccgtggcgggggccgacggcatagcgctcatcaccatcaccaaccttcctgtggtggatgcgccattgcctgatgcgagccgcggggaaatgagggatccttggaggcagagcaacgcggccccgtctccgtctctggccccagcgacgccgccggcccccgccacctcgtcccccgcggcgctgctccgcccgcagcgggaggcgttcgagcatgggctcctgcccatccctaagctcatcttcccggagggcatgctggcgcagaccctcgcccagctcaaggagaagctcgccgcctcagtccctgacgggcgcgtgcgcgctgcggccctggctaaggcgcagcagatcccgcaggagcaggcggcgctcgccctcggcacgctcgcggcgatgctcccggccgaggaccccgtgcttggggacggcgccatggatggtgctgccgccgacatccgcgacgtgctgctcttcctctatatccagtcttacaagcgcctcgtccacctccgcgttcgatggcttgttcgcagcaacagccgccgttttatgccttctcaagctaatgaagaaattcatcagttgtcctttctgcaaaagcatatggcgaatattcttactctcttggcagattctgttgagggtgagggtgacgattcactggtcttcactccaagtataatatgagaacaaccagaaccaaacacagatgctctgtattttcctcagggttattggcaaaactttacgatcggcattgttcctgggtttcatgaattgcagcatcttacgtcttctctggcttcataatcgtgagagatgatgcctgtgtggtggcggtgggtgtactgggcggatccggcggcatggacggttcatggcagagcgccccttgtttgtggagttcctcgaggcatatttataataatattatatatttatattatggtgatattttgtatttgtgaatgatctagctagctatctgtaaatgatctagttgtgaatgatattataattgtgatgcttttgtgaatatataattgtg

SEQ ID NO: 33400 - DNA, 3304 bp, Zea Mays
ggaaagcacaccatcttctgtctacataaacaagctacctgcagcgcgatgtgctccactgcagtgctgctagttcgcacaggcgttgtgcttgtgtgtttggccgccttggcgcgagcgccgagcaaggtccatgctgccgccggcaccggggatgggctccttgctatccctaccaacgcctccctgtcgcactgcccctcttggtgcggggatgtccaaatctcctacccgttcgggatagggccgggctgcttccgtcaaggcttcgagctcacctgcgatcacacagctccttctcccaggctcttcttcgtgtcggggaacagctcgatccaggtgacttctgtacatatcggcatcagtagggttcgggtttcagctgttgggttcaacgtcaccatgagcgcaggcgtggacacctacacccagtcctggaaggcccctccagataacagagagatcatggagagggcaaacacgccttatagtgcctgtacagggttaggctgctgcatgattccaatacgtggcggccaaggcatcactctcaaactaggtcgcctcaatagtaccattccacacttcggtgaagcgctctcccgtgtcaagattatcgtttcacaatactatgaattcgttgctgatgatgtttacacaagttgggtgaatacaagcaacgttgatgacatgctattttacattgcaatcatggaccaaccgagctgcgcgagtgcccagtcccaagagaacaagaatacctacgcatgcagtagtgaaagcatctgcgacgacgatctaccaccagtagtatctcaaggaggctacaattgcttctgccctggtcgtcaaatagagggcgtcaacccctatattgaagatggctgcatagcatattataacccagaggcaccgagtattaggaactgtatgagattatgtggaaacataagcgttccatttccttttgggattgaagaaggctgctacgcaaatgataacctacgactcaactgcacaagcaacggcactcttattcttgatcgagggtacgcacaatatcatgtgaccaatttgtcacttgatgatgggcttttgatggttacaaacatgctgaatgccacaagcttcaacaatatggagagggtagtcatcactaactatgacggttactatcacaacaacttccaaccaacttacatggcggttgtggatggtaattatgatttctctcaggaggatacaacaataaaatgggttatagcaaacataacttgtcagaaagcaatgcaaaataatgctacatatgcgtgcgtaagtgacaacagtatatgcaaagatgtcatgcaagggaatatacgtgacgggtaccgctgcaagtgttctgatggcttccaaggaaacccataccttcaaaataattgtacagggattgtaattgggcttgtttgtggtcttggatccataagttttgcacttggtgcaattgtactcaccggtaagtggaaaaaaggtatccaaaggagaattcgaagagagtacttcaagaaaaatcaaggtctactcttggagcaactaatatcaaatgaaaatgccacaaacaaaacaaagatattcactttggatgaactagaggaagcaaccaacaagtttgatgctactcgtgttctaggtcatggtgggcatggcactgtttacaaagggattttgtgtgatcagcgtgtcgtggctataaaaaaatctaaaatagtggagcaaatagagatagatcagttcatcaatgaggttgctattttatctcaaatcattcaccgcaatgtggtgaaactttttggttgttgcctagaagatgaggattgcaacggaagcatcaggagcacttgcttatttacactcagctgctgcaataccaattttccatagagatgtgaagtcttctaatatactcttggacgacaacttcactgtaaaggtttcagattttggtgcttcaagatctctatcccttgatgaaacacatgtggtgacaattgtccaaggaacattcggttatttagatccagagtattatcatactggttctctaactgagaagagtgatgtgtatagttttggagtgatacttgtggaacttttgacaagaaagaaaccaatttttatcaatgaatcgggtgccaaacaaaacttatctcattacttcattgaaggactacaggaagggactctcatggaaataatagattctcaagttgtggaagaggcagaccaagaagagattaatgaaatctcctcacttatagaagcgtgcttaagatccaaaggaggacatagaccaagcatgaaagaagtagatatgagattgcaatgtctaagaacaaagaggctacggaataaaacacatcttttgattgaaaagggtggagaaatggaacctttgttatgcgcagaagctcagcacccacatgaacgtatcaatccaatttataatgaggaacgtttaacaattccaatgatgtctgggtgttacagtttggagcaagaacttgcggcagcatctagtatgattcgctaacttggtatttgcttggatgttggacacatctatagtaaccatctatttttagagaggaactatatggtatattttgttcctttcgcataagactatggtatatatggtgtgtatatgtatataatatatatgacattgctatgtttacatataatgtaatttccgtatttcaaactgtaatgcgttttagttttgttttgattacaaatttggtactctaattgtaatagtttctaaaaccaatcataatatatagttataatacacttgagatttggaatttgtattagtattgaaataaacttgagatttggacaatgtaatagcattgaaaagtagaatttttatatttttatcacttaaaaaatcaaaagaaattctatattaggtaaatatgaatattacaagcatgggattacactaattcatgctcttttttaagaactcgatgctgattctttgttttggtgacatgtattcattcgctatggtccaagcacacatctggagttcattctgtccttcaaggaaagttttggcgtaaacacaatggcaaaagagaaacttcattattaacgacctacattattaacattagtatcatcgtagaacctcaggaacaagtttatgtcgccaccgaggtgtaaaacctgttattttattttaatggctcgttgaagagatgccctttaatcttatttttttctttctaaatttaacttttaaaatggc

SEQ ID NO: 33401 - DNA, 2559 bp, Zea Mays
ttttacgacctacgcgagaagcggtgtatttcaccgagcagcaacttacagcgacctgttttgctaaatttctcgttgaatcaacagcaaccaaaatgtaagcttaaacccaaggaaaaatttcaaacccgaaacccactagtaccgccacacgaattcccgaccccgatggcgacatcgccaccgcagaaccctagctccggcgagccctccgatgcgtcgagcctcgcagccgcggcgctcgaggcgcccgtgcgcgtatggagatccctcgtcgcgcgcttccctcccctcccggactcctccagcttccttgctggcgtctccgacctccagctccgctacttcggcaacagccggccccgccgccgcaggcgctccgctctacctctccctctccgcccggtggccgcgcactctgctcggattgctggtgagatgcccaaagcctttgtgatcttagatgatgttgtgcaacacaccctgactaatttgcacagtattcacaaaagcttactattttggcaggccaaggctgagggaacaaattctcagaaagtgtactttatgatatttgagagaggtccaagggcctttgttgatgcaacatatcaaacactcactagactcgggagcaatggacgccctgtccaatacattttgcattctgcatctgatatggtgtcaacaaaactcgctgccctgacaagtatgcaacactgcttggccgcttttcttgcagaggttcattctgaagttgataaatgcagggaaggattaactgaaaactcagataaatcgctacatacattattcattgttttgaataccacattctccaagttggaggtatcacttagaaatgcttgtgagggtcaagatgaactatttatagatgatggaaacttgcatgaactgtttgggaaattaccagaagttgatgtagagagttcagaatggacagaggccttggcaacagatggtacaagtttaatctatcaaaaccttcagaagctagatagttttctgtcctctcagctctcaagccataaaagaccaaacaaattgaccatatattggttaccctatacatgtggagcagtaggtctctctgtgtgttctctgtggcttttacgccatagcagtttgatgggaagccctgatatcgacaattggattcgagatgctaaggagtctgtggctggattttgggatgaacatgttgagaaaccaagatgagcttttcgagacattcaagcaaagagataaaggtgtaatggaaaagcaagaggtccaactaactgaagattcattgcgcaggatgttagttgccttttgtgagcaaacagagggtcaaaagttgctggaagatttaccagtgcaggcgatgttggagactctcacaaagagatacgagaaggaattgatacacccaattcaaaacctgttcagtggagaattagcccgtgctatgcttattcagattcaaaagcttaaactggaccttgaatcgggactactggaaatggatcagattctaagggcaaatgctataaactttgctgttcttgcagcgcttcctgcttttggtctttcacttctgttgcttgtgttactgcgagcatgggttcagcgtgaccatggtgctgagggaagaggtaatattgcacgatgtcaacggaggctgcttcttgttgatgtagagagaaggcttatggagtttcaacattacagggataatggaatggaggaagaggcacggtgcaagtttggcttagtactttacacgcttgatagactctgcaaagctgttgagtcacacgcaaaagaaacaggcgaatggttaagcttgagacaagatatttttgatctgtcgaagctcgacatgggaatgccagataagatgattgtcgtttcacggttgaagtggatgtataactgcttgcttccattctcatcgagccgtttgccacgcctctagagcagtgagcaactggacgtcgtgtgttgcattttggataaagattttgacacggatacctggaactctatgtcggaaggatggttctttcatgcccacaagatgttctgtagattttagcagagctggatgaagcatatcggaagggggcagattgggtggatgcagtatccatcgagccctccgttgacaattcttgcattgctaggcatgttgatttggattggctgttgcaccgaatggtttgcgtcgatgggctacatctacatgtgtgcgagcattgtaccctttggccttgttccacttgcaattccaattccaatggttgttccatatcccatactagttcataagtcataacatgacaacagaatgctcttcttttatctattccgcagagatgggtacaatcttatttaactgtttcatttgaaagaacgtgttattattcatgtggccacacgacaccctgggttcctttcacttgccgatgatggcgagcagcgcttccttgtagtggccatgggtgttcttggccacggcgtcggcgagctttgtcccgtactgcctggtgtagg

SEQ ID NO: 33402 - DNA, 3506 bp, Zea Mays
ttggcgtctccctcctctccgtcgcccgcaggcgtgcgccaccatctacgccgcgccgcccgccatcctgccgcccgagatgtaccacgcgatgcggctgcgctgcctcctcctgcaccctccgatgtggagtaattcgagctccctcggcatctctgccagcggcgtcagtagaggttccttcgtcaggaggttcagcgcgctcggggcgccgcggccgcctggtcctgcccgacggctgtgtcggttttacggctccaagggcggcgtcgggagcgctgaggcgaggggcgccgctgcgtccccggcggcggcggggagcagcggcaggtgcttcgagcaggagcacgcgcggctcggggaaagggaccagcaggagtggctgagcggcgagaggtttctcaccggctgcaagcgacgggagtcgacgttcctcaccaggcgggagaggttccgcagagagttcctgcgccgcgtcgtgccgtgggagaaggggtcgctctcgtggcagaatttcccctactacgtcaatgacaatgcgaggcagctgctgagtgagtgtgtggcgtcccacctgcgtcacaagagtgtcacatcagaatatggctcacgtttggaatcctctggagggcggatattgctccaaagttctccaggaactgagctttacagggagagatttgttagagctcttgcacatgagttgcaagtgccgctattggttctggacagcagtgttcttgcaccatatgattatggggaggattactcagaaagtgaggaggaggatgagcatgctgagtcagaggatgaaggttcagaatctgaaatggaagacgatggtgatgaagattggacaagcaacaatggaaaatctggtgaaagtgacgatgaggatgctctcaaatctgtggaagatctgaagaaatctgtggatgacctaaaaaagttggttccttgtactatcgaggaatttgccaagagaattgctggtgctgaagaaagtacggcgtcagaatcttctgaaactcctgagtcaccagaagaagagaaaaggcctttccaaaggggagatagggtgaagtatgttggaacctctgcagtcgttgaagcagatcagaggaaggtgaagcacaaagtcaagatgaaccattggatgaggatcattttggggaaaatacctactcaagatggctcaaggagtgcctatacttttattagtggaaggggtctatcaaatggacagcgtggggaggtatatgaggttaatggggatcaggttgctgtcatatttgatccttctatagagaaatcacacaatgcccatgaagatgtaactaacaaggaggaaaatggatcagcaactgtttactgggttgattctcaggatattgcacatgatcatgataccgaatcagacgattggcatattgcacttgaagcactttgtgaggttttgccatctctacagccaataattgtctactttccagacagttctcaatggttatctagagcagtttcaaaatcagatcgcagagagtttgtgcaaagagttgagaaaatgtttgaccggcttaccggaccggtagtattgatatgtggccagaacttactggcagcagcacccaaggataaggaacaacctgcactgatgttccacaatctctctcgcctgtcttcactgccatccccactgaagcggttggtagggggcctgaagggagaaagatattcaaggtccagtgacatatcaaagctcttcaccaatagtctaactgttcctcttccagaggaagatgaacaactacaactttttaataatcagattgaagaggatagaaaaattatgatttcgaggcataaccttgttaaattgcacaaggtgcttgaggagcatgatctttcttgtgtggagcttttggatgtgaagttggatggtattgttttaacaaaacaaaaagcggagaaggccgttggttgggctagaaaccactatctgtcatcaacaactcttccttctatcaaaggtgacaggttaatcattccccgtgagagtctggatatatcaatcgagaggctgaaggaacagggtataacagctaagaaatcctctcaaaatctgaaggttttggctaaagatgagtatgagcgcaatttcatttctgctgttgtgcctccgaatgaaattggagtgaaatttgacgacatcggtgcacttgaggacgtgaagagaacattggatgagcttgttacacttccaatgaggagacctgaacttttttcgcgtggaaatttgttaaggccctgtaaaggtgttttgctttttgggcctcctgggacaggaaaaacactcttggcaaaagcccttgcaacagaagctggagcaaattttatcagtataactggttctacactcacatcaaagtggtttggagacgcagagaagctcacaaaggcccttttctcctttgcgactcgactagctcctgttatcatatttgtggacgaggttgacagcttacttggtgcaagaggtggtgcatttgagcatgaagcaacaagaaggatgcgcaatgaattcatggcagcttgggatggtctcaggtccaaagagaaccaacggatccttattcttggtgcaacaaatcgtccatttgatctggatgatgctgtgatacggcgtttacctagacggatatatgttgaccttccggatgcgcagaaccgaatgaaaattctaaagattttacttgcgaaggaaaaactagaatctgattttaagttcgatgagcttgcaaatgccacagaaggctattcagggagcgacctaaagaacctatgtgtagctgcagcatataggccagtccatgaactactagaagaagagaaaaagggacgtgtgagtaacgaaaacagttatctgagacccctttgcttggatgattttatccaagcaaaagctaaggttagctcgtctgtttcttatgatgcaacaagtatgaatgaattgagaaaatggaacgagcagtatggggaaggtggcagcaggactaaatcaccatttgggtttggcaactgacactacagtagagatttaccaatactgtatctttgtaacatttaggctgcctcttgttggtagattagggagtcagttccatttttttaccatgagcttatttgaacaacctcgtaatcacctcgtgcaaacaaaaaagaatctagttaaacgccaattttgcctactagttaatggtcggaaataccagtgtagaatcagaaatcggctacacactacaaaataatgtatctgagctactctgggtaagcattaagctttaacaagatgtaaacggcttaagaattttcagttaattcatactagttctcagcatggaattcagtagaactaatttagtattgatagctagtcgatggctggaatcttcaggatgtctcctattgcccagaaactttgttcgtatcaaaagaatggaagagaa

SEQ ID NO: 33403 - DNA, 1422 bp, Zea Mays
ccgtcgtcaactgagttcatcgagtgctatgcatgctaggaattatgcctttagctgagcgattgggatatgcaactgagcagcttgcagtatacactggtccaacagttggtggccttctgaatgctacatttggaaatgcaactgaaatgatcattgcaatatatgctttgaaaaatggaatgatccgagtagtgcagcagtcactattgggttccattttgtcaaatatgctgttggttatgggctgtgctttctttgctggtggtattgttcatcgcaacaaagaccaagtcttcagtaaggcaactgcagctgtcaactcaggtttactgttgatggctgtcatgggattgatgtttcctgccgttctccatttcactcattcagaagtgcggcaaggagcatcagaggttgctctttcaagattcagtagctgtattatgcttgtggcgtatgcaagctacctctatttccaattaagtggacggagcaacatttacagtccaataggcagaagaggcgcctagcgaggataacccggaagaagatgaagaagctgagattggcatgtgggaggcagtaacatggcttgcggtgttaacattctgggtgtcttttctttctgagtacctagttaacgccattgagggagcatctgattcattgaacctaccggtggcttttatcagtgttattttgcttcctattgtgggcaatgcagctgaacatgcaagcgcaataatgtttgccatgaaagataagcttgacataacacttggtgttgcaattggttcatcaacacagatatcaatgtttgtgatggacttgaattttcagctatttgagacagcaactctcttcataacagtacttgtggtggcatttatgttacaggatggcactgcgaactacttgaaaggacttatgctgatcctatgttatctaatagttgctgccagtttctttgttcacgttgatccacaatcaagtgaaggctgaagccatatatcctgtaagtaacgcgccaaataccttttgagacttaataatcttgttttgttccgcctgtctcaagccgggttccttcatgaactgcagaaggaatttttgtattttgttttgtggatactgatgtgtactagggtagtctcgatgtatacagaaacaagaagtggcagcatgttatattcgattaattgtatgggttttctgttttccttgaaatttaactattgggctgaatgtaaatttgggtatatgatttgatgatgacagatgctagatctttcatcatttttttgtagttgatgatgtctgcatagtcacggttctgcatcaatgtttcttttccttccctagtgattgtgtacacttttgatggcagatcaattttatatggccggtcattgtaaaaaaaag

SEQ ID NO: 33404 - DNA, 895 bp, Zea Mays
catagtagtagctgggaagaataaattaaagataacaaggaaaataacatcttcattcaccaacgggttaagaatataaccaacaagaaatcaatttgatggtgtccacagaggagaaaagaaaatttgaccttaacttcaggcaacttccttaatattcttttttccttcaattgctctgcattgtttagctaaaattgcagtcgtggaatgtgtattattgtcttctttctcagagatagatcgctggcattattcttcgtgaattatcttaccgtggagcagcactggcacccaccgtggctgtggtgggactgggagcagcagtcggacagccacgccgggtatgggtacaagtacgaccagggtaggggacattcaccaccttgggtgatgctgggaccggcttctcctccttggatggtggctgtagatcccgtgggagcttcaagcggcgacgctgcacggaaccgtcgtcgatgttgccttcagcgagatttctcggagatggtgaccgttgccgccgccgatggtctcttcagtgagttagtggagcccgaagccaggaccttcgtgttgtcctccgcaacgatccacatcagcctcttccggtgccatctgcaggcgcgcggggtgaggggaggagcgaggaagggggcgaaagtataaagaagaagagaagcaggcaatgcacggatgagggcgtcacgcgtagcaggcggcagctagggcgaggacgctggctatccgggaggaggcaggtcaaatcggttgaagtcttgggcggaagagggggaggctgcagttgtctgcgggggcgaggacgccggcaatctgggagaggtaggccaaatcggcggaagtctcgggcctgcgaggagagacagatgtcggg

SEQ ID NO: 33405 - DNA, 2026 bp, Zea Mays
caagcttctccatatattgatcatcaatgaattctggggttcaacgttcaaggcaaggagcttttgctcatgggtctgttttccactaggaacttcaaaatgacccttcacatcatgatttgttattcagcaacacttgtctgccgtggtctttccacttggcggtactttagaaatctgggaaactctgcatgcccaatgtgctggaaagtgtatatcagagcttactattgtgcctgcaaaagtatgttggcaggaccttaggatctccactacgatatattattaaagcacagttgtttttaaagatcatcatacaaaatacatctggacatactatgtagatcactttatgctctgattggctgaagtaagtctttgggtaattgttatgtttacagtaacttttatttctgatggtgtttcttgctatgccattttcaggttaggactgtccttgacatagaatgtggatttggtacctttggggcgcatctttttgagagagatctcttgaccatgtgcattgctaactatgaagcatcaggtagccaagtgcaaattacactggagagaggcattcctgcaatgattggttcatttgcaacgaagcagcttccgtatccctatctttcctttgatatggtgcattgtgctaaatgcaatatcgaatggtacaaaaacggtatgtgtgaaagtcttctttcacatgccctggccctcattgacgattataatgttattcagcaatgtcttaagttggcacttcacatataaagatcggtacatgcctagctgaatattaaatatttaaggatatacagttgtgggtgacttttggttgacttgtaacccttgtcacttcaaactttgcatacatctgatttctgcaaagacacatttatggtaatttggctataaagtagtatctcttacagtcttactaaatatgtaaacgttggttttctctgtaattctgcagatggcattttcttggttgaagtgaacaggcttttgaggcctggtggatattttgtatggacatcgaatttgaatacacatagggccttgcgagacaaagaaaaccaaaagaaatggacagccattcgtgactacgctgagggcctttgttgggagatgctgtcacaacaagatgagacaattgtatggaaaaagacgaataaaagggaatgttacaaatcaagaaaatttgggcctgagctatgtggccatgatccagaatcaccatactaccaaccactaagcccctgcatatctggcacaagaagtcagcgttggatccccattgaacaccgtaccacctggccatctcaggctaggcaaaactcaacagaactggacatacatggtgtgcattcagaagtcttcgctgatgataattcaagctgggactccatggtgcgaaactactggtctttgctatccccacttatattttcagaccatccaaagagacctggtgatgaagacccacaaccaccatttaacatgctaaggaatgttttagatatgaatgctcactttggtggatttaatgctgctttactgaagtctggaaagtctgtatgggtgatgaatgttgttcctacaaatgccccaaattatctaccaataatatttgaccgtggttttattggggttcaacatgattggtgtgacgcatttgcgacttacccaagaacatatgatatggtgcatgctgatggctttctatcacttgagaagacccacaagcatagatgttctactcttgacatattcttggaagttgatcgcatcctacgaccagagggctgggtcataatccgtgacaccgcccctcttattgaagcggcaagatctgttgttactcaactcagatgggatgcccgtattttagatcttgacatagctagtgatgaaaagctactcgtctgtcagaagccctttctcagaaaataaggagcacaagcacagtagacactgacacaagatatgaacttattctttcaccctatactgttac

SEQ ID NO: 33406 - DNA, 1054 bp, Zea Mays
gctgtagccaagcagatgcccgctagtccctcgctttctctcttccacccgctcctcacgccgccacagcgccactgctccttcggcctagttgaggagagatacatccatcctggcctggattggctggtgctggtccttctgctgaatggcagaatttgttctatggactttcacagcaaggctaccaactatctcgtgacagctagcgatgatgaatcaatccgtttatacgatacccaagatgcagtggttgtctgcatcgcactttgctctggaaaagaaaactttctctcatgttcgcttgatcgtaccattctcttatgggaccatcgggctgaaaaaccgcagggcttactgcgcgcgcaaaggaggcctacagtttcgtacgacgcccagggcatggtatttgctgtcgcctatggtggccgcataaagatgtttgatattcggaaattcggaatggggccttttgcgaccttctctgtcggcactgatgattcggaagcccatgtcgtacagttcagcggtgatggcaggcggattctgttaaccactaaagctgggcgtgttcatgtgctagattcttttgaaggcaacagcattgcatcgtttcgcgcgaagccaatattaaccaattcgacactggaggcatcgttctgtcccgagggaaaccatatcgtatctggctccggtgatggtagtgtctatgcttggaacgttgagagcggaaaggttgcatgctgggaaagcacagatgtgaaaccgccgcgggtaaggtggtctccaggatccttgatgttcgtgacaggaacgtcggagctgtcctgctgggtgccggatttgtccaagctggagtccttcaccatcagccacaccaacaccaggtccagctcgtccctgtaggcttggaccgatttgcatgccgtgtggccggttgacgcgaaggaggaacaagaaagcatagcggagcatcttgtaccaattgagtttgtgatctgttcctgatggcccggtaagctactattgcaacgattgtggtctgcggcaacgg

SEQ ID NO: 33407 - DNA, 1824 bp, Zea Mays
acgctgtcaatgcataacctgcgttggcattccgcctgctggacttcctcgtgctgtgtctctgtctgtcgctctcgctctcagacgactgggccgccgccgcttggtgctgaggctttcgttggtctcttcggcggcgacgagcacccaccagttctgtagaaatggctgatggtgaggacatccagcctcttgtctgcgacaatggcaccggaatggtcaaggctggttttgctggggacgatgcaccaagggcggttttccctagcattgttggccgtcctcgccacactggtgtcatggtagggatgggacagaaggatgcatatgttggcgatgaggcacagtccaagagaggtattctcacgctcaagtacccgattgagcacggtattgtgagcaactgggatgacatggagaaaatctggcatcatactttctacaacgagcttcgtgttgcaccagaggagcaccctgtgttgctcactgaggctcctttgaacccaaaggccaacagggagaagatgacccaaattatgtttgagactttcaatgttcctgccatgtatgttgcaatccaagcagttctatcactctatgctagtgggcgtactactggtattgttctttgactctggtgatggtgtgagccacactgtgcccatttacgaaggatatgcccttcctcatgccattcttcgtttggatcttgctggtcgggacctcacagactccctcatgaaaatcctgactgagaggggttactccttcacaacctctgccgagcgagaaattgtaagggacatcaaggagaagctggcatatatagcccttgactatgagcaagagttggaaactgccaagaacagctcctcagttgaaaagagctatgagctacctgatggccaagtaatcaccattggtgcagagagattcagatgccctgaggtcctcttccagccatccatgattggtatggaggctgccggaatccatgagacaacatacaattcaatcatgaagtgcgacgtggatatcaggaaggacctctacggcaacattgtgctcagtggaggttcgactatgttcccgggaatcgctgatcgtatgagcaaggagatcacttcccttgcaccaagcagcatgaagatcaaggtcgttgcaccgcctgagaggaagtatagtgtctggataggagggtccatcctagcctcgctgagcactttccaacagatgtggatatctaaggaggagtacgatgagtctggcccggcaattgttcacaggaagtgcttctaggcttcgcaagttcctcatcgttgcctagtctcaagttatgtccccttcatttctcaagatacgtgtggcagatttgcatggtacggttcatttatcaaattatgcccaccccctctttgtatgttgtggctccatgtgcgagcacgctgtctgtcgtgacacctggttcgtcagatgttttgtcaaacttgcttggcttgattggttgtacttgtacctgtaagagctgatagttatatgaatggcttggactgtcctgctgtttatagccttaggactagtttggaaacacaatcccccttggggattaaaaggggctgaggaggaaattagttcatttccatctcaatccctttcaatcccgaatggggtttaaggtttccaaagtagcccttagtatgtattctgagcatccgtgcaaagtatgaatgaccctgtagatgggctgggttttctggtttatattctttataccgtgtccaacagcttactcatatggttatccaaaacaccgatttacactgt

SEQ ID NO: 33408 - DNA, 2051 bp, Zea Mays
ggtagtctgttttacatcctgcatgtatggtgaccgtggcctgatgattcccagccagtcctgcatgcccggtgttcgtggccacattcctagccactccagcattgcagttcgttcgtgaggaaagcattgctcataacctgttcttggctattttaagggccgctaatgatgaacacaaacagcggtttagagtgaatccgcaactccatactccaaccagcgctccttcctcggcgcgccttcagccatcgcacagctgagtactagtaacatccagtttgctggtcaatcaataaaccacttggtgtgctcgtgggaggaagaagatggaatccatagatttgaaggtgcaggtggtagagtcatcatttatagcgccgagcgagccgacgccaagcaagggcctctggctctcttccttggacatcctgctggtcaacataggccacaccccaacgatctacttgtacagctccaacgatgtagccgcggctgattttttcgacgtgggcagactcaaaaaggctatggccaaggctttggtgcccttctaccccctcgccggccgcctcggcaacaacagcgacaatggtaggacggagatcagctgcaacggcgaaggtgcactctttgttgtcgctcacgcggatggtgatctcactatcgatgacatcaagaaattgaagccatcgccagagttgaggaggctgtttattccactcatcgagccatcgtctatcataatggccatacaggtgacttccttgaagtgtggaggggtggtgttaggaacagctatccaccacgccgccgcagacgcttcaagtgcgttccacttttttcagacatggtcggcattctgcaagcatggtgaccgtgctgccgtggcggtggagctcccgtgccacgaccgcaccctactccgcgcacggtccccacccacagtccaccccgacgcgctcttgacattgctgcctcggctcaccctctctgaccccgagggatcccttgccaccgaagtcttcaccatttccagcgatcagctcgcctccctgaagcacctctgcggtggcgcgagcaccttttgcgcggtgagcgctctcctctggcagtgcgcgtgcgttgcgcgccgccttccaccggattctcaagtgcgcatgctgttccctgccgacctccggcgccggatgaggccgcccctcccgagccactacttcggcaacgcagtgttcaggctatgcgcaactggccgggcgggggatattggcacggtggcgttgggatccgtcgctgcccggatcaagggcgccatcgaccggatggatgacgagctggtgcgttccgccattgactactacgagtacgagacggccgaggtgaacaagagacggactccgacaggcaccctgccacagacggacctcaatattaccagctggttgggtaggtcacagtacgacgcggattttgggtggggaacgccgcaattcatgtcccgggcggactccgaccgcggcggattcgtgcacttgatcaacgatgagggtggtggcaccgccaccggcgacgtccgcgtgctcgtgaccgtgggggctgaaaatataaaggagctagggcggcttctttatgcgaaactctagctaggtgctgctagtggcattatccaaacttgaaatatcccaactcgtaactgatgtaccgaaacctgaattctcaaacactatttcagatcctaggtttgaaaaccaaaatttatacacaaattaactgaaattatatgttatttgtaatgtataatatatgctcttggggactggtgactttatgttaactcttcaacgccctaagttgtgatatctaatatattatgtttgcttgtgtggacttctattaggtctacttctagttcaataatttctgtttctactgtactagactgctagttttgttatatagctatgtaccatgcgatgtggcactgctagctagcagtatgaacttaatttgtaatgtgtgaaatgcatgtgaaatgaggtatttgttcaatt

SEQ ID NO: 33409 - DNA, 2184 bp, Zea Mays
ggaagctccacgcagtagtttgaggaggaggctaaggtttcacatgcagtcgagggaaaaagggagagagagggaggcatggtgttagcgatgcctagcgaggctgcagaagagaaacgagcagcaatggcagatttcgtggagaagagggcggtggagaggccggaggcggacgtggttgtgataggcagcgggctcggcgggctgtgctgcgccggcctcctggcgaggtacggccaggacgtgctggtgctcgagagccatgaccgcccgggaggcgccgcgcactcgttcgatatcaagggattcaacttcgattcagggccatccttgttctccggattccagtccagaggcccccaggcaaatccacttgctcaggtccttgatgcattaggcgaatcagtcccttgtgcgtcttatgactcttggatggtttatgtacctgaaggacaattcctctcacggataggaccaactgaattcctcaaggaccttgagatgtttgttggtgttgacgctgtccaggagtggaaaaaacttcttctgcaatggctttgcctccgctttccattcgaggtgatctgggcattatatctacagctgttggtagatacactccttcgttgttgaaatcattcatacaaatgggaccgcaaggagctctgggcgctacgaaacttctacgtccattcaaagaaattgttgattcgctggagctgaaaaatccatttgttcgtaactggatcgatcttctgtgctttctacttgctggagttaaatctgatggtgctctttctgcagaaatggtttatatgtttgcagaatggtacaaaccaggatgcttgcttgagtaccctctgggtggaactggagcaataatagatgcccttgtgagcggtattgaaaaatttggtggcagacttgctcttcgttctcatgttgaaaagatcttaatagagaatggtcgagcagttggtgtcaagctacaaagtggacaagttatccgtgcaaagaaagcggttgttagcaatgcatctatgtgggacactttggatctgttaccacccgatgctgtcccaaaatcatatgaagatagagtgaaagcaactccacaatgtgaatcgtttatgcatctccaccttggttttgatgcagagaatgctagagaggaccttgggatccatcacattgtggttgatgattggaacaaaggagttgatggtgaacaaaatgttgttttgatatccgttcccagtgttcttagcaaggacctggcaccgcccggaaagcacattcttcatgcatatactccagggacagaacctttcagtttgtgggagggactggacaggaaaagtgcagaatatcgaagactgaaggaagaacgttctgaggtgatgtggaaagctgtggagcttgctctcggcccaaaatttagccgcgaaaaatgcgacgtgaaattggtcgggacaccgctaacgcacaggagatttctccgaaggaacaggggaacctatggtccagccataaaagccggagaagccactttccctgggcaagcaacaccgatcccccagctcttttgctgcggtgactcgacctttccagggatcggagtgccggcagttgcggccagcggcgcgattgtggcgaacacgctggttccggtgtcgcagcattcagagctccttgacgctgttggaatctgagtggcagatacgtccgtcggtcctgaacgataatcaaagattttcccactgctgttggaaaaagatcgtatggctgaatggagaagaagacgacgacgacgaccgatacagtagagttttctagtcagaacggagactgggaaaatatgttgtacagtatattatttactacgactgcatgaagcttgtgctgcttctgacaaattggtcgcctcgttcgcctgcatgctccttgtattgttctaccgaaagctctgtggcgcatgcaggccttttgtcggacattttttttttctggtatacggaggaaggaccatgtgcttgtttgtacaactctagtcgcagtttgctgaagtccttgaacgacggcaacaaatgccagctgcgctgtcttttcattggagggcagcactggcctggttgttgtttattattattattattattattattattattattattattatta

SEQ ID NO: 33410 - DNA, 4166 bp, Zea Mays
agatggccggctttatcagctgcggcagcgagattcaccgggggaagtatttgcagcgaccgcgccggtccccgccacaaaatcagctacccaccaccgtccgtcagcggcggcggcgagagcatggcggccatcgtggcggcgcgggcgtcggcccccggcagagcggccgtcagcaccatcgccgcgttccacagccacgcgtccccttcccgcgcgctcccgctcgcctcctcctccatcggcggcgccaggcggtaccaccacgcccccgcgtgctgcttcgccaccaagcccaccgcgccggccgctgccgagctcgtcgaccaggacctcgccacggccacgcaggaggccgccaagccacgccggaaacgccggtctcggaaggcgaagaagtccgccaccgccgccaaggaggaggatgggacggacgacaagccggtggcggcggcagaggacgaggcgaaaaggaagaaggaggcggccggcgccgaggacagcgcccgggcattggtggccggcctcgacgacgtgatcgtcaaccccgtgggtctgggtcggcggtcgcggcaggtgttcgacgaggtgtggcgcaagttctcgcggctgggccagatttcgagcgcctcgtccaccgcgctggcggaggaggagcaggccgtgcttatccgtggaggacctatgtgcgagttcactgtgccaggggcgcaggacaccaccgtcctcgtcgtcggtgccaccagccgcatcggccgcatcgtcgtgcgcaagctcatgctccgcggatacaatgtcaaggctttagtaagaagaaacgaccctgaagtgatagatatgctcccaaggtcggtggatgttgttgttggtgatgttggtgatcctgcaactgtcaaagcagctgtatcaggctgcagcaagataatctattgtgcaactgcacgctcaactattacaggagacctaaatagggttgataaccaaggagtaaggaatgctagcaaggctttccaggattactacaacgaattggcccagctcagggctggtaaaagcagcaagagcaaactcctgatagcaaaattcaagtctgcaaagtccttgaagggttgggaggtgcggcagggttcttacttcccaaatacttttgtttctagatttgatgaaggtatcgatgcatcactggatttttcagaagatcagcaggctgttttctcaggatttgtattcacaagaggtggatatgttgagatatcaaaaaggctttctcttcctctaggttctaccctagacaggtacgatggtttactcttttcagtgggaggaaatggaagatcatacgttgttattcttgaaactggtccattggcggacacgacccagagcaagaagtattttgctcggatgactacaaaagtaggtttttgtagggtaagagtgccgttttcatcttttcggccagtaaacccacaagatcctcccctagacccttttcttgtgcatacactaaccattaggtttgaaccaaaaaggcagagacctggtgaggcatctcaaaattctagtgatcctcgaaactttgagctaaaactggaatacatcaaggctttacctactggtcaagaaacagacttcatattggtgtcatgttcaggttctgggattgaatctaacagaagagaacaagttctcaaagccaagaaggctggagaagatgcactgcggaggtcaggccttggatatacaatcgtgcgcccgggtcctctgcaggaagaacctggtggccagcgcgcgctgatcttcgatcaagggaacagaatctcccagggtatcagctgtgctgatgtggctgatatctgtgtcaaggcactgcatgattccactgcgagaaacaaaagtttcgatgtatgctacgagtacgtcagtgaccaagggaacgagctttatgaacttagaatgcaaagcctgaggctgcaagagtggtccggactctggagtactctctctttctctgttgggaaagttggtttcggcctgttctgctgctcaagcagcatacggcagctcacgcctatggtggacaaccaaagattcagtgctctgattcttcttgggagcaggtggcgactgagtgactgacaaacgtggggaagatggagacaaagaaacgcaagcctgtggtctactaaagacgggggcatcgccatcgagggcaaacggaggccacaggattagcagcttctccgtgctgctgcgtctcctcctcatcgtcctctccagtgtccagctcggccatggcgttcaccgtctccttctcccccgccaacgttcagatgctccaggctaggagtggccacggccacgccacctttggaagctgttccgccgtgccaagagccgggccaaggctgcgttccacggccgtccgggtcagcagcgagcaggaggcggcggcggccgtcagggcgccgtccgggaggaccatcgaggagtgcgaggccgacgccgtcgctgggaagttccctgctcccccgccgctggttaggccgaaggcccctgaaggaacgccggagatcaggccccttgacatggcaaagcgcccccgtcgcaaccgcaaatcacctgctcttagggctgcattccaggagacgagcatctcgcctgctaactttgtgcttccattgtttatccatgaaggagaagaagatgctcctatcggagctatgccagggtgctataggcttgggtggaggcacgggctgcttgacgaggtttacaaggcccgcgatgttggtgttaatagttttgttctctttcctaaagttcccgatgcattgaagtctccaacaggagatgaagcgtacaacgataatggtctggttccacgtacaatccgcttgctcaaggacaagttccctgatattgttatctacacagacgtcgcgttagacccttattcatctgatggtcatgatggtattgtgagggaagatggtgtaattatgaatgatgaaacagtttatcagttgtgcaaacaggctgtttcacaggctcgtgccggtgctgatgttgtcagccctagtgacatgatggatggccggattggagcacttcgctctgctctggacgccgagggcttccatgatgtctccattatgtcctacaccgcaaagtatgccagttcattttatggccctttccgagaagctttagattcaaatccaagatttggagataagaagacgtaccagatgaacccagctaactacagagaagccctcatagaaaccgcagcggacgaggcagaaggagccgacattctgctagtgaaaccgggattgccgtacttggacattatccgactgcttcgggatcattcagccctaccgattgctgcttaccaggtctcgggcgagtactcgatgatcaaagccggcggggccctgggcatggtggacgagcagaaggtgatgatggagtcgctcatgtgcctgcggcgagccggcgccgatgtcatcctgacctacttcgcccgtcacgccgccgcggtgctgtgcggcatggggcccaagtaggaggcgaggcccgcccgccattcctgccctgcactgtcattgtggagttgagcgatgagttggcttatcgtatgttttgggggcctggcactggcagaggattgtccgaggccttggatctcttccaataatctgcgccgggagataataagttttggagttatcgcatttcccggtactaatcttctgcgtgttgctagtactgaaaaaggtttggattttgaagcgattttagacagctggattagtacctcaacgaacgaaggatttcaggggaagcgtgcgtatcattcttgaaggcgtcgcactcccacctcccactcccacgtgatttcacggtggaccctggaacaacctcgattggacagtacactactagctgctcgtggtcatggctcaggactatctatccatctatgcaaatgaactaggtcaaggtacaaaattaattatgcttaattaaaagcctgcgacgagataaatttattaagcttaattaatctataactagtaaatggactaattagggtttatagtttcgtcttaccgtttagtctttaactatgtaattaattttctaattaaacccat

SEQ ID NO: 33411 - DNA, 416 bp, Zea Mays
gaatcacagccgccacggatccagtggcccgacgtggaaggcagaactcccagaccttttctctccaccctaagcttctgcacgcgcgcaccgcccctcaccgtcggcctcttctcctcttcgtccgccacaggatctcgcctcgccgaggccatgtaccgtgccgccggggaccacatccgctccctcaaggtgaatagacaaaaatacgggagagggcagccaacggccaccgggagttgggtcctaggagccaccgacttcagccgcctgctcaatgacggcgagggcggtgcctacctgacaagcccgcacgtcggcatggtagttgccatcaagaaactcaatcccaatgacataaggttcgaatgctccattccttagacaatgccaacgtcctgaaattttactcctgg

SEQ ID NO: 33412 - DNA, 2744 bp, Zea Mays
atttcgttttgtttcgtttcatttcatttcgtttcctcccgttcgtcgaagccccggcggagaggcgaggtgagctttctcggagaggggacctcgcgccaccagccgcccgagcttcccgcgccatggatcccatcatgaagctactcgaggacgacgaggatgagagtctgcactcgggtgccgacgtcgaggccttcacggcggcgctgaaccgcgaggtggaggccagcgcgagcgccagcgccagcaccagcaccagcgttcccgccggctcctcgtcccagcccacggatcacggtgctggacttttacctcaggaacacaagtcactattaaaccatgatcctggtcagtggcaagatcctgtaaagaatgaaattgtaaaccaggagagtcagcaacaggaacagacacatgcatttagaaatgatcacccgtcaagacctgaaatggtttctcaaggttctaataactgcccccttcccactaatacaccaaaagaatgtgatttactgaaggcaaaacaagaacctggaagtacatctcaacaaggtattgttgctcagcatcagcctatgcagcaaatgaagagtgaacaaacaccaattgtcagtcagcagcagtcgatgcagcaaatgaagaatcaacaaacaccagtcacaaaccaaacaaatagtgcaactacaacagcaaaagctccagttgttacatttcacatgttaattccaattttgagtcgctacctagacaaagccagggacatagaagtgcagtccattttcgccaagttgcggaaaaatgaagtcagcaaggaatacttcttaaaaactgtaaggaatattgttggtgataaattgcttaagcaagctgcttcacaatatcaaatgcaggcacaacgaagccctcagacaaacccaagcaactattctttatcaggtcaagtttctggtcagcagactgctcccagtggttctgtgacaggagatgaacagaagggatatccaggggctcacaccatccctatgagacaagctattgccagcactcgaccacctcaatttcggccttcctcgtctggccaaatgcggagtaatacgggttatccaccttcacaaaccaatttgcataaggctaatgaaatgggaaacatgtcagatgggaaaggggtccatatgttacaaactcgtccacccaataactccataccagtacaaacaatgcagcatcatgtgcagcgaccacaaacatcttcaccagtgtttggggcaaatagtattcatgcacgtccatttccgcggccacttggaggtccagctgcaccatttagaccacaaatggcagattccaatccaaaagcacaattgattcagggagctgtgaccacagtatctgggagtgtgccaacacgatccatagtgtctggaaatgcgccaggtaatcaatctacaaggcaacaatcagcaaacaaggagcaaaaaactatttcttttactcgaacagcacatatgaataatgaaactgttagccaaaactctgaattctcacagaattcttttgctgtgatgcatgcaaaacaagtcaatcaagccttgggatcttcaaaagtcagtgctggcatggaaagccagtcacaacaattgagtgcgcctaagcctttagctgcaacaagcttaagtcagactcaatctcatggcattcaagaagagcctaaaattcagatccaatcttctgtgcaagcacctcctgcagcagcttctaaaacacctcagaggaaggcatcttctggacagaagaagcctttggaagtcttaggctcatcccctccaccatctagcaaaaagcagaaggtatctgggggtttccatgaacaaagcattgaccagcttaatgatgtcactgcagttagcggtgttaatctgagggaagaagaggaacaccttttctctgctccaaaggaagagggtcgagtttcagaagttgctcggaaagttgttcaactagaagaagaaaagctcattctgcagaagggacctctgacccaaaaattagcgggaatcatgagtaaatgtaatttgaaggtcattggcactgatgtggaacgctgtctgtccatgtgtgttgaggagaggttacgggggtttataagaagtataataaggttctctaaacagagggttgaggttgaaaagtcaagacatcatttttatccattatcctcagatgttcgcagtcatattatgagagtgaatcgagaagcaagagaacagtgggagaaaaagcaggctgaagatgctgagagaattaggaaacaaaatgatggagatggcaatgcaaatgttgatcttgaaaaagacagaatcgagacccgtggtttgtcaaagcatgcaaagacttacaaggaggacgatgataagatgcgaactacagctgcaaatgttgctgcacgagttgcagcggggggagatgacatgctgtcaaagtggcaattactagctgaacggaataagcagagaagtgagggaggtgatggttcttctggctctgtaccaggtaacatgttgcaacacaggccatcactgaaatctgggaaagacttaagggaagaacatgaagttgaaaagagaggatactccacaatgcttggatctggtggtaccatgatattagtagttgagacatttctcaatgataagatgcctattctgctatttgttcatacagactgtatttcaaacttatag

SEQ ID NO: 33413 - DNA, 1532 bp, Zea Mays
cgcctcccggttcccttccccgtcgcgacctcgccacccaaattcatcaagctcaacacgatctcgattcgattccagttcatccatccaacgcctcccgcctgtacgtatagaagaaagaaggaagaaccgtcaccgtacgtcctcgccagtacaaataatggccctgctcaaagccgcgcgcgtcgccgatgtgcccaccctggacgtggtggtggcccccggcctggtggcggttgccaaggcgaggagcgccgcggcggtgggcggccggttctcggtgatcgggcaccgcggcaaggggatgaacgcgctggcgtcggaggacccgcgtctgcgggaggtccgcgagaacacggtccgctccttcaacgacgccggacgattccccgtcgactacgtcgagttcgacgtccagatgttgagaagagaaccgtgaataccgattttgcaggtcaccaaggacgggtgcccaatcatcttccatgacaacttcatcttcacacaagacgatggtaagatttcacaaaagcgtgtggccgatattcagctggaagacttcctgcagtatgggctccagaatgagcaggggaaggttggcaagcccctgcttcgcagattgaaggatggcaggatggtgaactggaacgtgcaatcagaggacgctctttgcacactcgaagaagcgttcgagaaggtcaatccaaggttgggcttcaacgtcgagctgaaatttgacgacagtcttgaatacaccgaggaagagctcactcgcatcctccaggccatcctgaaggtggttttcgagtacgccaaggacaggcctatacttttctccagttttcagcccgacgctgcgcagctcatgcgcaaattgcaaggcacataccctgtctacttcttgacgaacggagggacggagctatacgccgacgtgaggaggaactcgctggaggaggccgtcaagctgtgccttgccggtggcctgcaaggaatagtttcagaagcccgcgggatcttcaggcaccctgccgccgtgccaaagatcaaggaggctaacctctccctgctaacctatggaacattgaacaacgtgccggaggcggtgtacatgcagcacctcatgggagtgaacggggtcatcgtcgacctggtgccggagatcaccgaggcagtctctgagctcatcgccctgcccgagcccgacctcgacctggaagtgggcagcttgagcaaccaggcggcagctagaggagccacaacaccgaatttctcgcagcgcgagatctcgttcctgctgaggcttattcctgagcttgtccaataatgcctagacttcctggtgtctgtctgtctgtctatcatggatgaattgactaatgtgttactgatgtactgatccgcatacaagaaaagaagcccttgtgcagggtattatttgtttatagaaaaaaaatagagttacagaacagaataaagaagccaggttctaattttatctcctattactggcttaactcgatgactaagaa

SEQ ID NO: 33414 - DNA, 3237 bp, Zea Mays
ccaagcgcttaccccaaaagtcgccatcaaactcaaacatcactccagtacactccacagtagcgcacgcgcattccacactccagtgcttcggttcagcatggagcctaaaccctcgccgccgccggccgccccttcgcgccgccgcggcgcagcgaccaagcgcaaggagaaggccgcatctgcggtgccctccgggtccccgtcgccgaaacgccaggcccgggagcgcgggcccgtctaccagccgtcccttccgccgcctcaaccgcgcagccgccaacccgcacgcaagccgcagcgcaagcccgcacgcaataaatcgccgcggcgctccgtggagccgccgcgcgcgcaggaggaggaggagggcccgccgccactgccgccaccacggccgtcgctggagaaggagatcgaggccgttctgtcccgcggcgctggcgtccacgttgtacccaccttcgccggatggttttcatggaaggaaattcaccccatcgagaagcaaatgttggctacattttttgatgggaaatcagagagacggacacccgagatatatttgggaatcagaaatttaatcatgaacaagtttcactgtaatcccgaagtgcatctggagtccaaagatttgtgtgagttgtcagttggggagatggatgctcgtctagtaatcttggagttcttggcctactggggtttagttaatttccaccctttcccatcagttgtacaggaacacaagctggttgagagtaaaagtagtgctgagacagcagaaggaatttctcaggctgagaagttatttcagtttgaaacagttcattcttacttggtacctgtttcaaaggaagctgaagcaatatctccagttcagttcactagcttgctccctgagcctaccctagctgaagatgcaataggtgcagctgagtcttctgttgagtaccattgcaattcctgctcagttgattgttcaagaaagcgttatcattgtaggactcaggtagactttgatttttgttcagattgctacaacgaagaaaaatttgatgaaggcatgtcaaaatctgatttcatccttatggaatctgcagatgttccagggtctggtggttctaactggactgaccatgagacattgcttcttttggaagcgttagaaattttcaaaggaaaagaatggcatgagattgctgagcatgttgctacaaaaacaaaagaacagtgcatgttacacttccttcaaatgccaatttctgaaccgtttcttgatggcgatgatttcaatgaaacaccccagaagatcacaaaacaggattcagcagaaactggtccttctgatgtacctgacaagatggatgtagatggtaatgcggaaggaaaagagagcactgatgaaaaagcttacaagaaagcagattccagttccgcagaaacaagaacaaaattagctgaccaaaatatttctgctaaagaggatactatgaaattaggtgatgatgacctagttgcttccattgttgatgaaccaaataaatcttcattggtggatcctgcacataagaagaattctgctaatgctgatgtctctggggaacacccatccaactttattactaatatcctgagatccacttttgaagcagttgaccactttctgggtaaagaagacatgggttcgtttgctgaagcaggaaatcctgtgatggcactggctgcgtttcttgcttctcttgtggaacgtgatgatgctgtttcttcatgttgtagttcgttgagagctatatcagagatgtctcctgctctccaactggcaactgaacactgttttattcttccagatccaccaagtgacctcaaagatccggcttccactttcagcccttgcgcaggcggtgagagccaagaaggtgctgatactactcaaaatgtgaatgataccgataaaaacaacagcgaaagggaagatagtgatttagctctggagaaggagagtgctacattcacctcacagaagcagcacctggaagaattatctgacgcaaaggaaacatttattggaggtcctgaggcagaggccaaatccaacagcacaaaggattctgacaatccaattgctaaggtggggagcagtgtagcatctgacaagatgagagatgggtgcaatgctaatgccattccgtgtcctgctacttcaaatcatacaactgaacccagctccgtagcttcccaggaagccagtccagcaagtacaaaagacacagctatccctgaacaagttgaaagaccaagttctgaggaattactagctgatgtttcacttccacaagggaaggtagagccgaagaagactgaacctgcacctgctgcctcgtctagtatccaacagcatgggtgcaaacaagctggaaatggcaacactgaacctaaaagcaaggaaaacgctgcggccgatgatgaccccataacaaggctacagcgagcggccggtactgccatttcggcagctgcagtgaaggccaagttccttgtggagcaggaggagggttacattcggcagctagctgcacttgtgatcgaaaagcagtttcagaagatggaaacaaaaatgtcgtttctcaccgaagttggaaacctggtgttacgatcgagagatttgacagagaggatgcggaagaagcttttgttggagcggagcatgataatcgcttctcgaatgggtgcagcagcggcttccagaacaatccagcacggggctccggtgaccaccagactcccagtagggcatgtgcatgccttgaatccgcagctgaggcgcccttgaagctttttatagtatgtatatgatcagtaagactggcctatgtaggaggtgtgctaatccgcctctgtataaaatgcagtgtactgtagacgcgtctagggttctggagtcagtaggctttgatgctcaccacaccacacgacttggcttttcttttccttttcgtttaaccaagagttttcttctttgatgtcttacctcgccaccgccatacaatgacatgtgtttgaactcgttaactcgtggtcagtcaagctcaaacaatggataggaggtcagttaagcttaaacaatggacatacataaaaaggtttgatgctaagttacacaaaatattagggtaacattgtttttttcgtctcctgcaatggtgttgtacggtggtatttatagctaaccgagggtta

SEQ ID NO: 33415 - DNA, 1627 bp, Zea Mays
cgcccttcccttggctacctctgtctgtctgtgtcttgtccagtccgggtctccagggctccggcaccggcaggcagagagctaccaaaccccaccaccacgaacggccgccgccgacgagacgggggcgcatggcgactgcatcctccttcaccgccatcttcttcagcagcgccttcgcggcctgcttcgcggagccaaagtgcggctccagctgcaaaggaaggcaccactaccgtcgccaccagtggctgcagcagctgctgctggaggcacgctagccacaatcatgtgcatcgccagggaggaaggggttgccgcgctctggaagggcgtcatccccggcctccaccgtcagttcctctatggcggcctccgcatcggcttgtatgagcctgtgaaggctttcttcgtcggaggcgctgttgtgggtgatgtcagtttactaagcaagatccttgctgcacttaccacaggtgtgatagcgattgttgtggcaaatccaactgatcttgtcaaagttaggttgcaagctgatggaaaagctaacactatcaagaggagttattctggagcccttaatgcatacgctacaataatcagacaggaaggtattggagctttgtggactggccttggtccaaatgtcgcacgcaatgccataattaacgctgccgagttggccagctatgatcagttcaaacagatgtttctaaaacttcctgggtttactgataacgtttttacgcatcttttagctggacttggtgctgggttttttgctgtttgcattggctctccggtggatgtggtgaaatcaagaatgatgggtgattcaacgtacagaagtactcttgactgttttaccaagacattaaagaatgatctgcagcagtccaaacagtcggctttaatccgaagcgtattgtgctttgaccattaattcagttgaaaagttggttacaggtcactacacaaatgactgccacactacagtttatattttgagctttagacttgagccttttaagttgcaagaacatttctacattttcatgattgaggcctggaattgcaatgctcagaaaatgtgcattcagctgggtcataatctaagacaaggaatattatcatggacctggtgctttctacaagggattcattgcaaacttttgtcggattgggtcatggaatgtgataatgttcttaactctggaacaggtcaaaagattctttctatgaagagatgtctgcactgcaagtagggattgtgtgggacaagggtatgctgatatatatgggcggcataattgcatgattatttgaagctacaggtttgtcaaccaacagaaagcagccatatatgccatactgccacctacgtctggctcttagattacatatgacaatatgttctcatgttgcattttgattattatgtggcgatgctgtaatatttttgtatcacaaattgatcatacagaccactgtgttggtatattgtagagagcgacactgttcactacttcactgcaagttgacgttcatgccgaaacacttatgaagtttacacatccatatgcatatttgcttagaaatcgaagaatgatcgatgcacccatccata

SEQ ID NO: 33416 - DNA, 1876 bp, Zea Mays
ttaaccctaaccttaactttacttgtcctcttgttcctccgcatctcttgccatccgctggagaagagtcaatcgcggcggccccgttcaatggtctcacgacggctaccgtgaacacgacgacgcacccgcgcgagatggcgacctcctcggcgtctatctatggcttggttgctggcgaggctagtggcgatcttgttgccctccctcaggcgggtgagtcttgcggcgggcgcaaacacagcgggtgagctaatggcagccaatgcaaccggttaagggcacacgtccggcaatggcgccccgtactgtagtgcctatagtggtcagcgccaagccctatcagtaggccatgtgcacaccagtaccgcggtgcctgctgcatgctcctgcgcccaacgccaaaggaaaaaaaaggaatacggtctactactagagtagtagttctccattcatcactttgcactttgcagtcgatctcagccagccatcctcctgcagtcctgctatcgtcaccctgcaggctctttcttgattccgaggtctggataaatcttggatctggagcccagactcgctctcatgaactcagactacaccaccaacaagggcgccaacgggcggccgcatggcaagaagaatcaagcgttggctcggcccaaggcgacgccgtccaagtgggacgacgcgcagaaatggcttgtgggcatgtcgaacggccacgcggacggaacccacggtgccagagtcaagcctaggagctctaacgccgacgacaggcgcctcctcggctcggcctcgcagaacggccgcgtgtcctgcagcagcgtggatggcgccttggagtacagcatggtggtggccgcgccctcgacaccgccgcaggccgccgagggcggcggcgacatggaggaaaccaagaagatcgactgcatggtgcagctgcatgactcgccccaagcggtgatgcggtccgtgtgcctgcgggacatggggacggaaatgacccccatcgccagcaaggagccgtccaggacacccacgccccggcgcgcctgcacgcccgttgcgctgagcccgatggcctcaaggtcgtccaccccggtgagaagacgccaggaagggcccgtgggcgtgaccacggccattgtagcagggacgctgaccgagcaggtagcggcagcagacgaggtcgcttgcgtcggggacgagcgccccgtggctggtcatgtgcccagcgtgaactctctggagtctcgcgcggcagcctgggatgaggctgaacgggccaagttcatggcgaggtataaacgtgaagaggtaaagatacaggcctgggagaaccatgagaagagaaaagccgagacaaagatgaagaaaatgcagatgaaggctgatcagatgaaagcacggggccaagaggagctgtccaaccggctggccaccacgcgtcggatggctgaggagaagcgggcgagcgctgaggcgaagctcaatgagcgtgcggccaggacatcggagaaggccaactacatcaggaggactgggcacctgccgtcctccttcaagatttcttgcttgtgcggctcgagctttgagtaacagaataacaattattagtccaaataatacaatgaagatagtccaactcaacttcaaattcttcctcttcaacatggtgcttctcattcttctacctgaacgatgacaaatatgtggtctctatttttctcttatgatggatttattaaattttgtgcagttgagaataaacaatatacccccgatggtctagccaaaatacgcctgaattgtacatgttaattatgctacaatttgaatacttatgtagtgaaactctacaatacaatctaca

SEQ ID NO: 33417 - DNA, 2998 bp, Zea Mays
ttttcgagccactccaggactcaacagcagaggagagtgttcactgccggtcgccgtcgctgatggcgatcccccgtcgcctatcttgccttcccacggttgccgcggccaccaagtggtcggccgggaatctcgccatagacatcggcacaatcggcgcgagaccctcaacggcagccctggctgccgccgcgacggcggccgccgccgccggccgcgcctcggagtgccagtccctcctcctccgcatgtcgcgccgccgcggcgcctctcgacgcgagatcgtctcttccctcctcgcctcgtcccccactccgcagccgcaggtgttcgacctcctcatccgcacctacacccagtcgcggaagccccgggaggcctttgaggccttccgcctcctcctcgaccaccgcgtccccgtcccagcctctgcgtccaacgctctccttgccgtgctctcccgcgccgggtggcctcacctcgcccaggaggcctaccgcctcgtcctctcgtctgactcggagattccgtgctggagatgtggatgcagcgatcgcattggttgattccatggccaatagggggttgaagcctgggattgtgacatacaattcggttttgaaggggttgtgtaagcacagaaggtttgataaggcaaaggaggtgttcaggacaatggaccagtgcagtgttgcaccagatgttcggagtttcaatattttgatcggaggattttgtagggttggggaggttaaggaggcagtgaagttttacaaggagatgcaacatcgttatgttacaccagatgtggtcagctttagctgtttgattggattattctcgaggagaggggagatggaccatgcaggggcatacttgagggaaatgaaggggcttggattggtgcctgatggtgtgatttacacaatggtcataggtgggttttgtagggctggatcaatgtcagaggctctaagagttagggatgagatggttggctttggatgtctgccagatgtggtaacatacaataccctgttgaatgggctctgtaagcagcacaggttgcttgacgcggagaaacttttgaatgagatggaggagagaggggttacaccagatttatgcactttcacaactttgattcatgggtactgtaggcaaggtaactttgagaatgcattgcaattgtttgacacactgttgcgccagcgtttgaggccagatgtcgtgacatacaatagtttgattgatgggatgtgcagaaaaggtgatctggccaaagctaatgagctatgggatgatatgcatgctcgagaaatcttacccaatcacattacctacagtatcctaatagacagccactgtgagaagggacaagttgaggatgcattcggttttctggatgaaatggtcaagaagggaaatttgcctaatatcaggacctataattccatcatcaagggttattgccgatcaggtaatgtaaaaaaggggcagcagtttttgcaaaagatgaggcaagataacgtattcccagatctgattactttcaacaccctgatccatggttatataaaagaagaaaacatgcatggagctttcaatgtgtttaatataatggagaaggaaatggtacggccagatgctgtcacgtataatatgatcataaatgggttttctgaacaaggcaatatgcaagatgctggtcgtgttttcaagggaatgggtgacagtggaattgaaccggatagatatacatacatgtcattgataaatggtcatgttacagctggcaactcgaagcaggcgttccaacttcatgacgagatgatccatagagggtttgctcccgatgacaaattttgaggcttgtcagttctgacctattggacataagcaagagaaatgcatgtgttgtgtgtttgacagtgtctttgaaaatcacacctccagaaatttgtgatttcgaagcgtcgaaggtccagaaaaaaaggggagattgttaaaattccattacttgggagtgaccgcacgaactatggtaatgttggcatgttgctccaactatgttctaaagattccatggcgtggctaagcaaaactgctgcacaaaaaggaaacagaatttgactggacgtctgaatatcttcccttcagtctgagctccagaccagagtgcaaaaagaaacattgaaccaatggaaaaaatgaataaaagaacaatcagtaactacagtgcatgtctgaagattctcatgggcgtgggcatcttcctccaggattgttgggatcaaatgtgcagccagacgctccaggcatcgaggatgtcagggacaccgagcttcctcgttgtggctgtgatttctctctcaggacacggaatgcagcgatggtagtggcttgtgccgccagggccaggcagattatgagaaccagaggtagaacttggtttctttggaacatcgtggtatcttgtgaacttcagtatcgagtgagatgcgaagctaggatttgaggctattatatattaagtttatggtctgcgtgttggtttccttggcgatcacggtttttacgcgttctcccatgtggacgagtattcacaaggttgaccgcatgtatacagagtcgctcaactcgtcgtgaacaagttcacagaaggatctctattgcacaagcacaatgtatttcagaagtagaaataagaccattggttactgtgtcgcaatgtcttccttaggaaaaaataatccacagcaataccacaaaacttctgcgtcagttctgtcatctttcattggagcatccctgatccgtgcctcgcaaggttctacaaatgtcaacctcatttcgttgcaggttcacaactataattttatagttttacctgaccgaccaggctcacgtgagactgggtgtgcggacacagtaaaccaatcaggcgcaatataaatctaaattatttaaaaatatttctaatttaaataacaaataa

SEQ ID NO: 33418 - DNA, 1247 bp, Zea Mays
cgagtactgatctctctctctctcctacctgctccccggtcccttctctttctacaactccaatccaccatccgatatatatccccttccggccacttctgttttccctcaatccccttccaaatcttcattgcacatctcatagtgtgttcagctgtctccttccccgctggcctgctctctctgctgctccaccatgaggcaagtagggagcccattggacctgaacaacttgccggaggagtacggcaagcaagcggtagagagctccacgaccaccgccacatcaagctcccatgcagttaggacagggataaagaagaagggcgatggagggaaagacgatgctgcaaaggtgtatgagtgccggttttgctccctcaagttcggcaagtctcaagcgcttggcggccatatgaaccgccatcgacaagagagggagactgaaaccctcaaccgtgcccggcaactcgtcttcggcaacgagagcctcgccgccatcggggcgcaagcgcagatgacgatgactttcagggatgtaaatatggctggcgctgccccaccgaccgtattgggaggaaacttccggggaggcgccagcgccaccggtggcagcagcgtcggcgacccgtgtctcccgttccggccggtgcatccggggctatcgtcgcagccttcgtaccattacctctacacggcgccatccacactgcacccgatgagctacccgccggcgacgtacccgggccctcctcgtcagcctgcggtcggcgactatgtcatcggtcacgcagtctccgccggtggcggtgacgcactgatgcagtcgacgcaccgcagcagcttctcttgcttcggagctccactcaccgctccgccggcagcagcggcggcgggggctgctgctgctgctatgaacgtgcaggccgacaagcttaactgcaactgcagcttcggctgcggtggccacagcagaaataataacgtgaatgcgtccacttgagcagatgcggaccgcacgctgtggttaatgcatgcaattaagtcagtgtaaagagccaagaaattaaattagatgatgcgtgttttcgacattaaagacagaagtgttctgaggatctacttctatatgaatgcctgcaatggatccctgaatctaaactaaaaatcttcagttttgcatgaattgttggttttggtactcacatagtacagaacatatatttcacaacggatgtttgcaaaaa

SEQ ID NO: 33419 - DNA, 2367 bp, Zea Mays
atgattctggcaaaaatgtgctgcaagtatttctaagtccaccaagtaaaaaagaacatagacttgcagcatacgttctgccctacatattctcaatcgcttcagtcagtcagtcttactagtagccagccattggcttcattttttagccaaagacaaacaggaggagggaggagggatggttctccttcgtccctggcacatcctcttcttcctcacatgcttctccccatcctttgttcatcctatggaaccaggcacctaccgttgctccaatgtttccatcccatatccttttggcgttgctgcacggggtatagcggtggctgtgcttccttttgctctagcggaaatagcatcatcgacggctcatgctctggtgtggcttgctgccaagcgcctgttcccaaagggctaaagaagctggacttagagttcagtaatattaatataaccaacagcggcatcgattacgggccatgtggtcaggccttcatcgtggagcagaattcatatgtgttttcacttcctgatctgaactacacagttgacacaaaacctcaataccgacatgttgtgctcgagtggtctgtgaacggcagcagctgtgaagaggcgaaactgtccggatcatacgcctgcgcagagaatgcctactgctacaactcatcaaacggaatcggttaccgctgcaattgctccagtggattcgaggggaacccatacctgcaagggccaaatggatgcacagatattaatgaatgcatcaccagaaatccgtgcaccaataggtgctcaaacacaataggtggtttccagtgcacgtgcccagcagggatgagcggcgacggcctcaaggaaggaagtggttgcaatggagtaagcacactagtgattgcaatagttgcaggattagctctgctagtgcttctcctcatccttggcttctggactcactggcttgttaagaagaggaaacttgcaaagacaaggcaaaggtacttcatgcaaaatggtggcctgatgctgaagcagcagatgttttctgaggaggcgccgctgcacatattcacctccagtgagcttgacaaggctaccagcaacttcagtgatgacaatattgtcggcagaggagggtttgggactgtgtacagaggcattctgtccaatcaagtggttgtggcgatcaagaaggcgcagcgagttgatcaaacccagacggaacaattcatcaacgagatgatcattctttcacaggcgaaccacaaaaacgtggtccagctattaggctgctgtctcgagactgaggttcccttattggtctatgagttcatcaccaacggggcccttttccaccatcttcacaatacgtcggtccccatgtcatgggagagccgtctaagcatcgcggttgagactgcgtcggcacttgcatacttgcacttagctgcaaagatgccaattattcacagagatgtcaagtcgtccaacatactcctagatgacaacttcactgccaaggtgtccgatttcggtgcctcaaggccaataccgcacaaccagacccatgtgacaacattggtgcaagggacactagggtacatggaccctgagtacttccagacaagccaactgactgagaagagtgatgtgtacagctttggcgtcgtactcatcgagctactgacaagaaagaagcctatcatggatgatatcgcggaagacattagaagcctagcgctgcaatttagtatgctattccatggaaataagctgttggaaatcgttgatcctgtagtagctgaagaagctggagtcagacatgttgaaacggtttcgaagttggcgttacgatgcttaaggttgaaaggggaagaacgcccaaggatgatagatgttgcgattgaacttgaagcactgagaaggctgatgaaacaacacttcatcttgaagaacgagtctttgcttcaggagtcatgttgcaatgaagaaatgagcatcgacgcaccatcaagtttgttccttggcgttgatggcatttctgacgatgaaggcatggagatcattccacttacatgtccatccaaaattctcacatcctatccctaactcgcaactatcacaaataaaaaggattttagctgacttctaccttctcaattgccaattccgtcttagtaatctcttcgtcttatgattagcttccaacgtaactacccggttaatggaatatgactgagttatttggcttatcgtcattcagctatgttctctttttgttcctcttgcagttcaaaaggcgatggtagtttcgctatgttggtatctctactgtatcgactgtcaacaaagaaatcaagacacata

SEQ ID NO: 33420 - DNA, 3661 bp, Zea Mays
actccagttcccacacggcggcggccgcgcccgccatttactccgctccggcgtactcctcccactcctgagctgtcgctgacactgacagcaacccccattgactcccgacatccacagccgcacttactcacgtgccaccgacactccggtcccaccctatgaaccccctcccaccgccaccagggccccgccgcgttcccaccctactacctgtcaccgcggccgtcgtctcccccgtcctattcacgaattccgaattccactgcgctgcgcttctgctccccccttctctctccctccgtgttcgctccctcggatcccacgcggctgcgggctgcggcgggggcggcgtccgaggcttagggtttagcgtttggaggagtttaggggtttgtgaggaggaagaggaggaggaggaggaggaggaggagcggatggggacagcggggaagggcgcgtgggtggtgccggcgccggcgtacagggaggtggaggggtgggagggcgcgggggacgacgcgccgggcttcaggtgcgcccactcgctcaccgccgtcgcgcctaccaagggccacggcccgcggctcatcctcttcggcggcgccaccgccatcgagaccggcgcatcttcgggcctccccggcatcaggctcgcgggggtgacgaactcggtgcactcgtacgacgtggagacgcgcaggtggacgaggttacatcctgctggagagcctccgtctccgagggccgcgcatgctgcagctgcagtgggcaccatggttgttttccagggtggaattggaccagcagggcactccacagacgatctctatgtccttgacctcacaaacgacaagtttaaatggcacagggttgttgttcaaggggcggggcctggtcctcgctatggtcactgcatggatttggtagctcaacggtatcttgttactgtctcaggaaatgacggaaagcgggccttgtcagatgcttgggcattggacacagcacagaaaccatataggtggcagaaacttaaccctgaaggtgatagaccttcagcaagaatgtatgctaccgccagtacacgctctgatggcatgcttttactttgtggtggaagggatgcttctggaatgccactgtctgatgcctatgggctactaatgcatacaaatggccagtgggaatggactctagccccaggggtatctccatctcctagatatcagcatgcagccgtttttgttggtgctcggttgcatgttactggaggtgtccttagaggaggcagagctattgaaggagagggcgcaatagcagatatcctcctcgatgatttcctggttgctgagaatgcacccttccaatcagaaatcacttcgtctatgtacaatgttgatagagtccctaggggggaaactcaaaatagaaacaataattttcattcagattcacctgtccatcaatctacaaataacaggcaagaggcagcttctggtttcagtgcggacaagaagtcaattgacatgttgatagaggcctcaactgcggaagctgaagctgtcagcgctgtatggcgagctgctaaggaagcatctgcagcgtcttcggaagacagtctttcggagggaataggatcagaatccccattgagtgaaacttcaccaatgcctgaagatttcgatgatggggggtctctagaaccagatgtgaaactacattctagagcagttgtggttgctaaagaagcagtaggagatttaggatgcttggtcaggcagctctcactggatcagtttgagaatgaaagcagacggatgcatccttcaaacaatgaccaatcttatccaggccggagaacattaaatagacaacgatcaccacaaggtttgcataagaaggttatttcgttcttacttaagccaagaaattggagagctcctgctgatagaacattttttctggattcttacgaagttggcgagctatgctacgctgccgagcagatttttatgcaagaaccaactgttttacaattaaaagcaccaattaaagtatttggtgatcttcatgggcagtttggggacttaatgcgcctttttgatgagtatggttttccgtcaactgctggtgacataacgtatattgattatctcttcttgggagactatgttgaccgaggtcagcacagcttagagacaatagctttgcttcttgctcttaaaatcgagtaccctgaaaatgtacacttgatcagaggaaatcatgaagctgctgacatcaatgccctttttggcttccgccttgaatgcattgagagaatgggtgaaagtgatggaatatgggcttggacaagattcaatcaactgttcaattatctcccactcgctgccatgatagaaaagaaaataatctgcatgcatggaggcataggaaggtcaataaacacagtggagcaaattgagaaacttgagaggcctatcacaatggatgttggttccattgtcctcatggacctgctatggtctgatcctacagaaaatgatagtgtggagggtttgagacctaatgcacgagggcccggcttagtgacatttgggcctgatcgagtaacagaattctgtaaacgaaacaaattgcagttgatcataagagcccatgagtgtgttatggatgggtttgagcgtttcgctcatggacaattgatcactttattttcagcaacaaattactgtggtactgcgaacaacgcaggggccatacttgttgtcggcaggggcttagttatcgtgccaaagttaattcatccacttccacctcctgttaattcacctgagtcctcccccgaacgtggggatgccacatggatgcaggagcttaacattcagcggccacctactccaaccagagggcggccacaagctgccggtgataggaattctcttgcttacatatgatacttgacacgacagagccacctccatctgctggatatgtttgtttgtaatcagaaatttctttaccagtttcaaggtacatatggtatagccaagaagaacaatcaaccaacaggacatcatggatacacttgtgatcagttccctggtaatcctttgtgatgcatcggttttaactgtagttgtgtgctaccgtgacttcagctcctaactggggagctgcataatcagcatttcagatctcaagcaacattgtatgattgcgataccagtggacaataatcaagtctgatgtagttgtaatagctaatctgtaatttcagtgtacatggatagattgttctttcgtcagagtaggaaggtttccaaatgtttgcatactatgcatgctgcagcctgggacgcggtttaaacaggacagctatacaagttgccagatctgagctagattgggcagagaagatttgaaccattttatttgctctccgcggagcgcgaatgtaagaggttgtgttgtgttgtgaaatactgaattcgttataggtatttgtgcaataaattaagttttgcttaaatcagtgaatgctttggtttagtgacctgagttacaacgacaacaaagccctttagttagagatggcaacaagtacataccttatgggtattgtcatcctatgcccgtacgtgcgggttgcatattaccg

SEQ ID NO: 33421 - DNA, 190 bp, Zea Mays
atgaatcatcattattgaaacccaaaaggatagactaaattcctttaaattagtgcacacatacagttgatgtcaaagttatatgcactattgaacattttatattgcaaggaatttaacctatactatggtacatcccattaaggatagaatactaaaacaactgaaggagaggaagttttcatacctt

SEQ ID NO: 33422 - DNA, 1966 bp, Zea Mays
aagaacgcttgttagttactaatgtgaagtcgtcatgagagcggttaaaaagatgaagacacaatctgagtcatcacttctatcaaactttcggtctcagagaggagaaaggattctggaagttgatggtacattgacaacacaaccagtacttgaacatgtgggtatttcaacgtggccaggaagattaatactcacagatcatgccctttactttgaagctcttcgggttgttacctatgataagcccaaagtttatgagcttgcagaagatttaaagcaggttgttaaacctgagctgactggtccatgggggtcacgtctctttgacaaagccgttatgtacaaatcaacaaccttaacctgtgatcatagaatttccggagttagctggccattctcgccgagattattggctggccattatatcagaagtactttatgcccatagatttgttaggaagtttgatataagcggaattgacaaagaggaaacaattctgaaagcagtacttggtattatgaggttacaagccattgaagagttacattttgaagttccaaatcgttatgaatctcttttgttgttcagccaatgtgacaaacttcctggaggtgatgttatacttgaaacattagccagttctatagcatcaagaacttcagatcgaactaaccaacctggcacaagtagaggaatgcatgctgtcctgtcaaacctgggcatggtatcaccagttaatagtggtgagcgtttgtttgttggtgagattgttgttggggaaattagtgccttgcagaaggctgttactgattcaatgaacaactataagaaagttgaactggcccaagcgtcggttgatggagtcaaagttgatggtcttgatacaaacttagcagtaatgaaggtaaactactaaaccctaaacaatcattttcgcctttcatttatttactttagattgtgttgtgctgtcacttagttcctgtaaagcaggctctcgtttcattctgtttcctgtttcttctatttaatccttaaacatgctcaggaattgttatccccggtaagtgagctttggagggttttgctattgctcacatcatgggacgagcctatgaagtccatgttgttttgcttcctattctcttatattatcatcagggggtgggtaatctattttattgtcacggtactattgttttcagcaacttttatgtttctcacaagattaactaatcaaggaaagcaaatgagtgaggtaaaggtggtatccccacctccactgaacacaatggagcagctcctagctgttcaaaatgccatttctaaaattgaggagcttgtccaagatgcaaatattgttcttctgaagataagagctctattgttggcttttccatcccaggcgacggacagggctattctggcattggtactgatggccctgagccttgccatcgttcccacaaaagtgcttctgctgctggtgtttctggaggtatccacgaacaactcaccactacgaagagcaagcacagaaaggtgtaccagaaggttgagagagtggtggttcagcatacctgcagctccagtggtggtggagaaagagaaagaggacaagaaaactagatgatacatccaatgtaatctttatgttgcttggctgatacgttgtgtaacgtatcagccaatgcccacctttgtacaaagaccgcaatatcaacaacgaggggcagtttcaatgaagatttcatctcacttgtaccacctgccctgtttacatggctcttgatgctttgttgcaagttgactagagctgaggccggtgtcaatcgccgctaataacacaaatccctttctctgggttggacatatcgccgtgcggacctgcgccccttcgtttgtaacatgaacagtattgattcttcgatattatgggattgcttctctaatagactatgt

SEQ ID NO: 33423 - DNA, 1488 bp, Zea Mays
tcttcatgtgtttcccacgaatttggaccacaaacaccagcctaccctgtagaaatatatgggcactcaaatagtaagggaacaaacgagtggtagcctcactgccattgttgtggacgaaaatctatgccatgccagggctgcaagctgcatgcttgccaacctccagtgtaaagtgattgtgtatgcgagtcctgttgatgcgctcaagtttcttaaggatcaccaaagagatactgattttgcgttagtggaagtcaacatgaaagagatgcatggttttcagttccttgacatgtccaggaagttgcacaaaagccttcaagtgatcatgatgtcagctgatacgacatggcccacgatgaagagaagtgtcgagcttggtgcacgtttcttgattaaaaagcctcttgatgcaaatacgatgaataacctgtggcagcatcttgacctaaaatttcaacggaccgacaagatcaaggccttattcccaggtattgaagggaaaacggggaatgcatttgaggaagggaccaacaagcagaagggaactcacctgatgtggactccattcctgcagaggaagtttttgcaagctgttgaactacttggggaagaagatacagttgctcatgaatgtgaactccgttagtcgcaaacagatctctgctcatcttcagaaacaccgaaagaaggtcgagaaagaactacgtaattcaaatgcaaacaactccagccatggcattggcggcgcctcgaattcacggccttcgaggatttttgaaataagccatggcagattccagtacaatcgtcccgacgtccaaccagaacatagatctgatgaatccgtatccgtggagcagacagaaaccatcgaggaaacacaaagcaacaggttgtatgaagcgatgcgaagagccttgcagcttgggagtgttttcgaggaaccacagttgcccaatgatcctcctgctggtaaagatgcaagagaagttgaagaagtcgaaatgacgatgagggatggtaattatcgagatgctggcacagatgcatttggtgataagaatgaggcatctggaactcacagttcagatggtaataacgcgaaggtcaagagcaaggatgattctgctgacaagctggtttcttgtcacgatgagctgcgaccagttgtgacgcttgtgacctattcagactcggaagatggtgaaacgctctaggttaactgagcaacggattgcgtaggtggaggtacttgtaaactgccagcagaaatgatgccagcatgaatggatgcccatgaatagacagtttttgtatcttcttaataactaagttcagtacatcaagcgtatacaaagtcttgcctaacttttggcttctattgaagacacaaacccacttcaaggaaaagaaaagaaaaacaccaaacacgctctagtggccttcgatccaaagactagaccgtcatccatgtgcctggaa

SEQ ID NO: 33424 - DNA, 1822 bp, Zea Mays
ggggctaacctccgagcggcgaggatgaggggcggcggcaggatgattgacgatgaagagcgggtgggccacgcggagatcccgaccagcttcggccccgagctgcgcgcctgcctccgatgccgcctcgtcaagacctacgactaggaacccttctccgctggcgccgctcccctcccccctcctcacgcctaggcctgcggtctaggttcaccagccttccgttgaagggacggttcgaggactgggggtttcgtttctcctggtgcggtccgttctcggcggcggctaagaattatctctttgatggaccccagtaggagttgggcagctcgttggttgagaattggtgacccttgttctcgtgtatcctgcagtttgtttgcctcttcaatctagtaggttcattccgggttgctacacacttgctgtttcggaggaacttcaagaagagtatcaggggatttgccaagacaacaacgtgtagtatgtgccacccaagcgatgtctagagctcctgaagcagtatgaataatttagcttatataaaatggtgcatgtgcttgttgccaagcgaactgccctgctttgttgtatctgagtgctaatcaggacccctaattaaccctttcgtgctacgaatgggttttttagccaagatggcataaaacattagcacaaatgtcagacacatgaccaagacaagttcataggccagcaattctgttcaacaaacacctcgtcttcgtcgtacacggatgtggataccaatttgcagattgcgagccacgagcccatctaccagtagcctctccagtgtccatactgagaaatttatcgcaccagcaccactgtcacaatacaatggtacaggtactgcaccgtgcacgtgcccacaagctttcgacatctgcgtgtcagcatcggttatcatcaatcaccaagaatgactggaccgtggcgcgctggtcctctgcgctggtcctccgggaggtcagatgatacgggcgtaacttatctaagaacaatcaaataaataatttaattcggctgagcacaaagtaacatttgacccgattaataatccaacagtcaatgtttaccagtactttaaagagaagaacacagcactaccaaatgctgaagtaattcacacaaacagatcaaaagctagtcttacaaaaccatcggtagttacacagcttgatcggtcgacggactccacaaatgacacggtacgaagtctttgcggcaaatcatcagcattcagatccaggtcaatcgaccagtcagcgattctgttgctagaacctctcccacgccttctattgctgaagaagggtaacgagcaccaaaaaatacaaatactcgcatgcggcatgcaatcatacctttcctactctagatgcattagtgcagtatttcatgcaaaacatgaaccattaacttgcaagcctacgtgggtatgttcaaagaacagttggggtagccagataaggatacccttttatgaccataagcatgtcaataaacttgaattgcgtcacaagtgtgtatacagctttaatactcacctgcttaagacatgcgcttatgcattctcgataagacatgtttggcaaaccgcagaaatgaattgacagcacatccagtgcatgcaacgattaattgtgcacatgcagaccttatgatccaaaaacccaaaacaggactatgatagatcagtgcagacacatctaaatccaaatactataatgggggttaacacctatagcatgtagatgcatggggcgatgcataaatcattggaatcttacttgtc

SEQ ID NO: 33425 - DNA, 2232 bp, Zea Mays
caaaggtgatagacctggtaaagaaagccagatatgtagatttgctggagtagctgctctgattagagagtcaccatatatgttgatcagctgtgtcaggatgaatctccatctcttcaatcagatccagaggtgcagtgcaatatcaggtagtggaagtgctgggaggagaaaaaatcttgtcttgcatctgattcggtcttgtagagaaacagaaatgaaatttcttgtcagaacactggttcgtaacttgcgtattggggctatgatgaagacgattttacctgcgcttgcacatgctgttgtttttgatagaaactgtgcagcagatcctgcggtgtcattggaaggcataaaatcacaactacagagtctttcaactgaagttgccgaggcatacaatgtcactcctaatctagatttgctcattccttctcttctgagagaaggcactgcattttcagcttcatccttggcaatggtgcctggcacacctattccacctatgcttgcaagaattactaacgggttgactcagtcgttgaaagctttccatggcagatcatttacttgtgagtacaagtatgatggtcagcgtgcccagattcacaaagcacttgatggatccgtgcgaatattttcaaggcaaatgaaagaatcaacttccagatttcctgatcttgtgaatatgattaaggagttgtgcaagcccgaagtgtcaagctttatactggatgccgaggtggtaggaattaacaggaagaaaggaaatgagttgatgtcgttccaagagctatcttcaagagaaagagggaataagcattcctcaatttcaatagagaacataaaggttgacatttgtgtgtttgtttttgacatcatgttccatgatggagagagactactggattgccctcttcggcaaagaagaaagtacattcatgacttgttccatgagaagccaggatattttgagttagctcagcagctaaatatagaagcctgcgaagcttcaccagacaattctagcactttggctaggatggacacgtttttcagaaatgcatgccagtcttcttgtgagggtataatgttaaagactttggatgtcgatgctggatactctgcttccaaacgctgtgattcatggttaaaggtcaagcgtgactatgtgcaaggcttaggtgatagccttgacttggttccgattggtgcatggtatggaaacggacgtaaagctgggtggtacagcccttttctcatggcatgctacaaccctgaaactgaagagttccaaagtgtatgtcgtgttatgtctggtttctcggatgagttctataaagagatgaaggagttctattcgggggaaaggatactgcccaagaagcctgtttactacaaaacagacgagcaaccagagctgtggttcaccgcagaacaaatctgggagatccgaggtgcagacctgacgttgtcccctgtccaccatgcggccattgggcttgtccatccatcgcgcggcatctcggtgaggatgccccggtacatccgttcagttccagaccggagcccagaggactgcggcacggccgccgatattgctagcatgttcaaagcccagacccggaagatggatgtcagcagcgagggccaggagtagtaggcaatgcaaagctcagcccatttcctcgtcctagctttgcttatgttcaccagttctgtatatacacagaacgaaccagggtgaagtgaaccaccctactgatcaaatggtgaaaactgaagcgtaggacaggcagcactgatcccactggctttcaatttttctttgtacagaaactgaatgcagttggaacgcggaaggaagcccacgagttgcacgttcggggggaaaaaaacaatgcataagtacatcaggtatcagcttgctttgtactacagcgcgattattgtaacgcccgtggccgccggcgagtcagccgttgacgtgagcacagatttggtgggaagcgccggcgaggattgcgtcggcctgtgcgcgttcgtgtttctgaatatctgaatcgatcgtctattacaagtctcaggcacttatgtgctgttacacggatacaagagggttaacgctaataactcgaatacgccgccctaattcgaagacgtcttcccgtagtacgccatctttactgttcagctggagcactcgttacacctccggagatgaagcttgag

SEQ ID NO: 33426 - DNA, 1033 bp, Zea Mays
catcaattcatcacggcatcacccccaatttcttctactccaccgaaacataaatctgtagccagcagaaagatcttgcggaaggtggcagacgcatagatgaggacgactaccggctgttctgtggagatctaggcaacgaagttaatgatgatgttctatccaaagcattctcacggtttccatccttcaacatggcaagggttgttagagataagaggactggcaagactaaaggttatggatttgtgagcttttcaaaccctactgacttggctgcagcaataaaagagatgaatggaaagtatgttgggaatcgccctattaaattgcgtaagagtaactggaaggagaggacagatgttgaggctctgcaaagacaaaagaatcatgtccaaaggaagcctaaaattcccaagaagagtgttcttcacaagtagagatatataggccctaccgagggtgaagggcagctcatggatgcgctgctgccttgggatgatgctacttctggaatgtcttcactctctgcactactggggggcggaaatcacgcaagggctgttgtttcatgcaaattgcaacgagctactgctgccatctgatgcaatttgtgctccgttttactgtttcccatagtttgcgttcatccatttgcggtgttggagtactgtcatggctactgactaaccaggccgagctgaacaagaaccaaatggaattttcagttttggtttcagcaagtaatagcatgacgtgttgtactatctatctcggttccagctcaaggttatgttcttgtccacggcatccacggccgccagcgtctaggaggccaggagggcctgcacgtacttgagctccagtcacttctccaccccttccccccatcacttccttaaggctctgcagctccagattaatttgatttgtattagcaatttatcctcctttttcaaaagaaagttgcaactgtactgtttctgtttcatgacaacactgcaacttaatgagttaatgacagaataaatta

SEQ ID NO: 33427 - DNA, 2022 bp, Zea Mays
gttatggtttccttggaggactcttcaactttactgaaaacagaatgtcccctctataaataaagattcaccaatggcaacctagcccaagacaccaaacacccatgcacacgcaacctatcaagatgaaaagaggcctcctggtactttggtccttgttctacttcagtgttgcaaacgctgacactagaaaccaggccaagcagcctcttgagttcaatcaattgagagtatcaaggaaatatgttcaaggaaaacaagattcaactcccaagaacggaaccagtccatcagtgcatagaggctcaacaagcaatcaacgggagcaggataagatcgtatgtatgcctgggcaaacaggggtagcagagtttgaccaatatgcaggatatgtgactgtggatgccaaggctggaagggctttgttctactattttgttgaggctcctcaagatccttcaaacaaacctcttgtcctatggctgaatggagggcctggctgttcatcctttggatctggggccatggttgaacttggacctttctctgttcatagtgacaacaagacactgtacaagaaaaggcatgcatggaacagaatggccaacatgttgttcattgagatcccagctggtgttggatactcatattcaaacactacatcagattactataacactggtcactatataccagaacttgcaaatctgattctctctaagaatagagccaccaatgtaactagtatcaagcttaaaggtgttgcgattggaaatgcagacttggatgataatttgactctaagagcatcatatgactactattggatgcatgctatgatttcgggaaaagcttataaagccgtcaaggataagtgcggctttaatgggacatacactgaagactgccaaaatgccatggacttagccacccaagaaaaaggaaatattgatgactatgacatctatgcaccaatatgccaagatgcctcaaacccttctaaatcaagtgactcgttagtgtttggtgatccatgcacaaaccactacgtctcctcttacctaaatcgtcctgaggtccaaagggcactccatgcaaacacaacagggttaggctacccatggatggactgtagtcagcagatatttgataattggaaagattcaccagagacaatgctgccatcaatcaagaaactcatttcaagtggcacgagaatatggctgtacagtggtgatatggatgcagtgtgctcattcatttcaacacaatatgtgctggacaatcttgggcttcctatagaagcagcttggcgtccatggcgcgtcgacaatgaggttgctggctacgtcattgggtataaagggctggtcttcgtgacggtcagaggagctgggcacatggtgccatactaccagcctcgcagggcattggcattattctcgtcattcctcgaaggggagctccctccacgctgatcgattaagctagcagggctggagttttggtagagtcaatgcgaagacagttcttgagaggaggaggcatgtatgcagaagatcgaccacatccacacttggtagccaaatgctgttgcacaaaagtgaacctcccttttgggaacttcaaaaacatggcatgcaagtcggttgtctgcttccattccattcacatttaacttagaaatgatactttagcagacactgttgttagttctacgtttttttttcttcttcaatttggtcgaaaaaaagttgtgcctgaacttcgtcgatcctctatatgcttgtgactagtcccttcaatctgaatagatgctggaaaacaaagggctctgagccccgcagcgatcatgggttttttttctctgaggaagaggaagctgtccttgattcgtgtttcagaaaacggcagaagcaagaattcaatctttagtctgcggtagtgacatgtacagtagactcgggaaagctaggcttccacatgtaggtgcgtcgtgctcgtgcatgtagtgcccgcttt

SEQ ID NO: 33428 - DNA, 1454 bp, Zea Mays
ctccatccagcttcacccatttcacctgcaatgcaagcgaacaacacaaattaagtagtggagtgtcagaacttgggaggcacaaattaagtacaaagcagtctaattaatgacgggcccgatggagattccggtgatcgatctcggcggcctcaacggcggcggcgaggagaggtcgcggaccttggcggagctccacgacgcctgcaaggactggggcttcttctgggtggagaaccacggcgtggacgcgccgctgatggacgaggtcaagcgcttcgtctacggccactacgaggagcacctggaggccaagttctacgcctccgccctcgccatggacctcgaggccgccaccagaggtgacactgatgagaagccctccgacgaggtggactgggagtccacctacttcatccagcaccaccccaagaccaacgtcgccgacttcccagagatcacgccgccgacacgagagacgctggacgcgtacgtcgcgcagatggtgtccctcgcggagcgtctggccgagtgcatgagcctcaacctgggcctccccggggcccacgtcgccgccaccttcgcgccgccgttcgtgggcaccaagttcgccatgtacccgtcctgcccgcgcccggagctggtgtggggcctgcgcgcgcacaccgacgccggcggcatcatcctgctcctccaggacgacgtcgtgggcggcctcgagttcctcagggccggcgcccactgggtccccgtcggccccaccaaggggggcaggctcttcgtcaacatcggggaccagatcgaggtcctcagcgccggcgcctaccggagcgtcctgcaccgcgtcgcggccggggaccagggccgccgcctgtccgtggccacgttctacaaccctggcaccgacgccgtggtcgcgccggcgccccgcagggatcaggacgccggcgccgcggcgtaccccggtccctacaggttcggggactacctcgactactaccagggcaccaagttcggcgacaaggacgccaggttccaggccgtcaagaagctgctcggctaagcgaacagctgcaagtaggcagaggcagcttagctcgtggactatgcatagtttcaagcttgctgcttgcttcttgttcgatccattgtctgcatgcgtactgttgcgtgtttaaatttagcaaatcttatacgtagtcgttactggtactacgtattctgtggttgacaatacattgttgcggtttaagggcgcatccgtttggtggacttgcacatgccattcgacaaaaaagttggctttccttgtcaattaatagtcaactagtacaatgacacgcaaatattcggtaagcacacatgtccacatgttgaaaaaacatctgcaagcttccgttcagtttacgtgaaaatcaaaggggttaccggatcaagaaaaaaaaatataaaac

SEQ ID NO: 33429 - DNA, 1521 bp, Zea Mays
aaaagattggctaacagtcatggagattagcatgctgcgagggctgcacacagcaacccaagttcccactcagggaccttccttcctgatacaggaaggcagggttcatgagcggcggcacgcctgcagcaagcagtagcctgcgggcagcactctcatactgtgtgaggcaagtccgtgcctatgactaccaccactacctctgccttctccacctggccccggccatgcgcaaggccgcgttcaccttccgcgccttcaacatcgagacagcaagggccatggatgtggtgtccgacccccggacatgcctcatgcgcctcctctggtggaaggaggcggtcgacaaggtctttggcaacaagctggtcgagcacccagttgcccaggcgctctcttcggtcatcgcagaccacaaggttagcaagcactggctgaagcggtccgtggaggcaaggatcaacgacgccaaccgtgaggaaggcaccattcctgggacgagcgcggagttggagaggtatgcggaggacacccagtccaccatcctttacatgaccctgcaggctggcggaatacagtccaccgtggctgaccacgccgcctctcacatcggcaaggccagcgggcttctgttactgctcaaggcgctgccgcaccatgtaaataagcaagggacggtacattatatcccagctaggctttgttcgtttcatccctaatccatggggattgagggggattagagtggattgagggggattttgacttataggggatttaatccctctcaatccccatggatttgataaaaacgaacagggccctagtgtggccgaggaatgcggcctgctcatcacacgggagggtggcaggtcggaggtcagggcgggcaagaggctgccagacgcagttttcaaggtcgcatctgttgcggaggctcacctgcacaaggcgcgggagttggcatcgtccgtgcccaaagaggcgatccccgtgctcctcccagccttgccggcccaggtcctcctggataccctgcgaaggtgtgagttcaacgtgtttgatcctcggctgtcgaggggagtccacggggtctctcctctgtggtaccagctgaagcttaactggaacgcgtggcgaagcaggtactaatgaggaggaactttttgccctcagccatgggagctgctgctgttccttgtagcaaaaagctttttattggggttttttgacatagcagagattgaataagatgagtagggtctgctacttgcggcagatttgaagctgttgaatatgtgtcgtgctttccgttgtgtttgtgggctgggctcatttacattgcacaattgcaacactgacaatgcctgtttttttttcttttggaacatacaatgcctgtttgtattcatacagcagaaagcagacactattttttcgataaacgcaattagttactctatagtctatacaattcctgttttcggttcagatgtcaaacttgtatgggcacctgaaact

SEQ ID NO: 33430 - DNA, 2004 bp, Zea Mays
gtggctaactctggcagtggaactgtcatgggcaatatcttcgaaacctacttatatgtttgctaaattgaaattaattaatagcaacaatttgatagctgggctgtcggcccaacctgacctaaattcctaagctaataagcccagtatgacaatcccagcccgtcccgcggcatcccaaaggtccaaatcattctccgaggagctgcggcgctgcggcgacggcggcagcgacggcgatgcggttgccatctgccgcctcggcgtcccgccttccctcttcccttttcttacaaccccgcgcaaggacaagatgcgtcccatcctcctccctcgcctgtcgggcatcttcttcatcagccgcgggcgctggtgacggcggctcgcggaagccgtggctcttcgtagggctgggtaaccccggaaaggtgtaccagggaactcgccacaacgttggattcgagatgatcgatgttatagcagaagctgagggtatatctctgagcagtatgcagttcaaggcaatggttggaaaaggccgcattggtgatgcatctattatgcttgccaagccacaaacctttatgaatgcaagcggtgagtctgtcgggcagctggtttcatatttcaagataccacttagtcaagtcgttgtgatgtatgatgatctggatttaccctttgcaaaactgcgtctgctgccaaagggtggccatggtgggcataatgggatgagaagcatcgtcaaccatttgaaacagagccgtgattttccacgcctaagaattggcattggacgaccgcccgggaagatggatcctgccaatttcgttctccggccttttaacaagaaagagcagcaagagcttgattttgcgttgcataggggcttggaggcggtgcggataatggtgccggaaggattcaacaagagcgcgacttacgtgaacactgcacaatcatctgaaatgctgaataggtgatgggccaataaactgccatatgcgatttaaatcccataccaaagggatttaatcgaggaagcagtcgcagcttcgcttgatgcatcgtttgttcggtggccatcccccctctcctggcaagaaagttctgacagctgaattacttgttagatcatactgtatgatctgagcaacttagggggtgtttggtttgagaaatcattccatctaagatgagatggtgcatcacgaatcaattcctcaaatttggtggaatgacctcattcctcatgttattactaactaattaactataaagaatgaggtggtgattgatcaactcattccattatacaaactaaacaaaaaaaaaaatctcaatggtaagatataaagttatatgattaattaaccctccaaactgtttttttttgttttttcgttccaggaattttattcctgagtctttcaactttgtttggtgaacatggtatggtgctaaaatctagacctaataccttgtagtactagttctggaggctcttttggttgtaggtcgaagtggatagagctgttccttgtactttatctgtttcatgtaatatgaataataaattatggtctaaatatttgaataaaaaatcgtttggaatgacccacacaggattgtgccgttctgcaacttggtgttctcttctgtatagttttcattgaccttaggcgattcatactgccaatacttgaagtaaaagatggaatttaacatgcagtatcattatctgttttgctgctttctggagtcacaagttaattatggtctaaatccatcatagctcaaaatgtacctgatgtttttgtaacggaaaagttctagccaaataccaaaaatgttattgtgcctcatgatcttttctagctttgctggatcgtcttagaagccaattatgtagtgatctgcttgagttgtttgctctagcctttccattaagtccatagcattggactgcacattagatttactccctgtgcaatttgttttagt

SEQ ID NO: 33431 - DNA, 249 bp, Zea Mays
atgcatctttgtcacacccgggtttaaggggcaaacccgaccacgaatcaaatgtgtgcatatttatgatgactcatggtacagaaacgaatgccgcatatttataatataataggagttctgtacaaaatagctaaataattacatcatacgaagacgacggtccagcaactatagctgactaggtgacgacgacctagacctctcacgaactcaacgtgacatcattcatgctcctcatcttatggt

SEQ ID NO: 33432 - DNA, 4571 bp, Zea Mays
atgggttcggtggtgtttgttcttggcgtgcgtgatttgggcgagtccggagctacccgcgagttctgcggacggttgaagaagacgcggtcctgggtggcccacgcgacaatgctgcgcgatgaagagctggcgcggcatggcaatgactggcgtccacacagtagcgggggtgcacggttctgcctgcctcaacgcccgcgctcctcaccaacgccgcaatcatcgcccacgcgcggatcccccacgatcctccccaccaccgccgccacaatcatcgctcacgcgcggatcccccatgatcctccctaccgtcgccgcaatcaacgcccacgcggatcctccccacgatccccaccccgcacacccccacccttccatcgccggccggaatcgatcgatccaaagctccctttagagctcgagctctatccaacccacgaacgggatcccgatgcccatggcggcctcggttcgtctcgccgcaccggctgcctcgcccccgctgacgtggtggaggtgggctcctcttctcgccgcgtcacatccacgggcgaacccgccgcctcccgcaccgcgcctgcgggcgcccgctctcttctccgggcctcccctgttccccgcgattccagcgccggagccatcgtccggaggacaccgtgtgcggcggcggcaataggtggaggtgtggaggcggagtccacggagcgggaggcgcccgatcgggatactctgaagcgggtggcgctgctcgcgcttggctgctgcactgcagccgccgctctcggcgtggcgcgggcagcggcgggggactccatcaaggcgtcaggattcaggctatgggtggcggagtcgctgcggaggctcggatggcccgatgacaccgtcgtgttcgcgctcgcaacgctgccggtgatcgagctgcggggggcgatcccgttgggtattggctgtggggcccatccccactgcccctctgtcgcaaaccccgcgcacgccgcctccactgcacacccccgccttccatcatcgggcctctgccgcaaaccccgcacacgtcgcctccaccgcacacctcgcccttccatcgtcgccaccgcgcactcaccctccacaccatcctcgccccaaatcgctcagcctaagcatagatggaagtccccccgcatccgctcccgcgcatcccgacatcagtggattgcggcagaggcccttcgtgcacgatctgtttccccctccacgcatggcggttccgcctccacctaccgtcgccccatccactcaaggccaattgcatccaaatgtcacgcaggccgcacgtcatcctcatccttgtggcgtcaacaaccatgtgcggcaagcagcggatgcggtagatgattgtttgcgtcccatatagctcaatatatgcctgcccccgatgccatctacatgcctagaggcgacggtcggacgggccaagtaggagccaaaaagaagcaagccccgtcgccgtcatggaaggaggaggccatcccacccacgctgacgaggagccaccaatagcaggtgccaccaccacccaaggagaaagccgcccaaggagacctttcatttcagattggagatgactcggcatgtttccatgatttcaattacactgtcccctagagagctggacaagcacactcctgggtaccaagctccagtgtatgttgaacaaccaaggcaacagcaggtgccaccaccacagcgccaaccacgcagaccaccagcacaattccagcagctagagtacgaagattcttatgcacggggtcgaggaagagggcgtgggcgtggaaggggctggggtagaggtggctacggtggctatggtggatatggaaacaaccaaggtggctatcatcagggtggtgggtattatgacaatcaaggtggttataatggctatgataatcaaggtggatatagtggctatgataatcaaagtggatatggtggtggatatggctataaacaaggcagatatgggaactatcaagaaaatggtggatataaccgagacccaggaagtggtatgcgaggaagatgcaattggggttaccaaggagcgcgaaccccttggtggccgcctccagctgcgcgaatgtgaactctccagggggtccttgaacgatgacgatggtcgtatatggttgccatatgatgttgccaattccattcctgaatgcagtagcattccgaattttccagctctatatggtaatcttcgaactgaagtcagaataaatgatctggcagacatgctccaaaggatcggggtgcggaagttgtctgggcatgacattgttaaaaatcacatcatggtgtccttgcgtaacggtttagatgctaatgtggctgatatagtgattagagagtatgtagtgaaagttgaaaaaactttatcccaagttgattctattctagcaggaggactttctctagctgatgtatctacaaaacaatgtacagtgtatgactgggagtcaccagaattatctagaattttatcaatattttcttcaaaaagatgcaaggaaaaatgtgtatatcttctggaagttcttgatagattctgggatgatcattatagggcaaaatctaggatcttcacagatgctacacattgtggtgaaaacagagcagttgaatcatcatttatgaagtgcattcaaagcttcaaatggatagcatcaagaatggatgaggatcttcattatgcaacagatttattctatgattgtgaaaatgtccgctctctttttggtagtgtggctccatatgttgtatcgcaggtatctagcagttcacttaagaaggccattggattcaaaacagaggtatcttactgtgatgcattgatggtcctgaagtcttggataacgtcaaaggttccctttagagcaagtatgagccagatgtggaaattctataccttattgtctgaaggcgtggcagacgcaaagattgacattaaacgggagttcatgtcgtctccctctatatttacaccactacagcgtcctcgggcaagtgagttcatgtcgtctccctcaatattgccactcaagtttctgtttacaagatcgacagttactcgtcagaatagccagaagtgctagcacttccttttgagtaatgacagtaactccatttatatttggtgaaaatgtttagcgtcacatgatctgtgttcttaggatattgaggtctaaatgactacttcaatctgtaatcagatttaatatgttgctgggttgatgagatgagaaaaaaatgtccactatactgtttagcaatattttcactctttaaatggcatgtaagtctgtgacaaagagctgcatgggaggattaatgtgattttaataatatcctcacccttcaagtgtcctgtgactaatagttgcacattaggattagccagacagtagtatgtgattaatggagacatttgccatgccagtttaattgtgcattactgaatacatgaacacaatagttattattcttgcaacacaatagctagctgttcactgaattgcatcttttgttctatgttgtcttcataggtggaagagactttgttaaaacgaactaaagtgtttctctgctcatattccagtgtttatttataacatgcctttgttttattattttggttttttaaatgtcatgcttatatcctggtttggatatccagtttaaagacatcccatctattggacgctccatcactagctgcaatagacaaaacttagaggcaattacttatctcaatcttacttctacatttatatttccctcttgtgttttaccttttgcttatatcctttgcgtgacataggagccatttccactatttcatctattaaaacaagtaagaaaatagaaaggcttggaagcaatggtgttccacccagaacaagccgactcaaggtatggcatggtcttgtcggcccctgtggcagcacatggccttcattgctagctgcactgatgtgagtagcgactttttgtctactctttgcaaaacagtgaggcaacgagtcaggaagcgcaccatggtcggatgaacgaagaagaaaaatctgttgcatggaatggatgtatgttattagattaaaataacaaaatttatgtatggatagaatcacaaatgaattctgaaacattttctcataacagtataacgcacacatgtacataagttatcgtgttgttatacggttccgttgcaacgtacgggcactcacctagtcatataatagagaataatctccaccttggatttttaacatattttttatgttatttttatattgtcataaaatgcactcataataaaaattccagcatgatgcataatttagtgtcatatatttttattaattgtttttaaaaggtggtgttcacatgtgatgacaaatggatggatacactcatataaatactcatataaataaaggaaaacacttttctgcttttaatatgatctctaacaaattaggtgttccacatactttggtggaaggctctcctttttt

SEQ ID NO: 33433 - DNA, 2218 bp, Zea Mays
  misc_feature (1)..(2): n is a, c, g, or t
nngaattccaagagttggtggaccaagaaggtgccatttttgaaaagtgtgtgaccgctggtggcactactgttgaagatcaagacaaggaaatggagcaatctgcaggtgacgaatcaagagaaaccgaggctgagaatgctgtggaatataacaagaaggtggatcaagaagataccattaacagacaaggtacagctaaggaagacagtggtgtggagccacaagaggagaacgttgtggatccagatcaaggtgtggatgacttttctgtactagatgagggtaatgtggtggcacagtgcaccagtgatcaattgagaacaaccatggaagataatgctgcagagatgcaagaggtggtggagcaagaaggtgccatttttgaaaagggtgtgacctcagatggcattactgttgaagatcaagacaaggaaatggaacaatctgcaggcgatgaatcaagagtgaccaagggtgagaatgctgtgaaagataaaaaggtgtatcaagaagatgccattgacaaacaaggtgcagctgaggatggcagcggtgtgaagtcacaagaggacaacatggtggttccaggtcaatgtacagatggccttcctgtactagatgagggtaatgtggtgccacagtacacaagtgatcaactgagaacaaccacagataacaatgctgcagttgatccagagttggtggagcaagaaggtgttgatagcatagtgggtgcagccaaggttggtattgctgtggaagaatcgcgagaggacatcatggtggaaaagcaagttgaaggtgttcttttacaagatcaagatgaggcagtggagcaatgcaccagtgatcaactgaggacaatcacagatggtaatgatgtggaagatcaagaggtgcacagagagaaggttggtctctctgaagggtacccacagaagcctggtaaactgaactgtcgtttttacatgtcaacagggaggtgctcatatgggtcatcgtgccacttcaatcatccacggctcaaagcaaaactagaagtttcaagtttcccttccgaacaaagaaatcatgaagctgaatttctggaactgaaccgtgttggcctccccattagagaaggagcaaggaagtgtatctattacatgcgtaatggtacatgcagatatggaaagaaatgttgttttaaccatccagagcaagttcttgatgttcaacgccacactgcaacaggatgggatgatactaacttgcaatcttcaccacactcaaagaagtcacctgaacataaaactatggatgacatatcgtctggatctgaggttcttcctccaaacatacttcggatgcttttacctccccagaatgtgccccctagtacaaaagaaaaggaaatcaggataaaaaagggagtgattgatggtactgactatggacatgattttgccacgaagtcacggaatgttctgcaggaactggcaatatatcctgaaaggcctgatgaacttgagtgttctcactacatgaagcatggctactgtaaatataagatgaactgcaaatttcatcatccaagagatcgtcttccaaagaaatagtctacagtgcaaaacaatattttaggtggccatatgagtgaacggttggacacaatcttaaggaaaaagaagaaaaaggcatctagcactcagtttattactctcttagtgtccttttcttggtataggtactgcatttcctgtttaccaggaccatttgctacaaccactgttgtaactggctgtcgttgatgagtggagcaagtactgatgatgggacagaaatgcaggaaggaagccatagtcttccttttttgaagagctcgattctactcatgtctatgtcgaatttctgccctagtgtcgttagagttctcgtaccagatgcgaactgcctggtggcttcccaactcccgttcattcatatactaccaaacattgctgtgatctagatctagcccgatgcggtgctaacctgagattgtgggttactgtagctcagtatgcagctcaggtacctgcacttgctcaagattgcgataatgatcagattaaaatagcaggccacgcatattctgcaacttgcgacttttacatcgttgttgagtctcctgggttcagcctctttattgtttttgtttgtgtgcgtgaccatgtgtgtcggactgtcggttgtc

SEQ ID NO: 33434 - DNA, 874 bp, Zea Mays
ggaatgtgatatttttttaaaggccagtttaggaactacgttttcccgtagaatccttattttttcaagaaaaaataaactggaaaataagaattccataggaaaacgtggtttccaaactattctaaaaaatgggctaaaaaaaatcgaccgtcttcctcccaacccaagtggatgaccgcgaacacgaggaggcaggggagcagcatccacaaccacaagccatggcggggaggactaacatccccactaacaactccgccctcatcgcaatcatcgccgacgaggacaccgtcactggcttcttgatggccggcgttggcaatgttgatctgcgcaagaaaaccaattacctcctcgtcgacaacaagacgacagttaaacaaatcgaggacgcgttcaaagaatttactgcaagggaggatattgctattgtgctcatcagtcagtatattgccaacatgataagatttctggtggatagctacaacaagccagtccctgctattctggagatcccatccaaggaccatccatatgatccagcgcacgactcggtgctgtctcgagtgaagtatctcttctctgcggaatcggtggcgtctgataggcgatgaaggcatccttgtgtagtagtaccctttggtgtatctgttttgttatgtattgaaaagaagtggcatgcgtccgagcgagacagcaaacaataataatggttgtggaaccaaaccaacacctttttttctttcataaaaggttggaatgctattttgttgctttgtactgtatttggttggttaatagagagtaataaaatgcgattgtcatgttgcacagtactgtttaagggaaagggaacattgtgcagtgtatt

SEQ ID NO: 33435 - DNA, 2424 bp, Zea Mays
aaactgccttttcttccggcttccaacttccaagtggcgactgctgccgactgccgggtgcgagaagagggagagatcagagtatcagacaagctgttgtccgaatccactccggcgaggacgagtgctgaggtcgaaatggggagaggagcggatgaggtggtgaaggtcgtggattcggaggacggcgagggggaggaggaagaggcagaggccgcggcggcggaggggtcgagcaaggagacgccgatgctgccaaggatgccggtgcgcgtgctactcgccgagggcgacgactccacgcgccacgtcatctccgcgctgctacgcaagtgcggctaccgagttgctgcagcctctgatggtgtgaaggcgtgggacatattaaaggaaaaatctttcaacatagaccttgttttaactgaagttgaactgcctttgatgtctgggttcctcttgttatccacgatcatggagcatgatgcatccaagaacatccctgttataatgatgtcttcacacgactctgtaagcatggttttcaaatgcatgctaaagggtgcatcagatttccttgttaagccgctaagaaagaacgaattaaggaacttgtggcagcacgtttggagaaaacaactggcaaacggtgggcccgatgtgcagcacatacaagaagagaatcttgcagaaagaatggaacagaagactggcgtgacaaaagatgataatttgaacagcgatggtccctgtaaaaatagagaatgcagtgaacaagaaagtgatgctcaaagttcttgcacaaggtcagagttggaggctgaaagtaagcaaactaacaacattttggagtatatgcaatcaactgaaaggcatttgtctattcgtagccacaaggatttagagctaaatggagagaccaaaacacgaactaagggtaataacttgattccaacaagagaagacgatttattgccaaagaaaagaacatgtttgaatgacaataattctgagagaacttccagagatatggagctagtccacattatggacaatcagcagaagcatgacacacagagggatgtggatactatgagaacaacatccaggagaaatgatgagaagaactccatcccagcacaccagttggaactttctcttagaagaactgactatggaaaattagagaaccacgagaaaaatgatagaagaacactgaaccattcaacttcatctgcattttacttgtataattgcaggacagcgtccagcttaggaaatgctggtgatggtcaattatgcagcacctcagaaacactagtggatgttgaaaatagaaatggagatttggcagctctgtctgaagacacgactgaaacaaatcgtcctcctatcagagttgtaccatttcctgtccctgttcaatgcttcacatttgatgggcagccgttctggaatggtacaccggtggcatctccattctacccacagtcagctccccccatttggaatagcaaaacaccaacgtggcaagaatcaactccacaagcaacttcactgccacaaaaatcgcaacagaaagaaccagttgaaatggatgctaaaccagttgaaaatgcagaggaacaatttgtcgtaggtcctcccagtgccagtgggaagcagctgcatgttgaaattcctaaagatgatctacggcatatttctcctgtgaccggtgaaagtggaatcagtacggtgctagacagcaccagaaatactctgagcagcagtggctgtgatagcacttccaaccagatcaccgcccctactgaaccatcatccaatgtatacaggggcgttcctgaaaccgcaagagccgaaggtttacgacacctgagccagcgtgaggctgcactgaacaagttccggctaaagaggaaggacagatgctttgagaagaaggttcggtaccagagccggaaattactcgcagagcagcgtccacgggtcaagggccagtttgtccgtcaagatcatagcatccaaggaagctagggtccagttactgagctggaactctttcccattatctacaaaaaaaagtcactgttaggcacaggacctggcacgttctagacggtttgtcggtagacgttaaaaaatacaggcatacttgtgtcctccagtagcacgtgtgctttaagccttgtattatgtaactagccaagttgtttttgatgtttcggattagatgtacactgtggatgtatggcgtgaaggatgtccaccaaagtatgctcgtttctgtgtagcttgttgcaatgaacattgttggcctggttttagtaatgctctcttgccttgagtattagtactgtgaaattttctacagacggtatgaagtgctaaatttgggtgacggtttttataagaagatcatgtctc

SEQ ID NO: 33436 - DNA, 237 bp, Zea Mays
ctcgaataataacatataagggtattaacttattacatcacaaagtcatagacatccacatagtcatcaacttaaccgataaatcaaagtgctagcaaaacacagtaaatataaggccttcacaggcagctgactgggggttgccgccaacccacacctaaaactcgtcgtagtcttggaactcctggaagtctccttccacgacttcgtcttctcctaagcagtggttgcaatggg

SEQ ID NO: 33437 - DNA, 1604 bp, Zea Mays
caggcggccagctgcaactctcggactgcagcattccatttccaggaaggccacggcggcgagaactcactcgggcgctgccggcgatgtacggcacttccgaccccacagctgcggagcgcacggctttccggcgtgcggagaaacagtacaagctttacaagacactcaacgtcaagggcaggtccaggtccaggtccaggtcaggatgcaggccgtctagcggagagggaggtggcgctgatctgtcagccgtagttgacttccatgctctgcttgccgccgacggggagcttcctgacgggattggtcggcgtgagtgccccggattcgaccgccccgtgttctgcttcttggaccggccagggttctatttcattcctggtgctttatcaactgaggaacaatgctgttggatcagggaaagcttgaaaacatttccacagccacctaataggactaatttgactgcaatatatggttcaatttcggacttactcatcgctgccgaaaatcaacagatattggttgaagcagaaaatcctgatatccaagaaagaaataaacagaataattgtggagggaaaacagaatccaaatacttcaaatttgtggactcagagagccagaaaggggaagagcataggtcaaacgcagcaactacccttgtgaggaagctccggtggagcacccttggtctgcaatttgattggtcaaagcggaactacgatgtatcacttccacacaacaagattccaggtgctctagctagtcttgccaaaaagatggctattccagctatgccttctggagaagaattcaagccagaagctgctatagtgaactattacggtccaaattgatgtaggtgacatgcttggtggccatgttgatgacatggaagcagattggacaaaacctattgtaagcataagtttgggctgcaaatgcatctttcttttgggaggaaagactcgagatgaagttccaacagcaatgttcctgcgcagcggtgatatagttttgatggctggggaagcacgagaacgcttccatggtgtaccgcggattttcacagagagtgaccagcaagaaatccctgcactgatttcacaactatctagtggagatgacgtctttatcttggagtatatcaagaattctaggataaatatcaacatcagacaggtctactgaagatcagattggttgcagacttacacatgaaagtttggtgggaaatgctgctttcttgctgcagtcaggtccattatcgtagtatagctcgattaggggcatctggaatagcaactgaggacctgaagggttggaaggtgctacaatagtagtgaaactaaccatatgtgtaacttccattggatgagggtttttttttcaaaaaaaaattttgataacctggcaatgatctcaaaacttatgcaggattgctgatctcgggattagccatccctagctgatttcatgttgttatcttttctgacgtgaatatgctcctcaattttgctgctactgtaaagatatttgtagacctgtttgaacttattgcttgatgatctcattttgaggagtcttaggctttccaa

SEQ ID NO: 33438 - DNA, 3712 bp, Zea Mays
aattctcttcaacacgcgcacatgtgacatgccccatggtcgtcgccgctccaggcatcctcccgtggcctcacctccctctcccttcctcctcccacccgtctgacgcctctgacgccgccgcagcagcaacagacgccaacacctccgcgtatgacatccagatcttcgagcccacctccatcgaggagcgtcgtcgcctcctgatccagcggcgtcgcctccgactcgccgcctcccatgcctcgcggctcaccgttgcctcgcgcgtctcctccaaactcatcagcaccactgcctcctgctccagcggcgtcgcatccgatctgccgcctcccctcctcatggctcgtcgttgcctcccgcctcttccccaacctcgcccttgccgcccttggaggatcccaaatccgacgacgagctcagtaggcccacgcagacgcggatgtgctatgaacttcagacaacatattcctaccgagaagtatgaaaagtacacttcagagcatgtcaaggtcctcacgaaagcttcctatcaagtggttgtttgcaagattgacgagttgtaggcaccaaatatatcgagtccttgctatcaacatatgagcatattattgtcaaaattctgtatcgatggcaatgggttccagaacagtacacaaggcaatttcaagacggttattcaattgctcaaatagttcagtaagtgagaacaaagaaacttcctaaatgtattaatatggtatgatgaatagtgtctcacacattgtgttgttgagctctggtctccatttccgtgctgctagaatgtgatgtgaagtattcaccttttgacatggataaacatcttctctctgttacatttgcaggcgaaagaaggtctgttgaagcagcctaaactattttcattgtgatttccaacgctacattttccaatatgcctttgtttcatacatttttccttttttcaaataaggctcatgtgctgcttcgaaaatcagttctaagaaggcaaccagggacaacaaacctgataagggaagaaacatgttctggataaatattggcctttgtttcaagactccaaggtaagccattgaatgtaagtactcaatgtttcttttcttgtccagccaagtagccaagtagttgttgtgtctgttagattagtagcccatatgtatctaaaaagattccaaaggacacataaaaaattgtttgcaataatatagatgtgtgctttagtgcccatagacactgacctgctgccaaatttctagccaagatataactttctgagcactacttaatttatctaaaatgcacgatcgtatatgaagtcaaaataaagtgtgatgcacaaacgaatgtatcccatgagctctacgtttcttttcctatgcaatattattgacatcatttataaaaagctacattttgtgtcagttagcgaacatagaatcctattgacagcttctataataagaaaaatcaataaaagaaatgcttggaaaaatggaatataatttacactcattaaattgtagtaatttccttaccttgatataggtgtttggaaattcttccttcaaatcattcaggcccttttgccaccacgtctctgtcaagtagatggttgtattagcagaaaaagccaacactcctcacgagagccaaaaccttatcagggttagaccagtcttttgttcaagcgtcactggttgtcttacaactcttcttttccaacaagttcgcaaattgattgctaacaccttcccatctgattttttgcacacaacaaaatccacaataacactataaagtgaatatataaatcagaaaaaagatattcccactcatgctcaggcaattattttcaggatatgaatccttctaatttagactataaagtcacccattaggccattacaacttttttactatgcatttatgctttatttatacaccaaaaaaacttcaaaccctcgacaccattcatgcttcatttggtgtatgttttgctactttttccttgaacgtaaaagcattcttctctgatatctgtaactgtaaaaagattattgttctataactatctgttatttattgttccatcgctacctcactacctatttcctatctgatgttttgctataacatcgccatcgctgtgttgttcagacttaagttatgtgatgcttgttctttttagatgtaaatcctacaattttcgcctccaaagtcacccattacaatattttttactgaatctatatcttttacttatgtgtcactctgcattttttaagattcaaaaaaacattccttattttatacgcggtaaaacaacaaccttcataattcaccggatcttcttagtattatctctgacaaaaaaatataaagtctgtccccacaaatgcaaattagtttcttgattttcaattggttgttaaatgtctgacatgagcaatcagtttggttagcataaaaggatggtgattttgacaactacacagtttgtaggaacaacaataaaaacacttcattatatattagggttctatgatgttcaccattcatggcttcctaccagatcacacattgcataaatcaagttctacgctattggttacttttcagagattcagacagaacatttatattctgtttcctggattgagcatattccgttatagaatgtctagaatttttttcaaacttatgcatctgatatgatctctcaatatataagtactgacgaaagaagtgtgatggtcaattccagcccgccaccatccagggatcaatcctcaccacgaggaccaggggtgatgccaacaaggtgtacgtgaacctttcctggggtgttgataatttagctctcgcaaacctgttcactgagcaaggaccatctatgacagtgagaacaagtcaagagggtttgattttttgtcatgtatggttccacagaagagcctgagaatgcattatcgaatctcaatggagctatgagttctgaaacccttttttcttccccttgctgctcgcggcatagcatttggaaattgaagtacaatttgtctttcaggatatactgaattgatttatcattgtcctgcaggacttggatgatagatccgtgttacgataccagcatcaaagccgcctagaagcaatactgaactttcacttgagatgtgagtagttgttgttgggggccttcgtcctccgaaggtcctcaaaaacatgatttgacaatgttttccaagtggattatgtgaacaggtaccttcggactcagaattacgaacatgaagtgcggtcaggacgaagcctgaaccagacgaaggacgggctgattaccaagctccacgaaggatggtgcacagccgaagctgtgcgcagggaagcttcgtcgtgatagcagagaggggaaccgacctaaagataaaaagactacgtgggccttgtcagatttccataagtcattgacaaatgtaatggacataaatgtaattttacgtgggctgcgtcccgcgtctataaatagatgaacagtactctcgtactgttcacgcggacttggcatttgcttttgcgtcacgcttgtactttttatcttctctcaggaccgaaggtacatttgtaatttgaaatcatttctatttttccatgttaataaaatagaaatgattctatgatgatgctt

SEQ ID NO: 33439 - DNA, 2852 bp, Zea Mays
tcagagcgagagtcggtccaacggctactggttccactgtctccgcttccagactctacgttcctgtctcgttcaaaaccctaaacctttcctctccatcggactctcgccgccgccccatggcggcggaaccaagagagcccacatcctcgctggatgcccagctcgcggcctcttcctcctccgcagccggcgtaggcggccccaacccgtgctgcgcgacgcagtggaagaattgccagaaattggtgaggagccggacggcgctgcgggaggcggtgaagctcctgcaggctgagaacgagaagctgcggaaggagaactcggagctcagcaaagtgtgcaaggaggaacacctccgaggtgattcagcagaagcagctagggcaactgagtctgatgccagagatctattggaaaaggagataattgaattaaagacacagaacatgagtttgaagcaaacacaaaatacctgcaaaaataatgatgaacttttacgtatctctgaattagaggaagaaaatagaaagctcatacagattttaggagaagaaaggaagaagatcacttctgagaagaaaaaaattgaagaagaaaagtgcaaaactctagaaatgcaaaggatatggaagtcagaagcacagaagtctgaagagtatagaagagttgctgatactgaaagaaaagttgccaatgattggagagcatcatgtgaaaggttgaggagtgaagcaaatgaactcagagctcagttgactgctcaaattcagaaaacagaagaaatacttaaaagggctgaagcggagaagcagaaggtcgccagagaaaagaaacgtgctgattcagagaaatcattatctgaaaagaatagaacacttgttgaagttgagaagaaaaaagtaacagaagaaaagtgccgtgctgacaatttatttgctaagttagaggagcagaagaaactcaatgaacatttgcgaactagcatacaggttgaaacgaagaatgcaatagaagagaaaaaacgaggagaccatttgtttcagaaattagaagagatgagagaacagactgaatgtttacagagaaaggcaaatgaattctctgcaggtagagatgtaatttcttctggcaagtgtggccggcgacacattgatagaatttctgagaatgcaaacgttaagcttctcaaagagaaacttaagctgaaaaaagaacaactaaagcatgtcaagaatgtgtccaagctagataaagcaaaaactgctttaataagaagagagcttcaaagtttaaagcaagactggacacagctactgggtcggtttaacatgctggatgaccaccttgcacgtggtgttgaagatattcatgtcttaacacaggctgggacagttccatttggctcttctatcccaagtgaatacacttcatatcagttgcccagagaaagctgctcacgatcaatctcagggcaaggataacctatttgtctcatcgacagatatcaggaaaaaacaggattcagttgttcccgagctggctcctaaaattagaaatgatagagcattgccttgtggtacgcttacagatagaagagaaacacttggtggtgataggaagagaaaacacaccaaaatgtctcaagacccctctgcttttcttccctcaaaaaatgatttgctacatttgaaatcaaaggtgcctgctaccacttcaaatgttgcattatcctttgatgatgatcctttgtgtctgcagcaaggaaataacaccatatgtgttactgaaggtgacatggataaagctccttcattcagtttcccttctaaagtgtcttgtggaggaaatggctgtactagtagcaagtttgcttcattgatcccctttgaggaaatggtcagggaaaactgcttaaagttgctcaatttggatgatgatgcagatgaggaaaagtttagaaaggcaaaggagagaccccattcaccaaacctgagcatcatccgaccccgtagaactaaactgccaacgtatgcagaacctcacagcttgggtagatctctcaacggttgtcctgccttaggatctgatgccattgattccaagacaaggtccaaagcatcggaagttaaagagcctgtaattcagaaatcgactcaaaattatatccagcttgatccgtcgtcaaatacaatcgagtgtagtggcattgctaaacctctttttgtgaatgataaatccaatgcagctgtcaatgtttcttgtagcaccagtttggttgtagtgccagcgagcacttcttttgacagccttttgcatgagcatgtggcccagaattctgtagcatcttctgctgaggcattagacagtataagcagaccaatgttatcgggaggtggtcattcagattccattttacatttgtccaaggaagtgtctaacaaaaacaactcacatctgatttgtgacaaatcaagtcctgggctgcaagctaatgttcggacaagtgaaacaacagtgaccaagccaaacaattcggtctcgaatagtttgcttcggcaccatcatggatccgaaaaccctccattgcacttagttggatttacaagaatgaaaagaagcaaaatgattaacatatttcggtattgggagatactgagttctcaatctcaaaagcattctgacgaagcttcagttgatggtccactgcttgataaagtgtcaactgacacaatgctacctatagacgagaaggtttccctcatattttcccttttgttgtgggatactagattcactgaagaaacttttgtggatggaaattttgcctcatcagctttttcgtcgagtgg

SEQ ID NO: 33440 - DNA, 2458 bp, Zea Mays
cgggaggagattttttttaaccaagccagaaaatcgcccccgagggagatcgaacccaggacctgtaggtgctactcggaagccgtaaccattacgctaaagacccttttgcgtttgttaggatatggggtgatcaaggccaaactgcactggagaaggccagcatatgcttgcttaactgtggtcctaccggaacagaagcattgaagaatctcgtgcttggaggaataggaagtgtgactgctgttgatggctccaaagttgaagcatctgatctggggaacaattttatgttggatgaaggatgtttggggcaaccaagagctaaatctatatgttcattcctacaagagcttaatgacgctgttaaagccaagtttgttgaggagtttccaacgcatttgatagacactaatccttcattcttttcccagtttactgttgtcattgctactcagcttccagagagttctttactgaagctagatgatatttgcaggaaagcagacatcgttttggttgctgcacgttcatatggtctaactggtttggtcagggttagcgtcaaggagcactgtgttatagaatcaaaaccagatcacttcttggatgatttgcgacttcacaatccatggactgaactaaagcaatttgcaaaatcaattgatataaatgataaagatcctgttgtccacaaacatactccatacattgttgtccttgtgagacttgctgaaaaatgggcagatgcccatgatggtaacatgccttcaactaggcaagaaaagaaggaatttaaggacctaattcgagcccacatgcttaatgtagatgaagaaaattacaaagaagctgtggactcatcatataaagtctcagtcactccaggaatcagtaatgagatccatcagataattgatgatgactctgcggaagtcaattcatcatcagaagatttctggattttagtagctgctttaaaggagtttatttccaaggagggtaatggtgagctacctctggagggaacaatacctgatatgacttcccttactgagtattatgtaagcttacaaaagatttaccaagctaaggcagaatttgactgtcttgccctggagcatcatgtaaaggaaatcttgaaacagattggtagagatccggattctatttcaagagcatatatcaaaacattttgtaaaaattctaggaaactaaggatttgtagatatcgtagtttcaaggaggaatttagctccccgattgtctctgagattcagaggtatttcagcgatgaagactgcagttacgcaatgaacttctacattctactacgggctgtcgatcgattggctgccaattatagccgattacctggaatcttcgacagtgagattgacgaggatatccctaggctgaagacagttgcggcttcagtgctaagcgagatgggtttgaacggagcatccttatcccaagacctggtaaccgagatgtgccggttcgggggtgcggagattcatccagtggctgctttcatcggtggagtcgcttcacaagaagtgattaagctggtcaccaagcagtttgtgcctttggggggaacattcatttttaatggaatcgatctcaaatctcaagttttggtgctataacatggatgtggagcgttggatttgagctggtccagattttgtgccagggcaccgcgctgcccaacgagtacccaagtctcgcagaaaatatcaatacttgcttcgtatgattttttgccaaatgactagcaaattcctagctcacgcggctgttatgcgtaaaaccagaagagctgctgcttttagactacgcctgttatatattagtaggcgaagtaatatgtcagtggggctgatgtgataagatggatggtgttaaagactagcgtgtgcgcgatttgacgaagacgactacgagacgggatgagcaatgagcatgtcggccgagctatggacgcttccatcatatcatggaccgacatcaatgtgcatatgatctcaggtgtccatcgacagaccgaatcttccgtggccagtattccttcggcgacgcggttgccgttagacgaaggaaactgtcgtgtgacagcgaaatgtggttgctacatgctggtagcgcacatagcacactttgggcgtgtttggttcggcttttttctaaatagcttttctgaaaagctggctgtggagaaaagctggctgttgggaaaaactggtggttagaatttaggtgtttggttcgccagctgtgcaaaaaagttgttcgttagaatataggtgtttggatacacagattctcagactgcagattctgtttgaaaaaactatacacattaacaccgaaccaacaaaaggtcattacatataattagtagagttcattacaacataactaccgttacatttacatatttaactatgac

SEQ ID NO: 33441 - DNA, 2011 bp, Zea Mays
cctctctccgctgcccctcctatctcctcgcgagcaccgctggcctcgcttaacggcctgatctcccagccgccgcttccgcctcgcgtcccaccggtctccatctacatgcagccgcgctcgccaccgccgtcggaggcgcctgcgccctccgacgccatcatgatgcccggcgtgggcggcgtggagccggccgtcacgttgggccaggtgccgcgctggagcgaccccgaccagcgcatcttcctcgcctccacgtccgaagaggcgtccgcggaggacgacggatccggcacgacctctgcgtctggcttcatctctttctccgacccgctcacggtcgacgacggcgccgtcgggggtggccacgccgggggtgcctcgcgcttccccgtcgaccaggagatcaactctaggatctatctctggcgtggccagccctggaacctcgagagcttggacgaggcgcacagtagcccggggttgcatgctgctgccgggtcagggctcgccgaggagtgcgccaccttgggaggttgccgaactgggatggccaagatgaccaatgcctacgatctgcctgcaaggaaggtcatccataccgtgggccccaaatatgctgtcaagtatcacacagctgcagagaatgcacttagtcactgctatcggtcctgcttggaactgctcattgagaatggtcttgaaagcatcgcaatgggttgtatatacacagaagctaaaaactaccctcgtgaaccagctgctcatgtggcaataatttatattctgtaggaactgttagacgtttcctggagaagcaaaaagacaaaatagctggtgttgttttttgtactacatcatcatctgacacagagatatacaaacgattgctcccactatatttccctcgggacaagcaggaggaatatattgcgatagtaaagctcccagctgatgttggggatgagaatggtgagacggcaatagatgaaaggaaaataagaataagacctttgcctgctggtgtgctagacagaacagtgtctgcaaatcttgttgatcttcctctttccaattctggatcggcattgaagaggggttctttcaagttggattcatacttggatccttcatttatgtcaataattaaagatccagatctgcggcgcaaggagcagtgggaaaaatccgctcaagctcaaaagggatttaattatgctaggttatttggatatggggatctaggttgcccttcattatctgcagcagaggaatactcacttcattcacgatacctcactaaagcaaattctcttaatctttcagagattgctgaaatgaaaataatttatcgtggtggagttgatattgaaggacgcccggttatggtggttgttggtgcacactttcttcttcgatgccttgaccttgaacggtttgttcttcatgtagtgaaggagtttgaacctttgattcagaagccatatacaattgtatatttccactccgcagcatcattacaaccgcaaccagatttaggatttatgaagcggttacaacaaatactaggacggaaacatcagcgcaaccttcatgcaatttatgtactccacccaacgttgggtttgagaacagctgttttggcaatgcaaatgtttgtagatggagaggtctggaagaaagttgtatatgtggataggcttgtgcagctgttcagatatgtaccacgcgagcaacttacaattcctgactttgtttttcagcacgatctggaggtgaatggtgggaggggcctaattgtagacccaagaacaaagcacatataccagaggacgtccagttgatatatgccagttctgaggcctgaagttttgcttgagcttacaaaacaacaaaaaactttggaaagtacaagtcaccctgggactgaagagttgaagctcctgtcaactggcttctcaacctagttccgcaaagttgaatcctcaaagcttgcacattttattgcagg

SEQ ID NO: 33442 - DNA, 3055 bp, Zea Mays
ggaaaaaattgctgcgtgcgccccgccgcctacacacgcctagcccgctccccaagaaagagcccccgcacacaggctgggaggggagcgaaagcgaaacgtattaaactcgcgtacatcatcaaccgcatgcgctgatgcgcactgccactgccccggagaaattcaaatcccaagccccacaagcaaattaccccagcatcaaatcagcggccggccggccggcagctctcggtcgatccactgcggtttccagtcccgaataatcccaattcccaatcgattcgaagcttccttccttcgaggagagggggaggtggaaggcgcgggggaagctctgcttagggttcggaggtggccggcgccgccgcggggcggggacggcagggggatggatccggagcagacgttcctgcgggtgcacgcgcgcttatcggggacgctttcccagctgctcacgccgcggatccgcctcgtcctcgagtacctctacctcgccggcgccgtcgcgctcttctgcctgctcgtcgtcatgcacacgaacttcgtgcagcagcctggttgctcaagtgaattttctggaattgaatttggagaagcacaacttgtccaaatcaagattatcagtgggggattatggtccagcagaggtgcttcttacatcatggatctccagaacctgggacgttcagctgagaaaattttagaggttaatggtgataagttcaacattttggcatctaaattttggtcaacctgggttggccctggagctaggaggagcttaccagatttgaaggcagccggagagggttctgtacaccaccctttatctgctaaggagtcatttaaagcagcagtgacatttttgttcagaaaatggtaccttcgtgctgtttcattctggaagaacataaagcaactttcagaaaataccctccagttaatggtcagatcaaattggaacgatttcctacatattattaaggatcttcaactaccaagcatggatcatcttatttcgacaatagtgcaatggtttgagaggagaagtaaagcatttgagcctacttatttatatggcgtggaaaagggttatttcttgctttctgaaggtgctaaaactcgtcatggtgtccgaacaatcaatatcacaatttctgctcgaaatccttgctttggaaacaggtggcagcaacttttgataaacagcattgttggatatgatactatacttacaaacagcttggtgaattctcctggtcatggctatttatacaactttcagacgaaggagctctatgatcttagttatgggcatgaaccaccagaaggtcctacaagatttggaggttagtatagttaactttgttttctcaacatgttgagtcaattcttgagtgttctctacatgacatcactattgtgcatttgttccactaaagttctatacatgtcaatggctaaattataatgaactttctaattggaaaatatggaaccaaaaagtccttaattttgggcttttgattgcttttcatagcatacatgctcttatcttcctctctgtgcatcaaatctgatgcattacaactttggtgtttgcagattactttgtgacaaaatgtggtgtccttctaatgtcactctttgtctttttcacaaccaccatgtctgtttcatttactttgagagaaacacaatcccgcatgcttagattcacagtgcagcttcaacaccatgcacgccaccacctgccaacctttcagttgatattcgtgcatgtcatcgaatcattggtttttgtgccgattatgattgggattctcttttttctatttgagttctatgatgatcaattgcttgcgtttcttgttttgactcttgtatggttatgcgagctattcacgatgatcagtgtgcggacatccatatcgatgcagttctttccacgcttcttcttgctgtattttttggttttccatatctacttcttctcatatacctatggcttctcatatctggctttctctgctacggcagcattcatgcagcacctgattttatatttttggaaccgttttgaggtgccagctctccagagattcatgcgaagtcgagcacacattcaccagcaaacaggtgtccacattacatcctcaactatctacacttctaccttacacattgctagggtaaatgtgagggaccctggtacaataaacgatggcctcggtgctgctcgtgaagcagatgccctattggttcaggatgagtctaccaggagccagcaagagggtcaacagaatggaatttctgagccagctgccaacaatgctctccagtatcaagagcaaaaccctcagcgagctggaagtacccctgcaggctcaggctccctcaacccatttgggtcccttttgctgtggttgctgggaggcggtgcttctgatggcatagtttctttcttctctatgttcagagatgttcgtgatcatggtcaagattacaccgatccacctcgaaatggaaatgatcaggtgacatagaatcacggggatgaaagtgggccaattactgaactcgagtgcttgggcggcagtagtctctttctaatatgatataatgccagcacctcccgtcaaaaggataatgacgaatattggtggcaactatacagactggtgtcgctggagatgccatgttagtgttatctgtttctcacttttttagttagtaggtaagggtgaaggttgtatctatattcattacatgtgcacattccctaccgtctgaatgggagcgcccgtcccagtcctgtacagaaatgtcaactcacagcagattgtgcacattctttttgtactcccatgggcgggtgctggcctggaacatgcagtgtgtgcaccactgtcactgaattggacagttaatggtttggatacatcgttgcatgtactgttccaacttccaaattctgaattctgtgcttgcagattagttcctgaaaatcatgtttttcagtgttccttggagttttgaacaccgatgtcca

SEQ ID NO: 33443 - DNA, 2688 bp, Zea Mays
gtctctctagtactggatcagtccctcttccttttccctctcctcagtccctgtctgctgctgctagacagcacaaactgcggtccggtgcgctctcctcggcggtggagttggagctgcagtgcaggggaagaaccgaagaagcgagctagagccgcaagaatgataggcgccaaggccaacgccgccggcccgtgcccggagtatgcggaggtcgaccccaccggccggtacggacggttcagcgacgttcttggcaagggcgcgtccaagattgtgtaccgggcgttcgacgagtaccaggggatggaggtggcgtggaaccaggtgaagctgcacgacttcctgcagagccccgaggacctggagcggctctactgcgagatccaccttctcaagacgctcaagcaccgcaacatcatgaagttctacacctcctgggtcgacgtctcccgccgcaacatcaacttcatcaccgagatgttcacctccggcaccctccgccagtaccggcagaggcaccggagggtgaacatatgggcggtgaagcactggtgcaggcaaatcctcagcggcctgctgtacctgcatagccacaatccgcccatcatccaccgggacctcaagtgtgacaacatcttcgtgaacggcaaccagggagaggtcaagattggcgacctcggtctcgccgccatcctccgcaagtcccacgccgtccactgcgtaggtacaccggagttcatggcgccggaggtgtacgaggaggagtacaacgagctggtggacatctactcgtttggaatgtgcgtgctcgagatggtaacgtttgagtacccgtacagcgagtgtacacaccctgtgcagatctacaagaaagtgatctctgtgaaagatccaatggtgaggcacttcgtcgagaagtgcctagcaacggcatctcaaagactgtcagcaagagaactgcttgaggatcccttcctacaaagtgatgacgtggttgcttctttggatggtggaaattaccatgtgccggccaattatatacctcagccttcatatttagggcatacctacagcaatggctccatgatgagtaatggattctcagaaagcattgatgaagatgctctcagtgaagactgcgaggatgatgacatgaaaggccaagatggcattgacctgttcaacgagaatgaaggtgagcttcttggcaatgtggatataacaatcaaagggagaaagagtgaggatggaggcatattccttagattgcggatttctgatgatgatggacgggtacgcaacatctattttccttttgacgttgaggctgataccgcactaagtgttgctactgaaatggtagccgaactcgatataactgaccatgaagttactcggattgctgacatgattgatggtgaggtcagtgcactggtaccagattggaggcctggtccgggcatagaggaggctcctgacacttcatactgccacgattgtggatccatcgtgtcatcgtgtggttcactttacgcctacatgtcatcaggccgtcgaggttgccaatgtgcagaggtacatgggcggtttgaggagatcacgttcgaagctgatggagagcagtgtgatttgcaggaatctgcaggcagctctgatgatggaggtggcccaacagagcactatgtcaaaggcaaggagtccactcatgtgaatggccttctacagatgggtagaagagatctttctaatcagctttgcttcagttcattccaagagcaatcatgttcatctaaccattatgagaacgaaactaaccatcacacaaatgggttcgacatgaagcatgaggtaaagattgccaagtacaaagcacggaaaatggcacagttaaagagggctatccatccatctcttgacttcgacaatgcaaatggagtaaataggatgaagccttcactgaacaagctgcaatctttccatattggaaagaaccacagtttccgggtaccgaccggtgaccgaagcccgggtaaagtaagtacggattaccattctaatttgaacagccaattatcgcatagcaggcaccccgatccaggagcccaaagggcctggcattgtgaggtcaatgcagctgggagctctgattgtatgtttacagcaaggcgctactatgccggagctcagttgccaccaaatctcccgcgaacaaaatctgtacccctacatgctgtcgacgtctgaaatgctcttgccctgtaaagtttatagtgtacatctgttttggttctttctgtacccattatgaaacgtagttgctgagagcaggagactgaatgtgacgaggttgcatgtggattacggctgagctgtttgtaaatttccatcttgtgaattcagagaggttagattgttcgagtccaatccacatcatttgcctcactggggcaaccagttttatcctctttactataggcaagagccgatttccgagatgcaaaattgctgttaatcaggcagaaacaaggcatgggactctatccttgcgttggtactagatgccacctacctctcctagttccagttgaatatacatcaaatctgcattgccagcctatgcatttgcattgccaatgccaactgctgcatggacgctgcactaatcaattgacgcttccatgactc

SEQ ID NO: 33444 - DNA, 2227 bp, Zea Mays
gcggtaaatagatttttccattaaaaaatcacagcaaacccccaatctcgtgtctcctcccctttcgagcctgtcgttgtctcaatagctcaatcctcattccttcaggcttcagggttctcaatgatcggcggcactgcccttaccaccacacgccgcctccgtcttctgtgaaagatcaagaattcgccgccgtctcagctgatcttcgcgcgtgcagtctacctgttcgacgagatgcctacgaaggtcacgaagccgtgggtgccggttaactggaccggggaagcatcgtcatcacgcgggcactcggtaggaggtgggggactcgaactcgagcccgccgctgaccgcctcagcgcgctgcccgacgtgctcctccaccacgtcatgtcgttcatgaaggcgtgggacgcggtacgcacgtgcgtgctctcgcggcggtggcgcgacctctgggcctctgcgccctgtgtggacatccgtgtggggaggtatagcgaaccgccccaggacttttccaagttcgtgtaccggctgctgcttgctagggaggcccttgcgccgataaacactctcaggctgcggtcaccaactgattacgacgaggatttcgacaattctgatgttaagatgtggatccgccatgcaatcagactgaatgcttgcgctattcagctaactggtcatcccaatttgtctgcggagcttgattctatagacttggtctctcaccacctcaaaatcttgaaactggcctatactttagtgcttgatagcttcaccagacagctctcgtctcggtgcccttctttggaggaactagagctcaaggactgtttggtagagtgccgcgagattacatctgtctctctgaagaggttgaccatggtcaagtgcacttttgcaaagaacttctttgttaatgctccaaaccttgtgtttgtgcagtgcatcgcaccagatacttgggtccctgtgttcaagaactttggggtgctggtaacaggtagtgtgatgcttgatgactctttactgagccgtgactttaaaaagtaccaatacgatgatgatgaatatcctcaaacaagtgatgatgatgatgacaacaacagtacatttgcccctgctaaatatgttcctgattctgatgacagtgatgaaatcctcagtgatgattctgaattcttagatgatttttatgatgagcattttgatgatatcaaggacaattatgattatggaagtgatatcaatagtgatagtgaaacctatgagtacagtgagattgcaaatgactatggagataaccagtttggaacccgtgataatgaacttgatcacactaggggcagtaaagatcatggttgcagtgcaaaacatatcattaatgattataaaaattttggtggccaaaatgttcttcattgcctttcaaatgctcgacatctagagctgttaggtcattctggagaggtcattatgaggagagaatcgttaaattgtccaacttttagcaacctgaagactttggccctgggagaatggtgtatcagtacggttgctgacttcgacatattacttgtcttgcttcagcattcacctagtctggagaagctttatcttcagcttgaaatgaaccgtgacatcaagaaggcattggtaagaggtatagaaccaaaggggggatcatttgcttgcaaacatcttagtatggtgaagatcagatgcaccaaggacgattcaagagtccatatgttggcgcagttgtttaggtctaatggcttgccgctcgagaagatttatgtccgtcggagtgggagtttctatcttcgtatcttgaaggaggagaggggtattgccatcgatgaactgcgtagatcttgatccgattcctattaaaaacagaaatagaacttgcagggcatgtggcgatagaatgcatgattgtctcgcacatctctattaagttgtcttgtcagctgatatcgtttgaagaacaaagttcagattcgagcaccttggttagtaaatcgtggtttagtagcgtgggttattcgttagcctgttgtcttttaacacatcgtggtttacggtctgtggttcagtttcgagtttctactgtgtaggggctaggggcatctatgttcaacatattctctaatctctaagcacgacagacctacaaatattttagtgttagataggagggaaatttatagtgata

SEQ ID NO: 33445 - DNA, 7506 bp, Zea Mays
gagagaaagagagagagagagcaggagagatggtcaggcctttgtgatctcccgcggggctggaggtgtgcggggatggatctcgcggggatgaagcggcgggagctccaggcgctctgcaagcggcacggcctccccgccgggggcaccaacgccgacctcgtcggacgtctcgacgccgtgctttcggggcccgctgttgtggaggaggaggttgccggagtgccggcgaggaaggggtgtctgaagcaaacgggcggaggtgccaccgaggccaagaaggttacttttggggcggaggtagggaaggccaggagactgaggtctcgggtcatatggtcgccggtcgttgccaagacaagggggaagtctgctcgagccggtactgattctgctgctgaagacggtatttctgcagatgtgggcgctgatgtcccagtgaggcggtccaggaggaattcgttcaatcctgccgaggctgaggaagcaggagaggctgttgctgttgacaggaagcccaagcgcaagaatcaggagaatgacgagggcgttgctgttatcgctcaggctagagttacgagaaggtcaaatttggagtggtctgctactgtattgcctcctgctgttgagaagaagagagggaggcagaatgcagctgagtctgatgtgcagaagtccgctctggtggaagtaacagctaggactacaaggtctcgctcaatcgtacctgttgtggtgccacccactgtggttgagaacaagaggaggaagactggagatccacaaacaactgtagagttgactatgctttcagatgtgcccagaagtgattttcctgccaccaggtctttaaggaacaaaattgtccacgttaacaacagcgtcgtggacgaaactcacactaccaggcagttggaaaacaagatgcgtccgtctactcgtaggcatcaacaggttgcatcttctccggaggataaaggtcaaaaaattcctgctaccagtaagtcccctctactgaggtggtcacggagaaactattctgaggccaatagtgcaaattcagtaaacatcaaattggccaaagactcgagcacagctcagccattggcacaccataattctcattctgaagatttggagaaacaaccagcagttaaagaaccaattaaacggtcaacacgtaaatctattgctttggctgcacttgagaaagagaaggatgtaattgaaggaaagaaccctgaagcacatgttaggcgatcaacgaggaaatcagttgtgcaggttaaagataccaaaagtattgttgaagagactcaatatgctaacagtgaagatgtggcgaagcaaccagcaactaaaggacctgctagggggctgagacgtaaatctgttatcacagaattgcatgagaaagagaagagtctcattgccgaaaagaacatggaaacagatgaagcgatattaacgcggaagcctgtaatcccagttaaaaatattaaagctgttggtgaaggaattcaaattggtaagggcaaagatgtggataaacaatttgttgtgaagcaacctactaggcgatcatcgcgcaaatctgtgctgcctgatatgcttgagaataatagtggacttctagcacccaaaatgaatgctgagatgaatgttaggagatcaacacggaagtctgttcttcctgacatgcataatgagaagcaagatcaccataaaatggctagaaatgagaacttgcaaagtggtaaatatcaagatggtgagaagcaacagaaagtaaaagattctattaggcaatcaaggagatctatcgctacagtgctacttgagggacaaaataatgatgaaggaaaaaagttcaaaaatcctacgaggaggacaacacacaaatctcatgcccttaatgcagttgaagaggtcagcatggatcacattgaagttggtgaagaaggcttgaaattgaggaagcgcagtaggtttttgctggaaatatcatcttcagctaatgtttcctggaagcatcagaatgcacagatctctaatgaaaaagataacacagaaggatcgcagcaggcatcaaattgcacaacttcaaagagaaggtcttcaaagaagagacgaacaactgctccagaagaagtgatgcctttcaaggtggcaaatgatgacatagttatcatggaagaaacaaaggacacacttgaatataataatgagtctagtagtaaagttcaagaaatttgtcaggttaatgctgcaagagaagagttctcttcaggtccattgcttgtaacagtagctcctagtgacgaaatttgcacagtgcagagtgtagctgtggtgatacctgggtcagaatctggtgacgatgcaaatcaaagttctgataagagtaagcaacctcaggaacattctgtcactcaaactgttgatgaccatttatctgaaacaagaagtgggaaattagatcaatcaacatgcatcacaggattagtctctgacaattgtgttgtctcagaggacaaaacattgatgagtgaagaccgtgaagagcaaagccctgtgtccggagaacagagagttagcttggaagcaaatgccaatgagcctgaggaaaagaacctagctaacgtcacatcaactgatctccacaccaaaagtctgcagcatgatattgacagaatagctaaagagactgataaagatgttttgtctttggttttccctattgaagagcatgaagaaaaatatggagtgagccctatagctgttgaaaagtgcgtctgtcgtgaagcaagtgcatgtgaatctgcacgaaaacccctaaccgttatcttttctaacaatctccacaccaaacatctgcaacatgattgtgatgtgctaattaaggagactggtgaagaagttttagctcaggagaattgtaatgaccagcctgttcctgcccagactgaccaagaaattaagttaaacgatgaacttgctgatccggatgttttagctcaggagaattgtaatgaccagcccgttcctgcccagactgacctagaaattaagttacacgatgaacttgctgatccggaccatgaagagcaaagccctgtatccggagaacggagagttagcttggaagcaaatgccaacgagcctgaggaaaagaacctagctaacgtcatatcaattgatctccacaccaaaagtctgcagcatgataatggcagaatagctgaagagactgataaagatgttttgtcttttgttttccctattgaagagcatgaagaaaaatatgcagttagccctatagccgttgaaaagagcttccgtcaggaagcaagtgcaattgaatctgcaggaaaacccctaactgtcatcttttctaacgatctccacaccaaacatctgcaacatgattgtgatgtgctaattaaggagactggtgaagaagttttagctcaggagaattgtaatgaccagcctgttcctgcccagaccgacctagaaattaagttaaatgatgaacttgctgatccggatgttttagctcaggagaattgtaatgaccagcctgttcctgccaacgagcctgaggaaaagaacctagctaacgtcatatcaactgatctccacaccaaaactctgcagcatgataatgacagaatagctgaagagactgataaagatgtttcgtctttggttttccctattgaagagcatgaagaaaaatatgcagtgagccctatagctgttgaaaagagcgtcagtcgggaagccagtgcatgtgaatctgcaggaaaacccctaactgtcatcttttctaacgatctccacaccaaacatctgcaacatgattgtgatgtgctaattaaggagactggtgaagatgttttagctcaggagaattgtaatgaccagcctgttccggcccagactgacctagaaatgaagttaaacgatgaacttgctgatccggaagttttagctcaggagaattgtaatgaccagcctgttcttgctcagactgacctagaaactaagttaaacgatgaacttgctgatctggctatggaatcaggttgtagcattactgaaaggaatgaagggcttgttgctcataatcttgatcaagaaggtttccttgaagcaacaccagagtgcaaacaggaatgtggtttgcctgaggagacagtaatttcctcaaaagaaacaggatctctgctgtgtgcagatcaatcaccaattggtctggaatctttattttcgcaagaaagcatagttgaatcagtggggcattgtgcacttgcttcagcaacaactcataccgaaaatggctttgatgattcaaaagattgccataacaagtctgcacttgaaaatgttcatgtgccagaaccttgttcacacaatgatactaaaggaggcatttttaaaaatgttgattgtatgcatacatcccagcgagatgatagaatggaaggagtaccagaggctaacactgatgaagaacatgttctgtcagcctttttgctggatgcaaatcacctaaacgtagtcattaattctgaagaagtggtttgtgagggtgaagatagtaaggagcttctccattcggaagactgtaaagcttcatccgagaaaacagatgtgaatgatggcaatgtatatggtattagtgatgctgtagtgagatgtgcactgcatgctccagccgatgataattatgagatttttttgggtcccaatactgatgtaccacgtcaggtttataatgacggatgcagtgatgtcaaagaagatcgatttgcttccaaaccctggacaattgatattattgaggatgcctctgtcaaagaaagatcaaatttaaaagattggcaacttgattccaagttggagggcacagaaatagtggaatctggcctttacttcaataaggatattggtaacattttacatagtggatctattggtgaaataactccatctggttctggtttatcaaaagattcatctgtggactatagaggggaggttttagatggcttctcaatggaagcatctcttgaaaggtcttctacacgtggggaacaaaatggttgtagactagatgctattgagaatccttcaattactttagcaacttctggttataagcatgaaggtgctttatctgaggaagcagtgtacacaaagaagaattacgctggaacatgcttgtcaaatcccagggaattaatcatggagctgcaatcccatttctcaaaggaaaacataaatgaatctgatcctcatgacagccttgtattcccaactgctgaaaattcagcagatgaacagctggttaaagtacaccatggttctaatctgtctcagttaggattaactgatctgttggatggaccaattgggtgttccaataccgacgtgttgtgccagtgtgacaatcataaaaatcaatccaatgaggacaaggtagaggaagttgaggcggtgtctgctgctaaatacatagaaagtgaagttgtgctgctcccatctcaagagagatcaaatttgaataatgagcagcttaacaccaagttggaaagcccaaacattatgggatcttgccttaactgtgataacgatgtttgtaatacttcggacaatggatctgtttttgtcattggtaaaagaactccatctgcttctggcttaccagaagattatcctaaggatagtgacttgcaacaaccggttttagatagcttctcagtggtttcatcttttcaagacaatatatctgggaagaaaactgtttctggtgtagcaggcagtgagattctttctttaagtttagcaactcctgattataaacatgaagatggtttctctgaggaagcagtatgcagaacaaagaattatactggaacttcctcggtagatccgaggcatttagacatggaggggcactctatttactctgagggaggtactgaaaaatctaatctgcaagataatcttgcatttctaagcgctgagagtggaaaagatgaacctattatttgccatgttgagaaactggttgacgcacatgcttcttcagatacataccaaggtccttgtcaagatctaggcagacatgaagaacaagagagctgcatgtctattcctatgcaagccaaagaaagtggaggggttttgaggtctagccacacgaaagggtcagttacagcagcccaaattgatttggcaggtgatgcccatcttattgtgagtgataatgctgctgccaagcaagtgtttagtgaggagaaagaggaaacaaaatctatctcttcttcagatattgatatccttcatgaaaaatcatactccagtggacacgatgaccatgctgcttgtgctgccgaaactcagttctaccatccacagaaagcatctatatctgatggactacatttgggtcctagttctttgcaagtagaatcactggatgctttggatagcgatatactgtatgttaacacaggagttctcgagcagcatcataaagagggttactatgaacccagtgtctaccaaatcacttcaggcatttgcacaatgtctgaagctgaaccattcgaagttttagaaactggaaaagatgtaaaaacgccatctaagctagatgagcaacttaatcctgggttggacggagatgaagctgagaaacacagcttagactgtggtacagacaccagtcctgtgatgagcaagagaaccctttcttcaccaggatcaggaccatgccagcagtatgtaaatgaaagcaccaccagtacacagtcgactgataatcacccaaacgacctacccgctccgagatctcctgaacaatccgcgtgttttcagaatgacaacgattcgggttcagcatttgtcaaagcagcaggcgaagaggtatagatgaactttgcggtaagctgcagagtttcaaagtttccagcgccgtaaaaggaagctacgtagctatgggtgcacctcgtccgaagcctggggacagcacgagccgatctgcagccgcgctgctcaggaacatagagaacacaactgctgttaaagctggccgtcctcctgtcaagccaaacgccgatggtaaggactcgtctaggcgagccctgcagcccataagcggaaggcctgacagtaggtagttcggcggttccttaataagtgtgtcgtgtttgtgttcaaccctttgttgaaagccaggtccgtgtatttgtgcagcttgttgtcatgaagctgctgtgtgcgtgtcatttaacataagcgtgcgtgaagttgtgttatggaagtggctaaatatgtgttcgttaggaggtcaattggcttgaactgaccctgctgttccgtgatttctgtctaaatatacttgtgtggctgtgtcactttgattggccttatcgatcacatgcaatgggatcacatctagcgtgctctagggtcctcgtttggtaatcgctg

SEQ ID NO: 33446 - DNA, 1352 bp, Zea Mays
cgcggggacggaagccaggccaaactagagaagcgccaagttgccagccaaacgaacaaagctaaaacagggcgggggcgtcccttcgtggggacagccctcgtggtcgatccgcccgtgggatctcgcgcacgccaggattggagagctgcggcctccctccgccccaaccagccatgggttcccgcgttgattgcggcgcttagacgcggaggaggagagagacacggggagggggggaggccgaggcctaggaggcgtagcgctgtgcagggcgcgagcgcgttcgttcggcatggaacagaacgccggctcgttcctcgccgtgcgtcgcctctccggtggcgccatccaccaccatcgtcaccactcttccccgggaagagtgcttgaataggttgcagaaccggatagaggtgcagtatgatggttcaaatctggagcatcagaaagcactggaagccctttggcgttcttcttttcctggaactgaacttctagggttagtatcagaccagtggaaggagatgggatggcaagggaaagatccatctacagatttcaggggcggtggttttatatctttggagaatttactgtatttctctaggaactatccaaaatccttccaggagctccttcgtaagcagaatggtgatagagcattgtgggaatatccctttgctgtagctggtgtaaatattacattcatgctgattcagatgcttgaccttcaagcagctaagccaacgtcgttggttggagcggttttcctaaatctactcttagaaaatgatcgagcgttcgacattctttactgcataaccttcaaactgatggatcagaaatggcttgaaatgcacgccagttacatggatttcaatacggttattaaatcaacacggcgccagctcgagagggagctgttgctagaagatatccagagaatcgaggacatgccatcgtacaggtttctcgcctgctagcaattgaacctcctggtcgtaccgaacattgccacaagatagtgcagctccatacactcgaagaagaagctgagaggttggaaccacgtacaccgagcgaagggtgaatctaggttcatggactgtggatgtgttgttgctttgaattgcgctgtcgtgtttacctactccgagtccgacaacagcctcgacgccgagtgccttttcgtttcaacgatgtgctatatcttggggccacggaacggcagatcctagctttctttgtaaacaagaggatgtggaaagttggctgcgtatgctttgtggccatgtgcatggataatcttgctgctcgcctgaaagaaaaaaaggccgatcttaagactg

SEQ ID NO: 33447 - DNA, 338 bp, Zea Mays
ctcagtttcgaggacaaaatcgaatgccctctatacatgtgccaagaccaaaattacatgtcacacccggatttgaggggtccaaaatctgggcgcgaaataatcaccaagtgtgttacgatcaagtctcacacatatgatgacttatggtacagaaacgaatgtcacatcattaatacataacggagttctatacaaaagaattaaataattacatcatataaagacaacgatccaacaaccaaagctgaccggagacgacagcctagacctctcacgaactcatcacaacatcctccatgcgcctcatcctgtggtacctgttcttgacctggggg

SEQ ID NO: 33448 - DNA, 3353 bp, Zea Mays
aatcggatggtataccctgtctgcccacaaacccgcaaaccccccaaatcctccatcgagtccgcttgagtctcgacctatcacaacaagcgattccccccaagtcgaagcagcagaaccaacagcgagccgccggccgccaatggcgttctcatcgccggcttccgcgcgtccgcagcgctcgcctgacgaggtggaggacatcatcctccgcaagatccttctcgtctccctcacgccgctggccaaccccgggcccgccgtcgcctacctcgagctcaccgccgccgagctcctctccgagtcgcgccctctcctagctctgcgcgacgccgccgagcgcctccttatagaccgcctctcgctcccggacccgcccgccgggtctccgacccctttcgccttcctcgtctccgctttccgccgcgccgccgacgaggcgcgtaagatctccaccatccgcgacgctgctctccgggcgcgcctcgcggcctccatcgcgcacctccgggccctcattctctcctacgcccgtatcgtcgccgggaaccccgacaccttcccctcccaacccggcgcgcaacaccccgccgccgaactcctcgtattcctcctcgctgaggcagccgacccgctagaccccaccccaggccccggggcgccgccgccgcctggcttcattgatgagttcttcagcggcgctgactatgactccatcgagacggccatgggggagctgtacgagcttcttaggcagagcgtcgataaagtttcggccctcggtgacttccagcgcccactgcgggtgctcaggcggcttgtggggatccccaattgtgccaaggccctggtgaaccatcccaagtggataccaaagaatcagatcatgttcattggggaagggagagtcatggagctctacagtgtccttggagccttcttccatgttagtgctatccgagaccgtgagtttgccagcaagcctgatgtcgggcaacaatgtttctcagaagcatcttcacgtcggccagccgacttgttgtcatcatttacaacaatcaagagtgttatgaatggcttgtatgatggccttaaggatatccttctaaccctcctaaaaaatttggatactcgagaaaaggttcttgagtatatagcagaagtgataaataaaaacgcatccagatctggcatgcaggtagacccattaaaatgtgcaagttcaggtatgtttgtgaatcttagtgctgtgatgctccgtctatgcgagccttttttggataacatggaatcaaagaaggataagattgatgtcaaatacctcttttgcaacaatagaattgatttcaaggatttgacagctataaatgcgtcttcagaagaagtctcatcttggatagagagcataaataacgagcatgctcaaaataatgccagtggagaggctcgttttgtggaatcacaggaagccacaagctctggcaaaaatagtgcatcttcacaacttcggtgctcaaagaagaacttctcatttgtttgcgaatgtttcttcatgacctcaagggtacttaatctcggtttgatgaaagctatatcagacttcaaacatatttctcagcaacttgcaaggtttgaagatgatttggagtcaaacagagcagtcagagatcagggagggggttcaccacagcttgaacaagatataactcgtttggagaagattgtcgagattttatcacaggacaaattatgttatgaagctcagatactacgagatgacttcctcagcttcataattatgttcatgggaagcacatcttacattaagaatccttacctaagagcaaagatggttgaagttttgaattgctggatgccgcaaagaagtggcttgagttctacagcctcgttgtttgaggggcaccaactgtgtcttgactatcttgttagaaatcttctaaagctttatgtggatattgaattcactggttcccatacacaattttttgacaagtttaacattcgacataatattgctgagcttctggagtatttatgggatgtccccagtcaccgaaacgcatggagacaaatagctaaagaggaggaaaagggtgtatacttaaattttcttaactttctcatcaatgatagcatctatcttcttgatgagagcttgaacaaaattttggaactgaaagaaatagaggctgaaatgactaacactgttgagtgggagcgcagacctgctcaagaaagagaggagcggctccgtgtatttcatcaatgggaaaatattgttcgatttgacatgaggctagccaatgaggatgttgggatgcttgcattcacctcggaacaaattccagcacctttccttctccctgaaatggtggaaagggtcgcgagcatgcttaattacttcctcttgcaacttgctggtccccagaggaaatctttgactgtaaaggatccagagaagtacgagttcaagccgaagcagctgttgaaacagattgccaccatctatgtccatatctcaaggggcgacaaggaatctgtcttcccagctgcaatctcgaaagatggcagagcatacaacgatcagttgtttgctagtgcagctaatattctgtggaagattgggggtgatcccaaaatcatacaggagtttatgcagcttgctggtagggcaaaagctgctgcttctgaagctatggatgctgaggcaatccttggggacattccagacgaattcctggatccaattcagtacactctgatgaaagatcctgtgacactgccatcatcgaaggtcacagtggatcggcccgtaattatcaggcatctgctgagtgattctacggatccatttaaccgctcccacctcactcaagacatgctgataccaaacacggagctcaagttgcagatcgaggaatttgtccagtcccagcagttgagaaagcgaactgctgcggtgtcagagattggccaagcggatggtgctgatgatatggccgaatgaattgtgcgagcagcagggatggacattttcttttgtggtggggaaagacggatgctaatttacgcgaaatttaccagttcatcggtccgtataaaatcggtttgccagcttgtgtcaccatttgtctccattctttgtaaatgttgtaagtgcacggttgtaattttaagtccctgtttgtttacctttgagattatggccctgtttgtccttctaggattatatagtccagcttattataagcatctattgacctgcttatgaattatcataatttaggtgtttagattacataatttatataataatttgtgttgtttgttta

SEQ ID NO: 33449 - DNA, 232 bp, Zea Mays
gtcacgcactgttcttagaggacaaccatggtatgaggtagtagtgcgtattccagaacatgctagaaaaccatcttggccgtattggatgttccatgccgaaggaatgactccttgggagggtgctcaggtagctgccttagaggtactaacaaccatttgttaccagaaaagggaagaaatacaagccacatctatgaggttgttccctgcagttgccttaagtgacccg

SEQ ID NO: 33450 - DNA, 793 bp, Zea Mays
atggagctcgatcgaaagatgatgatgctgctgctaatctatatcagccatctgctattctgctcgcgagatctcctcaaagaccggcagcctcctgctcttcttccggtacggcaccgccacgtcgagcaaagccagcatctggttctcgacccagtcatcgtcgtcgctctcgctcccgctcccgctcttatccgccgggcgtcgtcgtccgtcaccgccgccaccgcccggccacgtcgtatgcgccatgatccgggccagcagctcctccactttccggacgatcttgccgtcctgctggtcgcgggcctgcaggtacctcccggcgagcacgtcggcgaggacgagctcggcgtcggcgagccgggcctgctcgatgaggcagagggcgaggttgcacgccttgttggcgtccgggtcgatcatctgcgccttccggtacaccacctccgccgccatgaagttgcgctgctgcatgtacgcccacgcgaggttgcccaggacgcgcgatgtctcttgcttgacggagacgtggatcttgcggccgtgcgagcgggcgcgcttggtggtcctgccatggaacgcctcgccgaggtagatcttgcggagcttctgcttgagcagctcgatctcctccttggtccgcccgctggccttgtagaggtccaggaggatgttgtccagcggctcctgggactgcttcgggcacaggtgccgcagcgacctgatggcgtcgatggcctccgccagtgaaccacctataactacaacaaaagatctcataaacgcc

SEQ ID NO: 33451 - DNA, 4752 bp, Zea Mays
cgttggtcgtactccagtcgtacggtgaccgcatacatctggtttggagtctggcttctgcggctaagcaagattcatttggccgagcaggattgatgactcttgcatcctgtgttgcttcatgcacacgtcagtcagagacaaatgatgtgccatgtgctatatctgggaaagcagtgaccaaatgtgatggatgtgtacctacagaagttaggccaacagatttgttagatgtcttatggattctcagtgagaggagtaaacaacactttaatccaaagtatcgtctgaaagtttgtgaacaggttatccaagttgcaacatcactgataaatgccactgaaattccacttaaccagcttctgcatttcattgccacaattcctcgagagttcactgattatattggaccattgagagtagtagttcaaaaatggttttttcagaaggaagaatgttctcctggtgacactttgttgagtaagctgatcgatttctctgccaccttcgtaagtcaaaaacggaatgaaggttcgaatgtttttgatgacgaggatgtggatgcatgggaagctgaagcaaggaggtgggctagaacccttcttcttgtaaccgaggaggaggaacatttgaaacgaatcttcaggtttttggaggcatatggctacaagctctctgagcaatgtcccagtggagatttcatacccataaaattttttatcattgttttaagcttcattgaggaacttgagctgagacagagaaagcttgtttgccggagtaatacaatcttaagaggttcagatacattaaatggattagtgctcgatgatctcaacaaaatgttcacagaatcacttttgctaattttggaaaatatggtggcattcagtaaactgtcttgctccattttctggttagatgtggacaacaaggatttacccccttctatcaaaggaaagcttggaggcccaagccagcgtcgtttggctacctccattacttcttcagtattacagggtatttggtcaatgcgatgtgttagttctgttgcctcatggtgtaatccttacaactccgatgattctgtttcttctgcattttccgtgctatgggacttctatttgaatgttacccatcactccactattgccaatgagatcggagctgaacttcacctggcagcttatgaagctcttgcctatgttctggcagttctatctactgcttccagtactcagtttttggattttgtggaagcgaagcagacagatcaagcccacaagttttcattggacattttggtcaccactttccttgacaacatcaaccatcttcttacagagggaactctgacgcgaagcagaagagctgttttgatgacttggaagtggctttgtatggattctcttctatctatttcaagctgctatagtgacaatgaatctcaaatgaagaggttggaacctttattttctgattcaaccctccgatgcatttttcttgatattatcgaaagccttgaaaacactggtgaaaattctgtcttatctatcttgagatgtgtgagatctgttttgagattgctacacctgaatgagggcaacacaattttttcctctttaggcatcagctatgagatgatgatgcaattagcaaagtcttcctggatcttgcaccttaactgcaacaaacgccgagtggctcccattgctgcactactatctgcagtattgcacccagcaatattttgtaatttggaaatgcaccagacaaatgaaaaagggccaggccctttaaaatggtggcattcgacgaagattttgaagctgaactctctgaaaaccatgaagcaagatttgaggtttccatgctagcacaaagtcctgatcgtgaattcacagaggtgttcattaatacagaattatatgctcgtgtttcggttgctgttctctttcatcagctttggaaacaaatcaaagaacatagtatattggaaactgaagaagctcttgaatgcggcaaactatttctactagaacttctggactcagcggtgaacagcaaagatctttcaaaagaactctacaagaaatatagcagtgtacataggcgtaaagttcgtgtgtggcaaatgatatgtgttctatcacactatgtagaagatgatattgttggagaagtgacatctagcattcacatctgtctttatagaaataatttgccagctgtccggcagtacttggagacgtttgctatactcttatacttaaaatttccaaccttggcagaggagcaacttattcctatttttcatgacaaagggatgcgacaacaggcactatcttcatatgtttttatagcagcaaacgtcatacttcactcaagacagtccgtccagatataccacctgaatcaattgcttcctccaatactgccgtttttaacatcccatcatcacagtttacgtggttttactcagcttcttgtccattcagtgctatcgaggttgtggcctactctgcatcccgaaacttcagaagatgcagtctttgagaggaggtgctttcaagaattgaaagattatttggcagaaaattctgactgtgttaggcttagagtttcaatcgaaggtttccttgatgtctttgatcccaatgcatctgggaccccccctggaatatttagcgcccgtcctgaggtgtctgacttcgaatgtgttccggtgtcagtgatggagcgtgtgattgagttcctgaacgatgtgagggaggacttgagacaagctatagcaaatgatacagtaacaatcaagaatgaggatctcgcggtgggagagcatcacaagagtgacgagagcgtgtctgagatggtaaaaactggtcaagaggtacttgatttccagaagaaaataacaccccataggggggactccgagcaagcattgaacttgaacaccagaggtcattcaggcgttggtgacgaatacatttcaagaataatttcagagatggaggaagatgaccaagttttcgacctagcgctagaagcaagattgcatgctgcggaaacgatcaagcagagccggcaagaactgatcgtggttgcgtcattggtggaacgcataccaaatcttgcggggctgacgagaacgtgcgaggtattcttttttttgggtgacttggtgtatcttgtgggggacattaaatctcgcctgcctctgcctgacaggtcttcagagcagccggtctggttgttgccgacaagagcgttcttcaggataagcagttccggctgatcagtgtgaccgctgagaaatggctgcctgtgacggaggtccccgtggacagcgtgaaggcttacttggagaggaagcggggcgatggttactcggtgattgggctggagcagacggccaacagcatgcctctggaccggttcgggttcccggaccggacggttctggtgctggggcgggagaaggaaggcatccccgtcgacatcatccacattctggacgcgtgcgtggagatcccgcagctggggcgtggtgaggtcgctcaatgtccatgtcagcggcgccatagccgtctgggagtacacgcgtcaacaacgcaatcagcgttagcttgttgcttgtttttgctccattgaccattgacgacgaagactactactactacctgggagggagagtagaaatcaacatgcagcactcacaggaaggagagaaagacctgggctgggctgggccgacagtaatgaacgctagcccaccttcctttcccaccaccaagacgtacaagtcagactatattacttcatttatttgtgctaatatcgtaacgttttattgtgtaagcaatttggtacttgaagcctgcctgcatttggatttggagcggcatcagaagttttttaaagtatttattcgtagaggggtcgatcgagctcgcccttttattgctgcaaatatataatacacattattactgctgcaaacataagattacgttacattacattaaatgaaaagctatattacctcccgttctcgttatcccgctagttcatttttaacgaaacagtgacaaatatgaactaaacagcaacaaataaaaagaaacggaggggtactacgcttttttttatttcagtgcgcgcgtgtctgctccagacggtgctgctgcgcccagtccttgacgatgtgcggctgctgacccgacgacgaggtcgtggtctgaaggtagcggtacacccacgccagcacagccaccgcagccacgccgaaccctcccgacgaaacgatgcctaccgtgagcagcgccaccgtgatggccgccggcaccagcacggggctgaagatcaccatcaatggcgtcgccacgatgagcgccagcaccgtgcccgtcaccgccagccccgacaacaacaacatggagaaggctgccgtggctgtggctaacgccttggccaccgccatgggcgcgggcggcggccgctgctgctgctggtgaccgtagtgggtggcgttgtagtcatcgtcgccgtagaggcccctcatgtagttctctccgacggcctcgcttcttctccctgcacgatggtcatccgcatgatgagcagtggccatacaagctctggctagctagctagctagtatacaatgattcaaaagaaatagatgagtggagcagctagtaggttcttgcataatatatatatagatagatagataggataaggactgga

SEQ ID NO: 33452 - DNA, 642 bp, Zea Mays
aagcaaggcacatgaccgccgtctccgggtgggacgacgagtctgtcctcctcgatgtgatggtcgctgaggccaccctcgcctgtgagtcccatcgcaagaggcaggcctccacctgctccaacgatgacggcaccggatccaacaccaaatacggagatacagttgacagcaggttcagcgacacatgcatatgctactgtgattgatatgggaggtgcattttttttgcatatttgcctgtacatctgctttgagctgatcagccttgtggacacaggcactatgttcggggagcctattatatgcaaaaacattccaagacttgttctagtaacaggtgatggttgcatggtgcaacaagaacttgaaggactggaccaagacaagtgcaggatagatagtatacgagtttattctatgggccaatggtgatcatgattaggcatcagtgttgcaaacctgtcttctctctacccacctttgctctttattttctttgcttccgttcagcccaggagcttgattctcacgtttttacatgttttgcttgcctcatattattaaatgttttttacatgcttaaatttcaaatcatgtcaggccctggaacaactttattatgttctcattgtgttctca

SEQ ID NO: 33453 - DNA, 730 bp, Zea Mays
atttcttcatgcataataggtcctacatatgaatgccatggtggctcagtagcagaaggcagagtcgtgacctaaagctagccaaggatctgcagatgttgattgctgcatctccacgtctacttaatgtgggggatccttcctttggcaagtccttggtggcaagcaagaaaaggctggttggagatgtggaagaacaacttgagccagataaaaacgatgatggggtgcaagcaacgcagcagcagctagagctcacaaaagagaacactgaagcaagagcttcaacatgttccacctcccaagagcttcaacatgttctgctccggtggctcaggaggcaagcgtcgcacccgccccgattttgattccaaggacgaatacaacattcccgccggactggcgatcaccgtacctcctgtgcctcgaggtggagccgcccgtctgcgactcgcgcagaccacatctaacgcgtgcggcgctcgtccggctcacgggcaagcaccccttcaacttagaaccttcggtgtcgtggctgatggcgcacgacttcatcaccccggcaccgcaccactaccactactggaaaaatatcggctagaaaccgaagttcttactctaatagatcaacgttcttatgtaaagttgtttcgataggtcttatctaatacctgtaatgtacaatgggcagtttgatgttcataatgtaaagttgaacgttggactgttg

SEQ ID NO: 33454 - DNA, 987 bp, Zea Mays
gccttcatcagttcgttctgcgcgggaaccgccgatgggggacgccgtggaggacatcgtcatcgccggcgcgggcctcgccggcctcgcgacggcgctcgggctacacaggaaaggggtgaggtgcctggtgctggagtcgtcgccggcgctgcgcgcgtcggggttcgcgttcaccacgtggaccaacgccttccgcgccctggatgccctcggcgtcggggacaagatccgggagcaccatttgctctacgagcgctactggtgaagcagctgcagaagtgagcctaaagattcagagcaaaagcgggccacacgagatccggtgcgtgaagcgggacttcctgctgcggacgctggccgacgagctgccggagggcaccatcaggtactcggccaaggttgtcgccatggaggaagacggcgtcggcggcgccaagaccctgcagctgcacctggcagacggttccaccataaaggccaaggtcgtgatcgggtgcgacggcgtgaactccgtggtggcccagtggctgggcctgccgaagccgatcctgtcggggcgctcggccaccaggggcctgctccgacacctccgtctactggaactacacctggtacccgtcccccgcggacggcgacgccgaggagagcgtggccaagatgcggagccacgtggtcgccaagctgcggggcgccaaggtcccggccgaggcgctggaggtggtggagcggagcgagatgagcgacgtggcgtcgtcgccgctgcggttccggtccccgctggcgctggtccgcggcagcatcagccgcggcggcgtgtgcgtggcgggcgacgcgctgcaccccatgacgccggagctcgggcagggcgggtgcgcggcgctcgaggacggcgtcgtcctggcccggtgcctgggcaaggccttcgccctgctcggccaggagcgggatgaggggcgggtcgtcacggcggcgctggaggagtac

SEQ ID NO: 33455 - DNA, 3632 bp, Zea Mays
acacgaggctccagggcctccatcgccacaccggtgcgtgcgagcgcgattaccagaggcgggcggcagggacgatgctgctgcaaaggcgcggcggcctcctctgctgcgggtgcggcgccagcgccgtggccgtggccgtcagtggccgcgttccggaagacgacggcggtgccgtcgtcgatggccagccgcctgacgccaagagcgtgtctggtaccagtgtctccgctgccgtgacgaccgcaaacgcgaggcagctctcgtgggcgcaggtggaggccatgacgggaggcttcacgtcagccatcgtcggcgagggcggcttcagcaccgtttacctcgcccgcctcgctggctccctcgccgccgtgaaggtccatcgtagtagcgagcgtcttcatcgcgcgttccgccaggagctcgacgcgctcctccgcgttcgccatccccacatcgtccgcctcctcgccttctgcgaccagcgagacgaaggcgtgctggtgctagagttcgcgccgaacggcagcctgcacgagcagctccacggcggcggcgcgggcgcggcgccgatgccgtgggcgcggcgggtgccggtggcgctgcaggtggcccgcgccctggagtacctccacgagcggtgcgagccgcaggtggtgcacggcgacgtgaaggcgtcgaacgtgctgctggacgcgggcatgggcgccaggctgtgcgacttcgggtcggcgcgcgcggggttctcggcggccgtggccgttgccgctgcaggcccgcgcccgcgcgccgtgttcgggtccccgggctacgtcgacccgcactacctccgctccggcgtgagtccagcagatagaagcagtcaaccagcagcagcccaagtcaagcctcctcgcgtgtccctcggctcccacgcccacaccgaaatttcccccacggagctcaactgccggtgccggcgcgcgacaggcggcacacacgcccgctcctcgcgtatggcgaccacgttgacgcccacgcagcgctatgcggcggggacgctcctggcgctggcgctccgccaggcgcagatccaccagtccgagcccctcggctccggccccgacgacgaggagcgcgccagcagcgccagcgggagctcctcctccaccatatccagcaccggctccgacactacctcgggcgccggcctctggacgcacgattcccgcggcctcctccgccccgtcttcaggttcctggagatcgagcccaaggcatgggcggggatggaggagacggccgcgtcgccggacgccgccaagcatcacatcggtgcgtttataagcatactctttgaggaagacggcgagagctcttcagacaggctagagcaggagatcgcattggcgaaagcagttgatgtgatggtcatgagcttgggcagcgacactgcaccagatgagaatatcaaagacgagtttaaatactccacggcctgtacctatgcgaccttggagtctacggaggcaggctcatccgagaacttgcttggaatcgtcaagctgtccttggaaaatgttcctgtgaatgagcaccgcaagatggtgttgctgtatgcgcttctctctgcatgtatcgctgataagcctgtatcgcaagaggaagaggacaggaagtcgtctcacttcaggaagggctatgatgctcggcatcgtgttgctcttcggttgatagcagcatggcttgacgtcaagtggatcaaaatggaagctatggaggtgatggtcgcatgctctgccatggctgcggcaaaagaacaagaacaagagcgtgaaaatgcatcaccaagaagcaagtgggagaaatggaagcgtgggggaattattggtgccgctgccttgactggtggagcgttgctggctattactgggggtttagctgcaccagccattgctgcaggatttggtgctctagctccaacactgggcacacttgtccctttcataggggctagtggatttgctgctatggctgctgcggcaggatctgttgctggctctgtggcagttgctgcctcatttggaggttggtataaatgttcctttggaactcttatgatattatctggagctcttatttcttcattatatataacagtcaagatttgttttaagttagcaacggtcacctccattatttgtggtggttagtgtattgcttaggaaacctacacaattaatgaacatacaccactctgtataagcactggcacatttataaattactaaaagtgttcccaaatgcatttcttgtaaaagttaacttgtaatgcagtatccaaaaaagagatagaaagtggtgtacaaatgttgtacttagcttttaatgttcgttgaattgatttccgacaaattagctgctggggctggcttgacgggtaccaaaatggcaagacgaattggtaaagtgaaagaatttgagttcaaacctattggtgataaccataatcaggcgccttgctgttggcatcttggtttctggatttgcttttgatgaggaggatttctggaaaccttgggaaggatggaaggataacctagagaagtacatccttcaatgggagtccaagcacataattgcagtgagtacagcaatacaggattggctgacatcaaggcttgcaatggaattgatgaaacaaggtgctatgagaactgtcttaagtggccttcttgcagcatttgcttggcctgctacgttgcttgccgctacagattttattgatagtaaatggtctgttgctatcgacagatcagataaggcaggaaaaatgcttgcagaagtgcttcttaagggactgcaaggaaacaggcctgtgactcttgttgggttctcgcttggagcgcgagtcatattcaagtgcttacaggagctagctttatcaagcgacaatggtatctgttctttagttatagtaacctaaatttcatatgactttgctcttatgcttgatggaatgagtcagagggacttgtcgagagggttgtactccttggtgcacccgtttcagtgaaaggtgagaggtgggagcctgccaggaagatggttgcagggagatttgtgaatgtgtactcgagagatgactggattctcggtgtaaccttccgagcaagcctgcttacccaaggactggctggcatccaggccattgatgtgcctggtgttgagaacgtggatgttaccgggcttgttgatggccattcttcgtacctgtcagctgcccagcagatcctggagcaccttgaactgaatacctactatcctgtttttgttccccttccggaggtcaacaaataacagatgtagataggttgacaatagcagagaaaagatgtaaatatcagggaggaatataccttcgaatttacacaaaaaatgttacagctgtctagatgatgaatgctttgtagtttcttggtgactaatcctaatcgtacagtagctctagttacgtgtagatatctattgtgtacatagtaaaaacaaaacaataccgtctattgtgatcgcaagaaaagcttgaatctagaatagggaagtaagtacttccgtccaacaagagattaatctaataatatttatgttatata

SEQ ID NO: 33456 - DNA, 1220 bp, Zea Mays
gagtcgtctagtgtcaggtgatctgaatctcattccggtggcttctgccaagtgctgaggatcggcatccggttcggttcgtcgtcctcgtccccactccccacctgcgcagctgcgctgcgccatctcgaatcctctccttccaccatctcgaacctctccttccgtctcctccccggccgattcttccagtctccagccaccttcaactgccggccgcaagtggccccgcgtctcacccctaaccccagtgaagaatctaggcgtcgtctatccagccccgtcatcatcaccatggaggagcatgggctgtggtccagcggggccagcgacaagaacaagtccatggttgagcagctgcagaggtacggggtcatcaggtcgaccaaagtcgcggaggtgatggaggccatcgacagggggttgttcgtgccacctgggggctcgccataccacgatagccccatgccgattgggtacaatgccaccatatcagcaccacacatgcatgcggcttgcctggagctactggagaagaatcttcagcctggaatgcgagctctcgatgttgggtcaggcactggatacctaactgcttgctttgcactgatggttggaccagaagggcgagcagttggtgtcgaacatatcccagagttggttgctacttctactgaaaacatcaagaaaagtgcagcagccccacatctaaatgatggatccctcagtatacacgtttctgatggcagggaaggttggccagaactggcaccctatgaagccatccatgttggagctgcagcaccgcagatccccgaggcgctgatcgagcagctgaagcccggcggcagaatggtgatccctgtcgggacagtcttccaggagctgaaggttgtggacaagaagttggatggcactgtcagcataagagacgaaacgtctgtgcgctatgtgccgctcactagcaaggacgcccagttgcacgcaagctgagtgatctatcatgtcaaaaaaatgttatcctcacctgacaaggtgaggcattcaatcgaatcgctacccttgtaaatgtattaatcctactgtctcagtaaatgcgctggcttggaaataaagtaaatgatggaacatcatggaacgtttgtttttcttcagctgccccggtgttcttactatgcaacttgtttcttcagagcaacagctgccattcaaaatatttt

SEQ ID NO: 33457 - DNA, 2249 bp, Zea Mays
cttcagaagtcgccgcgacaaggtgctgaattttgactttctaccagaaatcggagcgaaccaaactgccgggaaaacccctcgcctgcggcttcgcgtcggccgccgccgctgccgacactttaccgcgtgccttgcgcccccgcgccgccgatgcgatcagcgacgcacgccagatccgagcttctgtaggaccttcagccgtcgccgtcccatgggggactgcgtcgtcgaggacggccacgggcaccactactcggaggcggtggagggcgcggtttcgttgacggtagccgtggagctcgatgagcgggcggaagagtcgcgggaggaggaggagggtggcgggcagcggaagaaaatgggcgggatcccaagggagccgtcgttctcgcggtggtgcagggacccctctgccgcctccgcctccaataccgccgctgctgcggcgaccagtgacagcgacgcctcagaggagttcgagctgccgctcctgccatcctcctcgggcggcggcggctcaccgatggacattgaggtgggggcaacggcgagatctgatgatctgccgatctcgccgaggttgcttgcgaaggtcatcgggttgatagcgtgttggtacacactgagcacgtgcttgacgctgtacaacaaggagatgctgggaaagcacatgtggaagttcccggcgccattcctgatgaacacagtgcatttcacgatgcaggccgtggcgtcgagggccatcgtgtggttccagcaacgaggcctagagggagggccaagtaaaatgtcgtggaaggattactgtttacgagttgtcccaacagctttggctactgctcttgatataaatctgagcaacatttcacttgttttcattactgtgacatttgctacaatgtgcaaatctgcttctccaattttcattcttctgtttgctttcatgttcaggcttgagaaaccgagctttagccttcttggaatcatgctggttgtttcatttggagttctactaacagttgctaaagagacagaatttaatctatggggatttatgtttattatgcttgctgctgttatggctggtttccgctggtccatgactcagattcttctccagaaagaggaatatgcattaaagaatccttttaccttgatgagtcatgttgccccggtgatggcaatagtaacagcaattatttccatcgtgatggatccatggcatgacttcagagcaagtcacttttttgatagttctactcacataataagaagcagtgtgttgctgcttctaggtggggctttggcctttttcatggttttgacagaatatgtccttgtttctgtgactagcgctgtcacagtgactgtagcaggaattgtgaaggaagctgtcactattctggtataaaaggttcaaaaaagggcatcacagtgaagatgctgggacaaatatccaatcttacaatgggacttcaaagtacgttatccttgatgatgatactgaagatcaggatgattcaggctgacctgaatatgaatgcagactactatatgcactggcgtttccagagaagcaagatcttctggtgcctgcatagacttacttccacaggctaactgatatcatactattttttgagttgatcaaccgctgtggccactggccagccatgcacgagcgtgacgcttgcagccgtgtgacaagttgagaagactacacgctcgtacatggaacatacaaggtacagcctggtatcagtacagatgttttctcctttcgttcaagacaaagaacggtgcatatatctgaacgaggcattctgcagtatgtccacgaagaaaatgttgcatcaattacaattagaaacacaggtaacacacttaactttatggatgaggatagggttcggttttgtagtgcattctgattgttgaagggagattcagcatcggaacatagctttcttttctttagttctttctttttttgagatgaaaaataaatagtactaacaatcttatatgtaataatgttgtatttacgggaatgtgtaccgtttcacgtaggagcatttcgcgccttattgtaatacctcatcttgagaggtcagtgccaagtcggcacggtccatctcaaatttcctttgcgtattttgagagcagcttgtcattgtacatgtcatccattagcatatcttggcgtttggcttcatccgtaggactatgagtatatccagaaggtt

SEQ ID NO: 33458 - DNA, 4867 bp, Zea Mays
attaatgcatgatgagaagtctgttagggttactatgaacaattttgatcacttatgtgcttctaccggtagagtgaagaccagaatgacaacataccgttggatagcagagaagtcaatcccatttttgaagaaggatccaaatatgggcgcaaaaaagttacaagaggagctagaggataaatataatgtgaagctaggatactcaacagtgtgggctggtagacagaaggcggtggaacaaatatttggaacatgggaagaaagttttgcagatttgtataggttcaaggcagagattgacgcaaaaatgcctggaagtgttgtcgatttagaggtgcaggaggaagaggatggtgtgtattttcgcagattcttttgttgtttcaaaccaagcattgatggttttctgaacggttgcagaccgtttttgagcgtagactccacagcgctcaatggcagatggaatgggcagttttctgaaaaggtaaaaccgcattgcaatttatcagtttgataatttttgtacaatggagagaccacattatttttcatgtgcaggaagagtcacgccaaacaagggcgaccattaggatcagcaagtacttgcacgcccaaaaggcaaaaagttgtgcaaaacgagtcaactaatattagtccggggcctgttacaagaagccaatcggcgttatcaacgattggtgaaggctcaagccaggaaatggccacacccaaaaggcaacaagttgtgacaaatcaatcaactaatattagtcctgtccctgtcacaaggaggcaattggcattatcaatgctcgatgaaagcacaagtcaggaattggccacaccttcgagggcaaccaaatccccttccaagcctacatcaaggattgcaaggaagatcactccaagaaaattcaaaaagtgaatgtttttgtgtctacaaaactatgatattggatgcttttgtaatcttaattaattagaacggaggcatttggatgatattttggcatatgtatggattgttgacattaaacttgttattgtgcttgctgttatgcttctgtatgggattattgacatttggatgacatttgggcttaatatttaaatcaaacttgctattatgcttgaacgtggtgcacatgtgtgcacgttgctacaattttttaatgcatgagtttgtattttctaccatacctattcttctttttttacattttttattcgtaatgtcttttatactttgggcaaactctgattatactttgggcaaactctgatgtggatgaggaggaccaaacggcgcagctctaatgtgcacaagcagaagggtactttggtcatttgaggtcagagggaaaaaagaaaacagcaaaagtacttaagaaagctgaaaagggtaaattttgaagggaaaaacgtatttggggtagcagccgaatggctaacgtactaagggataaagtctgaaaggctaacgtattgaggggcagcagctgaaaattctctatattaggccccgattctgatgaggcccatatgtcccggcacgtaattacgagcacctcccagtccgacctgttcggatacggagcccacgaggccacgaacgaagccctaatcatccgctccaaactccccgcaccggcagagatcagccgtccacgagagcatcacggctagggtttccgatttcaactaggacccctggatctatgattctatgaaccagaggcgagacgagtggccgcagcatcaggaccgtctccaactcgccagtactcagccgccgcaatcagggacagggagctcgagcgcgcgccccacctgcgccgacgcgatgcgggccaaggttcctcttccctcgcctccgctgcgttcttctttccatgatgatgcgatgaaaccgtgtcctaggtagctttgcggagctagtcattttctaggttttcgccgtgggctgtgggtggccagaggcgacaatcccagcgaggtggtggcgttgggcgccgcatccgccttggccgtcttgctggccgccgctgcccctgccgcagggggaaggacgacacggaggagtccaggtacaaggccccgactgcaggtccctggttcaagcccaaacgaaacaaaatactcaaaccaactctcgccgccgccgccgatgacatcggaggagcatccctcgtctacgtcctcggacggcagcacgaccatcggctccgacgaacatcttgattccccgccatcaccttcgacgttcttcgactctcctcctgaatccgatgactccgccgcctcctcgctgctctcggacggctcttcagagtccgagcccatcattttcaagaaaccccgcccacccgtgcgctcgtggccggcctccgacgagatcgcgatcctcgagaccgtcgcgtcgcaccggcagaagcacgggcgacttcccctggcagacgacctcgccgccgcggtgcggggccgcctcagcgcgggggaccgcctcagcgccgcgcagatcaccaggcggctgtgcgcgctccgcaaccggtacgacaacactgttatccgcctcaaacgcggcacgatcccggcgaaggacagcgacgtcaccatctacaggctctccaagctcatctgggagggaacgcgcagggggaggatagagaagaagacccgtgtgcccgacgcgcgcaatgacccaagagggttcgacgatctggccgagctgtacccttgcctctccgcggaggtggaggcgattggtgcgaggtgcggctacggggcgctgaagagggcattcgggcgcatcggtgacgacacggcggcgcggctggaggcgaagctgaagaggcagcggatggcggagaccagggcgagcggaaagcttgaccggctgaggtcgagagtcgccaaggcgcttcagggatttaacaagtgaaatggtgatttcttcatcttctttctgttgctacatgggttggcgtagaaagacacaataggattggttccttcgcattgtttcatggttgaaatgttatcagattctctggcaagtttgagggcactatcaactgcaaagaatttgaaatgtcaatggctggcattgagtttgttttgcactaccattgtctgtgctaagaacaggatttcagaagcaaaataaattttcccgctgtgataaaattcaaagtacagaagttattggtgatgcatcgttgggaaacattatatttatgatcatgttactcctgggagtacgatatattctcaaattatatttcgatattataaggtacactagcatgacaagttctcttgttagaataaaacatttgttgctatcaatggatccctgagtattcttgatatgcaggtagtagagatcatacaacagtctaatagtctcatagttcatttctgttctatgtacattttttgtatttcttatttcatttgcagtttagtttgcttgtccatgaattttatttgtaataacaatgttccattactcaggtatagggacattctgttggctgtcatcgtttcatgctacttcaagttgtttcttttcacaatgatggtataaaggttttttatgtattaataagcatacatgccattttacctttctgaattgagtatgaatatttgcaggtttgggagtttccatcatctgttatattcatcgttgaaatgtttgttttctagtcagtgggatgcatatatacattagtaacagtcttggtaagtacggcacgcttcttgcataacataaattgagacatttatttgagtattcttagaccttttctaggtgtaaggatgcttacacataaaaaacattcatggagcgagcataggccgtggatagcataagataaaactatgttagggttctgtgtagcgtcaactgacatatggtcgtagttttttctattagttctgccattttttcctacgaacatatatgccatggttagatggaaagggccagatgtcttcagttcagttctgacgtcaaatgatcaagtccggaatattggcatgcactttgtatcctatataattatttgatcgatcttggtctcactcagcgtctacaatctacatcgacgtcttctagagttttctgaaatggtagtgtactagtgtgaagacatgccccatgttaaccgtgttgccttaattttttcttcaattttttctagatgtattgatggcttccttctgtactgattttgtgacaattctatttctttatttaggtgtaagttctgttcaatgttgtgagacctgagtataccgtttctttgcagttgttccgcagtttccaaaagcccattgtttcgtggtctgcttactagcgcatgcagcaaaatacttgacccagcgatggatccttggaacgacatgagcctactcgtccacatcatcctcgagcttcaagcacggccctaatcttcggatggactgttctggtgcttctagagacgtttaggtatattgtgccctgattgatgagccttgccatttcctacccagaaaaaaaaccaaattagagttgcttaatgattcaaacaaagctgcttaatcacgcaactgatttaatagtagggctttatataacgagaggggagaccatatgtctctaccaagatacttttcgtgtactcatgttacagtggtttggacttcatgctctaacaatattataaagtaagaccactgcttcacctgttttacatctcccctctcgggacaaaagaaattggattcttgtgtttttgcagataggaattaatttaggctccctttggaacaaaggaaagaatatagaaaacctactgcccctttggaaagt

SEQ ID NO: 33459 - DNA, 261 bp, Zea Mays
gaaatcgtcatcgcccttacacatatcgatttgatttatgacatggatcagtacaaagacgatatcaagtatgaagaggacttcttcgtgaattcacgtggaaagaagctcttcaattgcaggatacggagccgagtgcagcatatccatgggagttcagttggttttctgatttgtgcagtatcagtacaaagacgatatcaagtatgaagaggacttcttcgtgaattcacgcggaaacaagctcttcacttgcaggat

SEQ ID NO: 33460 - DNA, 2178 bp, Zea Mays
ctccgcgccaccgccggtaaccgccaccagaagtaagagaaaccacgcgtgtcagccagccattggatcaccaccattcgcgctgttcggcgtgcgcacccgatcccgtctccgtgcggctttgtgagtagagaagggaaggggaagcaggagcaggaggggttcgtcatcgcgtggtggccgcgccgctctgttcctccgtcccctcctccttccggctctcgctgtcacatgtcgtgtggtgtgggggcgctctgatccggatggtgcagcgccgcgggatcgcccacggccatgattgatcgcgaacgagcagttgcagtaactgcgtgaaatgctataccggagatgccattgtgcacggaggtggtttattttgaggaagagttgggacacagtttggtgaattttgttgtgtgctggtctgagagctagtgctgctgggattgaggaaatgcaagttaataatgaggcaccactagggtgcctcaagccaaatatttctcagtataactctccagagcagataggtggtgttgaagggtttcctgagaataatgaaaaaaggaatgatattgttgctgcggaaaaaatctgggaggcgactccaaaccaaggccttagcaggcccatctaccgacaagaattttatgcctggccatatatttattcagattatcaaatcgtgcgtcagccactaccttatggttttgacaaccaattttatcagataaatagggaccacggtttccctattgagaacagggttcaatatcttccattcaagatgctccctcaaggtcacccccatgatgcacagcttcaggaatttcagtattttgtggttattgactttgaagcaacctgtgacaaggtgaacaatccatttccacaagaaatcatcgagtttccatctgtcttggttaacagtgcaactggaaaactcgaagaatgcttccaaacatatgttcggccgacgtatcatcaatttttgactgatttttgcaaggagcttactggcatacaacagattcaggtggacagaggtgtgcctctaggtgaagccttactcatgcacgataaatggctagaggacaagggcatcaagaacacaaactttgctattgtgacctggtctaactgggactgccgtataatgctggagtcggaatgcagatttaagagaatcaggaagcccccttattttaacaggtggatcaacttgagggtaccgttccaggaagtgtacggggacgtccgctgcaacctgaaggaggcagtccagctggccgggctcacatgggaggggcgcgctcactgcgggctcgacgacgcccgcaacaccgctcgcctcctggcacttctgatgcaccggggcttcaagttctccatcaccaactcactggtgtggcaacctgccgccgctccgcagtcaaccgccgccacctgccacttctccccggaccgctctccggacccagtcgtcgtccagctccagcaccagcagcagcagcacaagccgaaggaggcgctggggtctcccgcgtcgctggtgaacccatcgtacgccacccccgcgggagggaaggacagagccatgtactgctactgcggggtgctgagccggtggagcgtcgtgcgcaagccgggacccatgcaggggcgctacttcttcgggtgcgggaactggaccgccacccggcgcgccatctgcccgtacttcgcatgggcctcgtgaatagcaaagcaagcagagatctgggctggtgctttaaccgagggaggcgcgccatgttgctgcggctggctgctgcgcctcccagttccgtatatattattattgttattattatggtataataactttgctcgcgagacaatggaggttatctaggtagtgtctctaacctgtcgtactgacttctgtcgatagaagagaatggggccagatgctgcttaggtgtgatctatcctatccatccatggataataaagaagtttgtggattgctgttttattaacttgatggaactcctccgtaggtgtggtttgtgcaacttggattttgaaggcttgtgcgtctgtgagtgtttgatcaaatcgaaggtggtgtttgtttgctgaatgaaatggttatggaaggtgcctattattcctgacaagctctgttcagtgaga

SEQ ID NO: 33461 - DNA, 552 bp, Zea Mays
aaagtcatgattttttaggtagtagtagtagttagagccagcttgaccagttgacataccgcatatacaatggaaaagaaaataatcaaatagctaacacatcacacacttgtaggactcttaacaaaattagcagaaaacacgttgaacaacatcacacactgcatgaacccacattttccacaatgtaaaaaagaggcagaccacgtgccagaggctcccatgtgagtggggtctgggaaagtaataaactgaggcaagccttccaccacaaatgcggagaggttgcttcgaaccagcaacctggtgactcggtgagacagctctcaccactgaagtctgcccttctccatttccacaatgtaaggatagcaaaaatgtaaaacaaaatcaaatgcggtagatcatgtcaacggccaagatataagtcttatgatacctatgtatggctgcaaacatgtgtcatgaccactataatacttacaaaatcacctgcctgccaagcaacttattcccgccttggcactacggccacctcaaaacactaaagat

SEQ ID NO: 33462 - DNA, 2213 bp, Zea Mays
cgaaaccctagcccgccccccatggacgatccctcctccgcctccaacaagcacaagcgcaagcgggggcgcaagcccaaggcgtcgccgcccttccccgaccgctcctccccctctccctcggccgcccccgctccggctgggcgtcgtggccgcaagccgcgacgtcacgaggcccccgccgacgcggacgccacgcgtccgccgtccccgccccgccgcggggagccgaagccggtggcaaacggaggcgatgtggtggcagtggcggagtcaggccccgcgagctgggatgaggtggtgagggtagtgccgtgcatggacgctgtggtcaaggtgttctgcgtgcacacggagcccaacttctcgctgccgtggcagcggaagcggcagtacagctccagcagcagcggatttatcatcggcggccgccgtgtcctcaccaatgctcactccgtggagcactatacccaggttaagcttaagaagcgcggctccgacaccaagtaccttgccaccgtcctggccatcggcacagagtgcgacattgcgctcttaactgtcaatgacgatgaattctgggaaggagtttcacctgttgagtttggaacattaccagcccttcaggatgcagttactgttgttggttatccaattggaggagataccatatccgtgacaagtggagtggtctctaggatagaaatactttcatacgttcatggttctacagaacttctaggattgcagatagatgcagctattaattcaggaaattcaggtggcccagcttttaatgataggggaaaatgtgtcggtatagcttttcagtctcttaaacatgaagatgcggagaacataggttatgtgataccgactccagttattacacatttcattgaggactacaaaaaatctggagaatacacaggctttcctatacttggagttgaatggcagaaaatggagaatccagatctccgcaaagcaatgggaatgaaaccagatcaaaagggtgttcgtgttagaagggtggagcccactgctccagaatctggatgcctacgaccatctgatattattcttagtttcgacggtgttgacattgctaatgatggaacagttcctttcaggcatggtgagcgcattggcttcagttatctggtttctcagaaatatactggagagaaagctcttgttaaagttctgcgtgattcaaaagttcatgaatttaaaataaggttagcaactcacaagcggcttgttgcggctcatgtgaagggcaggccaccgtcatattacatagttgctggctttgtttttgcagctatctctgttccatatcttcgatccgagtatggaaaagattatgaatatgatgcacctgtcaagttgttggtgaaacatttacatgcgatggcggaatcacctgatgaacagctagtggtggtatcacaggtgcttgtatcagatatcaatataggttatgaagaaatagtcaatactcaggtacttgctttcaatggccagcctgttaaaaatttaaagaacttggcgaccatggtggaaaattgcaaggatgaatttttgaagtttgatctggagtatgaccaggctgctacccaggacattctgacgacgcactgtataccttctgcaacgtcggatgaccttaaggcctagtgggaggagaagggagcatgacgcagccctgggcctgagccagggccatcaggtgggccaatagtttgggccacaatttcggctgaattgattagcgcagcgtacgatccgtgatgaagaggaaccccaatgtttatctgtttaagttaaatatcttttgaggggttgtggatgtgagagtgctggctggtgtctaaagctccgccattatagaaggtttgagggactgtcactgtcagataacaataaactggagttgttacagacagagtcatcgtgaaaacgatagtgtctagtaagaagctgagtttgttttttctttacatgatttcattacaactacaccaaattattgacggggaaaggaatcataattggtccgtgatttcattacatccttggtgtctcaagcttgttccgcatagtacctgctatttgtcaacgatacttttacttctgcttgtaaagtatttgcatcttgtttctggacaagtggtacttaaaagatatttaagcgttgtgaaccaaag

SEQ ID NO: 33463 - DNA, 971 bp, Zea Mays
aacacagcagtaacattcacagtccgcaggccgcagcagctgaatttcgaaggagactgtttcataaacaggagccaggcaccggactttccaggaggataccacctcccgaacatggtgcgtcgacgacccgccaccggggcagccccgagaccccacctcgccgccgtcggtcgcgggctgctcctcgcgtccgtcctcgcggccgctgcctcctccctcccagtagccgagtcgtcctgcccgcgagacaactcactggtgagagacataagccgaatgcagcagcgcaactacgggagggaaggattctcgcatataactgtcacaggtgctcttgctcacgggacgaaggaggtggaagtgtggctacaaacatttggtccaggtcaaaggaccccaatccacaggcattcttgtgaagaggttttcattgtcctcaaggggaaaggcacgctcttactcgggtcgagctcgctgaagtacccaggacagccgcaggaagttcctgtctttcagaataccacattttcgatccctgtaaatgatccacatcaggtctggaattctaatgagcacgaagatttgcaagttcttgtgatcatatcgcgcccaccggtcaagatatttatatacgatgattggagtatgcctcatacagctgcaaagctgaaattcccctacttctgggatgaggactgcttgccagcaccaaaagatgaactctaggtctggcgtcacaggtgaaactgatctcttgttcatcgcgcgtacagcaatgaactgtgagcaacaaccgctcgcccgcctcgctgtagataaggatgtgcctcaccggtgtgcgtgcgccgtcatgcgtacaacaacaaatcagtcgcctgcctcgctgtgacactttccaccatccaccttcatcaagcgtcgtctgcagaggaagctaaatgcggagcatgccgcaccaagtgttggag

SEQ ID NO: 33464 - DNA, 242 bp, Zea Mays
ccgagacaaggtagaggctgggcgcaggtgatgcttcacgaaagatcgccaccgaggaccctcctgcatagatggtttcgccccgtccgaagaactccaccggcagtcttctaatcccgcgagcaatggaggcgcgcccacgttagtcaccagggacccagcgacggtagtccaagcacccacaccggtgggttcgggacgtcgatctcgcccacgccgagcggaatttgagaggggttcgc

SEQ ID NO: 33465 - DNA, 2087 bp, Zea Mays
taaaacaatttattacgacgctgaggcattttctcgtgaaagaaaacgcactcccgactcccgagtgatcccgagtcccgacggccgacgcgcgcttaagggcttacggctaatccggcggctacgaaaggaaacatctaccccgttcaaccgttccatttcttctcccgttccgttcaccccccccgcgagctctatctttcgtggcgcagctcggcagctgggcggccgccccccgccggcgccacgccctaagctacgccaggttcccagttcttcgtccgtccttttgctaggtcttcgttggacacttaaacggcgacgagcaccgccagacgcgctggtgcctggatccggcgggagtgcttcaggttttgacggttcgtctctctcgttgtttccggcggggttatgaaggcggtgggatacagcccctacgacagcagcgggactgatgacgatctccctccagcacaaaatagaggactaagagggcgatctttcagtgggaatgtcgtagcatctgctggggcatttccttacatgagggcaaataatgatctggagagtgaaatacatcgggttgagcaagatgcatatactggtattcttagggcatttaaagtgcaatctgatgcaatatcctgggaaaaggagagcttgattactgaactcaggaaagaactgagggtttctgatgaggagcatagggagctattaaataaagtcaatgaagatgggaccatccgtcgaatgagggagttaagacaggcaggtggatccccaagtggtttgcatcatggcaacatggttttatatggtgcagaacctgggtccactaccaagaggcaaagggcatctcattcgattcctttgcaatcagcaggcctccagtcccctatgatgccctcccactcagtttcatctgcaaaatggggtcctttgcaagcaagaggcacgaaagcgaggacgcccattcctttggcgttaccatctgtggatccaagttcactaataaaccataaagtttatacaaggtggccagaagacaacaacttctatgaggccaccataacacgatataaccctgtgacggtttgtttcaatttttgctactgttttgatccttaatgcaggtatgcatcagtgcccagtaaccttctttcatgttctctctagggtgagcatggacttgtctatgacatgggcacacaagccgagagttgggaatcagttagactttgtgatatggcacctgaagatataagatggggatttgatggacacctttcaaatcgtgatgtctggagcccttctggccctatgttgatgaggcacatgaccaacaatggtgctatggcaggttcaatcaagggaagagggaggttatcaataaatgagactataaaggactatgctccacctgaaaatggcaccaataggaattttgatcatgtcgacataccaaataccggaagtgttgttatggaggtgaagagggtattgttcaacccaaatatgcctgaaatcgagaaggcaaggaaacttttgaaagatcaggagcagtcattacttgatgcaattgccagacttgatgaagcatctgatagcgataatgatatggccatggaaggccgaatgggttctgctggggaaaggaatggcatcactacgtagttgcttctggcatgttggaattttggtagattaacatgcatttgtgtagcacctacctcgaccgcagaacaaggaaaccacattatggcaaaactgcatgccagaaaatggtgtcctggaaacggttgacgcctgaaatgggattttttggctacacaaaattgagcgcacgagcggcagagatgcaaatgttaaagaactgtttaagcgccattgcatggtgtttcctatgtagcaaactagaggcaactaaatgttctagttgatcattagcatggagcacttagcattcctgattcagtacaggtagatgtctaacactccagcataatatccaacttggctgttcttgtactctaatgtgaaaaaggattgttgtgcacgcttttcatgtaagcctcgagtgagta

SEQ ID NO: 33466 - DNA, 4351 bp, Zea Mays
accagaccgactcgatcccaattctcaaaccagctttggcattcgtctctctctctccctaccccttcacgccaatttcgaaacagcgcgagacgagaccgcgagagtagccaaaagccgagggagcccttccttctcagattagaacccaaacgagtgcgctttgaagcgggggctgcgagctcggtgcgcgaattgggcggtcgatcaggcgcggcggccgggcatggcggccgtggagcagttgaaggagctgggggagaagctgcaggcggtggcgccggcgcctgcggacgaactcgccaagcttctcgaaaaagctgtggagtgcttacatggaatagagcagtcaccagtatcatcagtgatggaagctattcaaccaagtctaaaggctgttaccagagaagaattgctgaagcatgaggatgacaatgtcaaagttctcttggcaacatgtttctgtgaaattacaagaataactgcacctgatgctccctacaacgatgacattttaagggatatattctatctgatcgtgggtacatttggcggactcaatgatgttaatagtcaatcctttggcaggaaggttgctattcttgaaacagttgctagataccgagcatgtgttgtgatgttagatcttgaatgtgatgatctcatcacaaacatgtttcaaacatttttagttgttgtcagtgagagtcatgaagaatacattgtaaagtcaatgcagacaataatgacccttattatagatgagagtgaagatgtacacgagagtcttctacgtgtactgttgtcagcattggggcagaaaaaaactggtgctgcaatgtctgcgcgtaaacttgcttgcagtgtcatcgagcattctgctacaaagcttgaaccttatctaaagaaatttctaatgtcatcatgggctgggaatgtcagttcttctaatgatcaaattgatcaccagggagttgtatttgatttatatcagtgtgctccgaaggttcttaaggtgatcgtgccatatattactggggaactactggcagatgaagtagataatcggtccaagtcagttgaattacttggggaaattttttccttacctggatcccctattgtggaatgcttcgagactcttttcacagagtttctcaagagactgaccgatagagttgttgaaattcgtatttctgtggttgagtatttgaagagatgtctaatatcaaatccttcccgagctgaagctcctgaaatcatcaaggcactttgtgacagactgttggattatgaagaaaatgtccggaagggagtggtagctgcactttgtgatgtagctacccattctcctgatgctattccaattgatacaattaaagtagtagctgagcgtgtccgtgataaatcgttggctgtgaagtgctataccatggagaggttggcagatatttacaagctatactgccagaggggttttgatagctcaacaaattctgatgattttgagtggatacctggaaaaatattaagatgtctttatgacaaagattttaggccagagtcaatcaactctattttgtgtggttcattgttcccaccagagtttccaatgaaaggaagagtgaaacattgggttacagctgcgacatactttgataaagttgagatgaaagctcttgaacaaattctcctgcagaagcaaagactgcaacaagaaatgatgaaatacatatcacttcggcaactaagccaggaagatgcccctgatctgcaaaaaagaatcatcggatgtttccggaacatatctcgcttatttagtgattctgcaaagtgtgaggagaacttgaacatgcttcatcagctaaaagatgctgatatctggaaaatattcactagcctgcttaattgttcaactacatttgagaaagcttggtctcttcgggcagatttgcttaagatatttggtgaaaaacatgtgctttataattttgttggcgcattagcaatgggatgttcatatttacttgtaaacaaggagtatgcaaaagagatcctttctgaagcttctgaacagaagacttctgggaatacaaaactcatctcatcatgcatgaatcttctaacggcaatatctagtttctttccgtctcttttgtctggacttgaagaagacattgttgaactcctgaaagaggataatgaagtgcttaaagagggtattgcacatgtgttatcgaaggctggtggcactattcgtgaacagttagcctcaacaagttcccttgatcttctattagagcgtttatgcttagagggtacacggaggcaggctaaatactctgttcatgcacttgctgccattacaaaagatgatggtcttatgtcactatctgttctttacaaggatatggttcgaaattcttctaataaatctgaatggggtgatagcacagagaattgtttgctaaagatttatggcatcaaaacattggtgaagagctatctaccttgcaaagatgctcatgcacagccaggaatagagaagttaattgatattctgaagaatattcttacttacggtgacgtatctccaaatatggtctcaagtgctgctgataaggcccatttgaggcttgccgcagcaaaagctgttctccgcttatcaaaacaatgggaccataaagtgcctgttgatgtattttatttgactttgaggatttcacaggatgattttcctcaggtgaggaaattatttctttgtaaagttctgcaatatatcaaggaaagggccttggatgcaaaatatgcctgcaccttcatgtttggtgttaacgattatcatgccccgccgtacgaagagttcaagtacaatctgactgaagtggttcagatatgccaacaagttaagatgcgccaactttcagtccaagcagatatggatttgttgacggcttacccagaatacataatttcctttttggttcatgccctcgctcatgatccttcatccccggaaattgaagaacatgaaaacgtcaatgcatttggtccaatttactggcgactatatctgattctttcaatcctcctgggggaagaaggtttgcaacatagtgtcccaggcatgaaaaaggacagcttcactacaataatatctatattcaaaagtataaaatcttcacaggatgtggttgatggaagtaagaccaagactgtgtgtgctatatgtgatcttggtactcttattgcaaagaggttatgccaagaccaaacgagtttatcagaagctcaaacagttccattgcctgctcaactttacacgccgcttcatgataaccaaaatgaaaattctgtggagaataatgagcagatttggctgggatgtgagaaagtactggcccattttgaggctgtaaggactgcaaatatggataaggttgaatctcccaaacataagatgcttattgatgtgactgatgaatttggaaatgaagttcctcttggcaaaattgtcaaacttcttaaatcacgaggagaaaggaagattggggaaaagcagaaggcaccatctagtagttcagtaaatgcagagaacgatgatgttctgggtttagtaagagaaattaacttaaacaatcaagaagatttggaggaatcgcataaggacaagtctgagaagcgtcatacaaatgcaaaagatagtaaccagaaaccacttgatttttcttcacctaaacgcaaaagatcaatttctaagagtagaccacattcagcaaaaggtagtaaaagcagtgatgagcgtctactacatactcctaactcagagaggaccaatatctccttggaaactaagatgaaggagaaagacagagatgattcaactgatacagaactgttagtatctccaagcactagaacccctgtatctaaacaaaataagggtgctaagaaatccaatattaatattttgagcagtgttccaaagaagtctgctgatgcagacagtactaagagaactgttgaaccgagaagtctaaatgggtcactcaaaaggcaaaagtcaaaaccaatttctggtttactaaagtgctcaacacaagactcaagcagtacagacttggtaggacaccgaataaaagtttggtggcctttggataagagattttatgaaggtgccgtgcaatcatacgattcatccaagaaaaaacatagggtgctatacgatgacggagatgttgaagtgcttaacttggctaaagagaagtggatactgattgaaagtaatgactcatcagtgaagaggcaaaagaaggatcatcttgggacaaacccaggaagtcaccttgca

SEQ ID NO: 33467 - DNA, 2381 bp, Zea Mays
accgttccaacttccacgttcctcccctgctcctcaaccttcccgagatcctggtgggcccggagcaccctccggcttccagttcctttgttcctcgcgaagtctcaccgcgctgcagagcgcatcgccgagcccccgcctcacctcgaattcttctcgcgtagttcgttgccctcctccttccccttctctcctcgacaagtacacggcggcttggatctatacgaattcggcatctgtattttacctcattggggatggaggtgcaggtgtttgatttgtcttccgactccgagggcgaggtgacggcgcactcgcccgatcacaagcgcccttctcgacagccgggtgcagaccctaatcgcgggggtggcgagacaggttccagcgccctggacagcctcttcgagcaagcgggcgcggcgaagccacagcgtcaccccagtgacgcgctgaagaaagggaaggagaaggccgtcgagggggagagcgcggggcctccgaagcacagtggagaattgctcggtgctgctggccgcgtcctgggatctgggagtggtccgtggagcgcactgatgagcaagtgcaaggctggagacggtgggaacaatggagctgggtgttggggtagttggggtgaccggggtgatcagcttactaactcaacccccatgccgcgtctagggtcagagaggaaggggtttgatgagacatatgaactgcgagggatgcctcagcttcacagtgattctgcagcatcgagtgaccactggaagggtattcttggtgcaagccctggtgatgtcagcccactgtggtgctccagggatactagcatgaaagataatgaggatgaaaccttctctcaaaggtctgtgtctgcacgtagctgtgattattttcttgtcgaagatactagcccgtcatggctgtcgaaggtcaaagggctgaacttcccacttcctgatgagcatcagtcgagaaccaggcagattgaaactgatgagatgtttgcccgcagacttcaggagcagctcaatcagcaacagctaggatctcagcattccgaagcgactgatacgacaatagcctggacattacatgagcaagacgctgagcatgccagatttgctgcaagagaaggccagtctagttctagccagagggacagatcaatggcacacctatattcttatggacgtcattcacccgttcaaaatttttctccttgggcatccaatcgtactccaattccaatgccaagaagaggaggtttgcaaagaaactccaactgtcctcaagtggagcaacgcaatatgcttatctctcagttaaccaggggatgtttcagagaagacatggatctcgaaacgaggttggctgtactggactcactttctgaagcatttaagaactgcgaggacacactttctccagattctgatgagtaagcatttactgttgtgtagcatttattttccacacaatgtttgtttagatggacatttccgcaatcatatgttctcttatcttgtttggttggttctgtgtttaccttgtaacacattctgcaaagttcgtaggtagaagtgtgaatgctccaaacaatcgatgtgtgctctgtagtaactagtaggtgcctgaaattgcttgtctcatagccctattttgaatgggatcctgttgacgcgttctttccttgcttatacatacttcttggttacatccgttctggctattcaattttttatcacttatagtgatgattatgaggacctcatagcacttgacgatgacaaccatcacagaggtgcttctgatgaccaaataaacagcctgccactatcactgatcgagggtgaaaattgttcagatgaaccctgtaatatatgcttggattgcccttctgctggcgattcactccggcatttgccttgcttgcacaagtttcacaaagagtgcattgacaggtggcttgggatgaagatatggtgtccgatttgcaaattaaatgtattctcccagtaggcactgggcatctcatacttttggggtagcatcgaaggtagattatagctcactaataggaatgatgactgtggagagtttttctggtagcagagaagggcagaaggcacggaaatcctcctgttcccgtctgttatataccttatcgtagtctgatatgcccaacagtatgtcagttttaggcggtgccataggacatgaggctggatccagtgccatttctcgatcatactttttatctattatactgttccagtgtatagtctctctttagcttacagtcactttagcgttatattagtttttatgttacatatatttatttaaatcagagtgttctattaaaataaaaa

SEQ ID NO: 33468 - DNA, 444 bp, Zea Mays
cgcctctccctgcagtgccccctacatggcgttcgtcttctctctcacgctagatcaagcggagcactattcatcccccatcctttccttctggatgatggcagcgagcacgccttggcgaagaaacctcccgctcctttgcggtgggtttggacccgagcgcggaggaaggccgactcggatccgctcgatctcgccgccgaccaggcccaacagcaggacgttgcggcgcaggaagcattcccgtcgatgtactccgagcaggcaccgcaagaacaaccctcactgccgcaggtgttcttcatcgccacatccgacgtccttgattcagtcaatcgatgctgctctcaaatctagttcccctcccatcgccgctccatctcaaagcacagatcttgacgtactccatcagactttgcgccacgcataatcagttttaccgac

SEQ ID NO: 33469 - DNA, 704 bp, Zea Mays
caaattcagggtgttacaacggtcttccataccagatctccatcttcaaatgacttagtcttgacctttttggtgtaagctttgataaccatgatcttgtatttctcgatctctcctagagccactaacctgttgtcggttacttcatcaatattatccatcatcaaattataataatctttgatagctagattgttctgcttggcaaacctgacagaatttcggcttatttccagaaacaaaacagcctcctctccataaacaagctcaaaaggatagactttagtagcacagtgtttagatattctatgagcccacaaagcttcagacaaaaccttatgccaatgcctagcatgatcagatatcttcttctttataaggctaatcagtgtcatgttactaggttcggcttgtccattggcctgatgtcacacccggttttaagggacaaagccgggtgcatctcatacatgcgctaaagaagacaacatatataataacagagtgtctagagataaatgtcacaataatcagagtacttattacatagcggaagtcttacaaaataaaatataaatatggatcgaactaaaatccatccttggcgccagaaagtcaactgggagacaccacctagatcgaatcaaactcctcgatatgtggctccatttgaaccacctgttcttctcctgtggggggtgtga

SEQ ID NO: 33470 - DNA, 637 bp, Zea Mays
cggcgttccgtcttttatatttctcgtcaaacaattaacagaaaaaggcaattattgcctctctttcttgctcgccacagcttcgtcaaagacacgcggaaaagaagaggaagggggaggcgactcgaccgaggcccggtttcgatctctggtcctccgattgcgtccagatctaccaggttcgcctattcgtggcctaatctttcctctctgtcctgtttcctccacatcagtacccacagggtgaggttacgtgtctattgggatctcggtagggtccttctggggaacgacggctggggattttggtgattttatagacggatacgcacgattcaacaatggggagaagagctatcatggggggattttggattcatggcgaattctagcattttgattcggtctttctgcgtccagcacgaggcttctacgaatttaatgtagtaggattaataattgttgtgaagggagttatcttgttgcaattctacaagccagaaatttggtttgagtctgggatgtctcagcttatctgagaactatcatgattagatactgacccgtgaccaacaagctgggagcaagggacagcatgctatagtcatcctcagttggggttagctgcagtagaggc

SEQ ID NO: 33471 - DNA, 1855 bp, Zea Mays
tcctcatttcctcctcaaccatttcattccttccttccttcccctcgctcgccttcctggcttcttcctccccagcacgcacacgcacacgcacacacccagccttttggctgccctgccggccgtcagagagagaaaccgagctctaactaactgaagtggcggccacatagctagctactcttctgatcctgagcgcgcacgcgccatggctcaggaggacgtgcacctggacgacgcaggcctcgcgctgggcctgtccctcggcagcggcagcggcggcgcctctggtgcggcgcgccacggtggtatcagccgccggctgagcagggaggtgcggctgccgtcgccgcacccgctggagccgtcgctgacgctgagcttgccggacgaagcgaccgcgaccgggtccggcgggggcggggccgcgcacagcgtgtcgtcgctgtcagtggcgggcgtgaagagggagcgcgtggatgacgccgagggagagcgggcgtcgtctacggccgcgttgccgcgggcctgcgccggcgccgaggacgacgacgacgacgggagcacgcggaagaagctgaggctgaccaaggagcagtccgcgctcctggaggaccgcttcaaggagcacagcaccctgaacccgaagcagaaagtcgcgttggcgaagcaactgaagctgaggccacggcaggtggaggtgtggttccaaaacaggcgagcaagccgcgcgcgcaggacgaagctgaagcagacggaggtggactgcgagctgctgaagcgctgctgcgagtcgctgacggaggagaaccggcggctgcagcgggagctgcaggagctccgcgcgctcaagttcgccccacacccacaggcgccgccgtcgtccgcgacgcaggccggcgcggcggcgggcgtcgttccggcgccgccgccgccgcagccgccacccaccacttcttcaaccccttcacccactccgccgcctgctgatgatgagggcagggcagcacgcagccacgcaacgcagcggcagtaaacagagcaccgccccgtgcagataataccacgtctgtacgtgtcacaagtaattaacaaacgtatggtcctcctctctatctattttcttgatccggagggctaagttagttgttttcgtgtcgatcccaaatgcatcagctaatccatcaatcataggcttgatagagtagtcgaaaaaaatagccgtagctttcctagcactccctccgccccccccccccccccccatccatgtatatttctgttgtaattctgtccctctctcgcggtctacttgctcccttttcgattggagtacgtagctcctttgcctttttgtttttggttttttgtttctgtttctgtttgagacaggttaatataatcgccgtcgtccgagggtgtagtgtcagggattgatatccctgtacaccgattattggattgagatgcttctagctagtcttcgtactgataagcgtgcgtgcgtacgtcagagcaccacagtgctggaatggatgatgacatgagagacaggtagagaagcccagctgcgtggctcttggacctttctgcaggtgtacgtggtgtgtacacacgcacacccttttttatagtacatatatacggctcaatgattgtgcgtgccggggctctcgactctccaaattgctgtcgcttttgctcgttttaattattgggagcgcgagcgcggcagcccgctcttgtcttgagcatgcccacccctcgctggcgcacaagccatcagttctctgcaccgtatatgcatggctgcccggccacggacgaactttcagtttcagcagtctaatgatcc

SEQ ID NO: 33472 - DNA, 2095 bp, Zea Mays
ctctacgctacgcctctggtgcagcagcagcacccaccgcaccgccactgggctgctgccttgcaaaaagtggggcgagtgaagaaagcaggcagccatgcttttcgggagaaggggaagggaaaagcagccagccagccagccaccacactaccacagcaaagcaaagctcgcacctcgctgcgcactcccactgcgcttctcttcctcgcaccagcagtccagaccaaggagggacgcggcgggggcagcacctttcctcttcctcctcccccagaaatcaattcctcttcccacacgatccatccggaggcgatccagctcttcgcgccctctcttccccaaacaggatacatgagtggggaggccgcggagagagctgattgatcgggaagaagaagaagaacatcgcaattcacttgctcctgcggcggctgtactagggtagccgagaacccgcccatacccatggcatcctcctcggggggcggcggaggccgtaggatgacccccggaggagactcctctgcctccgccggcggcaggaggatctaccgcacccagaccgccggcaacctcggcgactccatattcgacagcgaggtcgtcccgtcgtcgcttgtcgacatcgcccccatcctgcgtgtggccaacgaggtggaggccagcaacccgcgagtagcctacctctgccgcttctacgccttcgagaaggcgcatcgcctcgaccccacctccagcggccgtggtgtccgccagttcaaaactgcgctgttgcagaggctcgagagggagaacgatcccacgctcaagggcagggtcaagcagagtgacgccagagaaatgcagagcttctaccagctctactacaagaagtacattcaggcgcttcaaaaagttgctgataaagccgacagggctcagctcaccaaagcctatcaaactgcagccgtgctcttcgaggtcctcagagccgtcaatgtctcccagaaaatcgaagtcgataagtcgattctggagacgcacaaccaggtcgaggaaaagaagaagctataccttccttacaatatcctcccgcttgatcctgacagtgccaaccagcctatcatgctctatcctgagatccaagctgctttccatgctcttcgtaacactagaggtctgccatggcccaaggaacacgaaaagaagcgtgatgcacccaaggaacacgaaaagaagcgtgatgcagatcttcttgcctggcttcaggccatgtttggattccagaaagataacgtatccaaccaaagggagcatctcatactcttgcttgccaacgtgcacataagacagattcccaaatctgaccaacaaccaaagttggatgaccgagcactggatacagtaatgaagaagctatttaagaattacaagaggtggtgcaagtatcttggtcgcaaaagcagcttatggttgccgactatccaacaggaggtgcaacaacgcaaacttctctatatgggtctttatctgctcatatggggcgaggcagctaacctgagattcatgccagaatgtctttgctacatctatcatcatatggcctttgaactctatggtatgttggctggaaatgtgagcccgacgactggtgaaaatgttaaaccagcttatggtggagaagaagaagccttcttgaaaagagttgtgactccaatctacaaagttatagagaagagaggagcaagaccatgaaatcaaagcactcacactggagaaactacgatgatcttaatgagtacttttggtcaagagattgcttccgattgggatggcctatgcgatctgatgcagattttttcaagactccaaatgttcctcttcaccatgtggatggagtatgtaccttgtgacaatgaatatacttacggcatttgtcaaatcaattaggtttgagctaggtaatattttgttacatgagttatgagtatcataatgggagcgttgataaaaactagagtactagacacctttatagctttccatagacctgatactataggcatttggcaaatatacgtccgttctaactatttctgagaagaaacttcat

SEQ ID NO: 33473 - DNA, 1266 bp, Zea Mays
cagctagtgtgaatgcggcaggccccgttctctgagaccgagctgtgtgaatgggcagaaaagtaatggcaggcagaggcaggcagaggcgagaagcaagaagaaaaacgaggggagcaaggaaatcgaggcaagaaagcaagggcagaggcgcagagcctgcaatctgctgtcccccgtcgccgccgctgcctcgccgttgcaatcgaggcaagaaagttagggagtgctggcgttgggcaagtcgctctgggcctctggggagacgggggctggaggggcggcgagatgatggaggccggcggcgcgggagcggggggaagggacgagagggtgccgcagtggggcgtgcaggagacacgggagctgatcgtggcgcgcagggagatggagcgggaggccgtcgcggcgcgccgcagcgccaagacgatgtgggaggccgtcgcggcgcggctccgggagcgaggctaccgacgaaccgccgagcagtgcaagtgcaagtggaagaacctcgtcaaccgctacaaggggaaagaaacttctgatccagaaaatggaaactgaagcaacctggtggtgaccggtcatctgggctgtctgatgacgagggcaatggtggtgaagaaagtgatgaggagaaaccgttgcccagcaggaagaggaaagctgacgacaagaaacagcaacatcaaagaatgtctgggaaatcaagagcaggattttcaagcatacatgaactgctgcaggatttccttgtgcaacaacagcacattgatgtctggtggcgggagatgatggagagacgcgcccaggagcggattgtttttgaacagcaatggcggcagacaatgcagaagctggagcaggagaggttgctgttggaacactcgtggatggaacgggaggagcaaagaaggatgagagaagaaacacgggcagagaaaagggatgcactcctgactgctctgttgaacaaactcctacaggaagatctatagccggataagcttgctcttcatttcgtcagggtatagttgcagtagtggacattgttttgtcaccttgttttagcaattctttgtagctgctacatatattaacatgtgtttgttcaaagaaaattgtttcttatagcatttgtattaggttcctaggcattcttttccagttatttggtggagtaaaagttaattttatgtttaattgtggttgtaagtatcatactgtcaggtaagtatacagatcaatgctaatacgctttagcag

SEQ ID NO: 33474 - DNA, 1014 bp, Zea Mays
cgcgtgtcgtgctgttcaactacgggatcggcatccacctgctgcagtcggaggaccccggcagcctcccgccggagaagggagagatcaaccccaaggacaaccatatctccttccagtgcgagagcatggtggcggtggagcggcggctgaaggagatcggcatcccgtacgtgcagcgctgcgtggaggagggcggcatcaacgtggaccagatcttcttccacgaccccgacggcttcatgatcgagatctgcaactgcgacaacctccccgtcgtcccgctcgccggcgaccagcagcgcgcgccggccgcttgcaggcgggctccggcggcggtcaataccgtcaagcagcagcagcagggcagcgtggtgcctgcttcttccgctccggtcacgacggcggcggcgcagtgcatgccgtcggcggccacggcggcgcaagccatccgcgtcgccgaggagtcgtcgtcgcacatttcgtgcgcgtgattaattactagcttgttgacgacgacgccagtgcatggattcggcgcggacggtgacgaagcaggcacgatggatcgacgagcgccgagtcacgaccacaagaggcgtctctgtacatgcgcgtgcgtgcgtgcgtgggtgtaggtgctgtatgtgcagtgcactcaaactgcctagcttttttttagtaaagaataaacccatggtacggtgggagtgaagagactagtgcgtccactccatcatatccttgtgtatatcttcttctgcgttccgtgtcgatcgatctacttactaaaacagcgtacgtgaagcactaacgccgccagatcgacatcaactagctagtggacagtggtagggatggacagtggtagggatgaaaacggaaaacggacggaaaacccctctcccgttttcgtatccgcattttatcatcggaaacgggattggatccggaatagtcggggacggaaacgggagcgggataaacggaattgcgaaaacgaacggaaacgga

SEQ ID NO: 33475 - DNA, 2285 bp, Zea Mays
cgccattcccagctcctagagtttcctcctccactccctcccccccgcctccactaccccactcccaggcgccgcacaggtacgtcgccggcggcgatgacgacgcgcttcaagaagaaccgcaagaagcgcggccacgtgtccgccgggcacggccgcatcggcaagcaccggaagcatcccggaggtcgcggtaacgccggtggcatgcaccaccaccgcatcctcttcgacaagtaccatcccggctacttcggtaaggtcggcatgcgctacttccacaagctccgcaacaagttctactgccccgcggtcaacatcgagcgcctctggtcgatggtgcccgccgaaaaggcggcggaagccgtcggcgacaaggccccgcagatcgacgtcacgcagttcggctacttcaaggtgctcgggaagggggtgctgccgcccaagcccatcgtcgtcaaggccaagctcatctccaaggtcgccgagaagaagatcaaagccgccggcggcgccgtcgtgctcaccgcctagttttcagtccttattcgcctcttggttttgagatctatatctggactagcagtgctttcttgtctcacctatttgtgttaagaagacgtagtttttaaatccattgctccttcctgtttggacagtgctttcatatcagatatttcaggtatattagagctaactgcgctatcaactgtgctattctcatccgttcaactgattttgtgatgcatattgcgatatctttcgtgttgtgaaactcgtatgtctcttttcttgcgctataaggttggtagaaacaatgtgaaatacgggtattgctagcttgttctctttgtattgtagagtgtagactaataaactcgactcaattctctgtgctgcgcctgctgcttgtcatgaacttggtagcgcctgctacttgtcatgaatttggtagtcttagccttaggctttgtaaatttgtagtgtgtcttgaataatttcattagtcatatgctcttgcatggaatttctatattatgaaagcagaatgaaaacggcatcggttacgccatccacgtcgtctgaaattcaggtggccgtcggatttttcgtggacgctccctagcggctcggcgtctccatgtgccgtgaaggttccagaacccacggggggtcgtcttcctccacaagattctgccaaaagatcctctcggatgcccccgcccacccatttcgccagtcgccatcgagctctcgcttccgccgcccgctgccgttgtatcaccccagtgctgagccctaggatgtgactggcggacgtctctatggccgagccgtaggtggaggcggcacctcggcaccgtgggagatggaggacgatgacaccgagggtgtaggcgagagcacctgtccccccgccgccgaccgaggaggctcctcctcggccggcggcggcggcggcgactcacacggttacactgacatcgagaaggaggtattcgaccgtctcatggagaagagaatcccggaggtcgtcgcggacccggtggccttccgcgaagagctccaccgccacttcgagcgcctgccgctgagctacgccatcgatgtgaacgtcgacaaggcggaggacgtgctgctgcaccggagcattctcaacgagtgcactgaccctgaaaatcgccccatcttccatgtgggcttcctgaactgcatcccgccctcgttggatccacagtataacactcaatccatctctataacactcaatccatctctacgagcgaaaacggtaattgtgggggttctcaggattccactttgagaaaatttgagccatgtgaagggatcgaggacctcagtttaactggacaaaaggttgtgggtgactatgtggccggttcttcgaggggagatgtagaaatcctccatgttcatgaaattattttttctaccattgacaaaccaaagctcctcgctcagctatctgctttgttgtctgaagttggactgaacatccgtgaagctcatgtcttctcaacgactgatggcttttgtttggatgtatttgttgttgatggctgggatacaaaggtgatttaccatagtatgattgtgtagtgctagcttgcttatctatgtatacttggagcatgttctgtaatctgtaggaaccatttttttccctgaaagaaactacagcaaccatttaggtcgcttgaacgttattgtcaaaaacataattaccagctggataatgtcatcattttgtccaattagccttt

SEQ ID NO: 33476 - DNA, 2878 bp, Zea Mays
ggtggagtagtcgtcgccacatcccgcttcccccgtacgccgtacccccgcagctcgctctcgccttctcctccggttcctgctgcaacctgcactccgtagtccgccctttctgcccgccgccggccacttcaagactactccccgccgcgttacctcctcctcgtcctcctggggttacccagctctgttcccctttcagggaacgccttgagaggcggggcgggtccttggtccggaggcgcggcgacggcgagtgatttttgttcgccagagggagagttttttttttcaccgggtttggtgggaagtaaggaggcggccgcgagtggcgagacgttcacgggttagatctggcggtacggcgtcgcggatctgagcgaggtttcggtggagcgatcaggaggtggtcactatcttcgcctcatttcgagtagtttgggcgcctgtagtttgcctgtttccttttcggtgtctgatcaagaagatgatgtgctcagagggcttctagttgttgctgatatcttgtcttgtgttgtatcacccggaagctggaaaggagcgcatcactcctgctctccccttttactccttggttacttggtatttcttggatatccaggctggaaggggttagatccagttcctgcggccctagtaataaggtgcacttggggaaggtgccatgacctacttccccggtgaggtggtggagcacattttcagcttcttgccgtcgcacagcgaccggaacacggtctcccttgtgtgcaagttgtggtacgatgtcgagaggctgagccgacgaggtgtgttcgtggggaactgctacgctgtgctccctgagcgtgtggtgctgcgattccccaatgtaaaggcgctgacggtgaaggggaagcctcactttgcggacttcaaccttgtgccgcctgattggggtggctacgcggggccatggattgaagcaacagccaggagctgcctgagtcttgaggagctgcgcatgaagcggatggttatctctgatgagaaccttgaactgctagctcggacattcccaaaattcaaagtcctcgtccttatcagctgcgaggggtttagcacggatggtctagctgccattgccaatcactgcaagctcctgagggagttagatttgcaggaaaatgacgtggaggaccgtgggcccagatggctttccttccctgattcctgcacctcattggtttccttgaatttcgcttgcatcaaaggggaagtgaattctggtgcattggagagacttgtcgctaagtctccaaacctacgcagtttgaggttgaatcgctctgtttcagttgacacactctcgaagatactagagcgaaccccaaatttggaagacttggggacaggtaatttgacagatgagttccaagctgagtcctttgtcagacttactagtgctctggagaaatgcaaaaggctgaggaatttgtctggattttgggatgcttctcctatctttgttccgtttatctatccactctgtcatcaactaactggcctaaacttgagctatactcccacactggattattctgatctgactaaaatgatcagccgctgtgtgaaactccagcgtctttgggtactggactgcatttcagacaagggtttgcaggtggtggcctctagttgcaaggatctacaagaactcagggtgtttccatcagaatttaatgttgctggtgcttttacggtgacagaggagggacttgttgcaatatcatcaggctgcccaaaactgagctctttgctgtatttttgtcaccagatgaccaatgaagcactaactactgtagccaagaattgcccaagtttcatcagatttagactctgtatccttgagccaaagaagccggatgccatgacaggccagccgttagatgaaggctttggtgcaattgtccgtgactgcaaaggtctaagacgactgtcaatgtcaggccttctcacagacagggttttcatgtatatcagaatgtatgcgaaataccttgagatgctttctatagcttttgctggagatggtgataaggggatgatggatgtgatgaacggatgcaagaatctgaggaagcttgagattagagacagtccatttggtgattttgcactcttgggaaatgttgccaaatatgacacaatgcgatccctttggatgtcatcatgcaatgtcacattaaaggggtgccaagtccttgcatcgaagatgccgatgctcaatgtggagatcatgaacgaactagatggaagtagtgaaatggagaaccatgaatcgggaaaagccacactggtttgtgcccttatcctggagcaacatggccgggattcatcatcatctctgtaccaactgctcccctcttccagtgtctggtcatatggccacccaggccctttatcgccttgtgcattctcactcgagaggaggacagaatcagatgactttttttttcttcttttcacgccatgtaatctgtagtgtacctgtcttcatttgcttttcactttggcacggtggattgtgctgtcgcggtactgttctagtgttttgattcgtaaacctgagaactgtcgggacattccggtgacgatgatttctttcttgctcctgtgaatgcagtgtgtgtgcaaattttaggtttatactacatctctccacgtaaatttgctagatgtagccgactacccacgtagcggttcattaatgatcttggtttaattaatggctgagtattttttttctaatttatgtactttctctattttgtttacatattttattatattaggtttattctgagataaacatttgtgtttttttgcctatcgatga

SEQ ID NO: 33477 - DNA, 978 bp, Zea Mays
agagaaaagtgtctttatgtaaacacttcgtggcagcaactcgaatgacgtaaaaaggaaagacaacgaccacacatgacagctcaggtctttatccaagtccaaaatccggtcaaaagtgggggttcaggagcctgcagcgagcggcagttgccctgcccgtgtccatgaggcgagacgagacgagagattgatgagagaaacagaggtcggaaacacgcgctagccactactagctagagcaccggaggggtgtggggtgtgtgtgtgacaatttcatggcaacaacattccattctctgctgccccatcctgcagacttcagtacggggcagccccacatcccaaccactggagtccctcaccgccaccggccaagcgctctgccgctccccagctttcaatgcgcaatctcctcagtcctctggctgcttcgcctgtactttcaaaactaaaaaacaaacatttcctttctttttttgctatccgacctagcagaggaaaacgagtggaatgccatgtaagaatcggtggccgctgctgttgatcgatggagaatcacgaatccatcctgccaacattacgtacgtacaaaactggaaacttgagagaatttctccgtcctggtcccggactcccggcctacatacacgccgccggcgccccacggacgctgggttacaaggccatacaagccggcagcttctgcacttgcccctgcgtgagtgacctttccaccttggggaacagaacactagcggcaaatcacggcccgttcgtttcatctggaatcggcggccgggtggaatgatcagtagtgttggaggaagtcgtcggagttggcggtgcagtcggtggtcggccaggcggagcggagcagcttcagcaggtgctgcgccttgcgcttggcgcgctccgagcacccgccctgcaccatcatcagcagctgccccatggcgccggcccggaccgcctcca

SEQ ID NO: 33478 - DNA, 2996 bp, Zea Mays
cctcatgctgttaatttcttctcggattcaaagtccatttacccattgacagcagcaccaagatggaggtaatgaaagctgtgagttttatgtacgtgcgcccaccgggatacaatgcagagagtgcaaaagctgctgaaattgaagatgagaagaagaggtcggatccaggtgacatgggtactgcatctgcaagtacctcttcaatacctgacaagggacctgaaaaggctaaatcaggcgcagataagaaaaataggccaaaagatgtttttggtcggccattggcaacagaacaagaatttgaagttctcaagaatgctccaaggttagacacaggtgctcctgcaagggtcaaaccatttggagttgaagttcgtaatgttagatgtttaaggtgtggaaactatggtcaccaaagtggtgaccgggaatgtcccttgaaggatgcaatcatgcctaacgaggagagtcggttgaaaagagacgatccacttacaactataatggcgcagacggattcaagtgagcctctgaagtgggaacttaagcagaaaccaggcatgagccctcctcgtggtggatttgacccagatgatcctaatcagcagattgtggcagaagacatctttgatgaatatggaggttttctgggcaactgtgatatcccagctctcatttccaatttttctgctaccaaatccaagaaacgttccaagaagaaaagcaagcacaagcaggctaagtctgctattcatgaggactctggtagacatgaaagcagttaccatctatcatcggactttgacaatgagaagagaaacataacatcaagaagcaagagaaagaaagcaaactgttctgattcatcatattctgattccgagatagatgctagaaaaggcaagagcaagtcaaagcataagcatacgaagaaataccagttaaagtcttctgattcagaatttgatgtccgtgaagatacaaggcggcgtctgaagagagaccacatgaaggagaaaagagatgagtcaccattgccgttctctaaggatcaaggagacacagaaggcaagaggcattcaaggtgttcaagggagaagcacaactacagttattcatcgagttcttctgagagaggcaggcggcgttcgagggagaaacgtcactacagttattcaccaagttcttctgagagaggcaggcattctctacggcacaaggagaaacaatattacagtgactcaagttctgatcggagccatcgacactcgagaagatcgagggagaagagacatgatagagactcaagttctcctgatgccatcaggcgctcaagtagatcgacggagaaacagcgccgtcctgatacaagcccacgtcatgccaacgggcattcaaagaaatcaagtggcaagcaagactatactgagcgtagccgttacgaaaccagtagacattcaaggagatctcaggagaaacggcactaccctgattctagcgcctctgattactcggactctgatcagcacaaaaaacatcgccaccatccagcagcagccgagagcccaaccccaactccacaagcaaagatgctgtcgtcttccacctccaccctccgcctccaccaaccaacccgaccccaccggcgccacccgccggccccggccttgggggtcgccacccacctggcctccccgcggcggtggcgcggacacgccccgggggcgggggcgcccctccgcgcgcggccccagcgcatccgcgcggtggacgccgcccagccgttcgactacgagtcccgcgcggcggggctgctggaggagcggcagcggctgaagatcgccatcgtcgggttcggcaacttcgggcagttcctggcgcgcacgttcgcgcggcaggggcacacgctgctggcgcactcgcggacggaccacacggcgctggcgacgacgctgggggccaccttcttcgcggacccgcacgacctgtgcgagtgccacccggacgtggtgctcctggccacctccatcctgtcggccgaggccgtgctgcgctcgctccccgtgcaccgcctccgccgcaacacgctcttcgtggacgtgctgtccgtgaaggagttccccaagaacctgctgctcagctccctgccccccgactttgacgtcatctgcacgcaccccatgttcgggccggagtcggcgcgcgacggctgggacggcctgcccttcgtgttcgaccgggtccgcgtcggggactgccccgcgcgccgcgcccgcgccgacgccttcctcaacatcttcgagcgcgagggctgccggatggtggagatgtcctgcgccgagcacgacgcgcacgccgccgagacccagttcctgacgcacaccgtggggcggatgctcgccatgctggagctgcgctccacgcccatcaacaccaagggctacgagacgctgctccgcctcgtggacaacacctgcagcgacagcttcgacctctacaacggcctcttcatgtacaacaagaactccaccgagctgctcaaccgcctcgagtgggccatggactccgtcaagaagaggctcttcgacggcctccacgacgtgcttcggaagcagctcttcgaggggtccccgcacgcccccgacgtctcctcctccaacgtccgcaagtagacacggccgccgccgggggggggggggggggttcgtctcgcccccaatctcatcatcatctgttgttagtaataaattaaattccagttccaattctccttgccattgtatttgtagtaccagcctgtatctgtattctccgtttctcctcccaactccctcctgtcagttcagttttacagttgagggatgaaatgtggcagcttggcattgcaatttgtgacaaacaaactgaataaataagcaatctttggcattgcaagtctgtaataataacaccaggacgagggaaaatcagaagaggtctcaaatacagtgcgc

SEQ ID NO: 33479 - DNA, 2925 bp, Zea Mays
attctctacatagccagattctttccacagctagattgtcggaaaagctggttagaaaaaactgaaccaaacagccaatagacactgagcgatcatgtggcacgtgtagcgctgggacaggcccaccgccgccacctcgacgccgaacggccgaagagccactgccagtgccacaccacacgccgattctctgaacaccaatctgcgcaatcccggcaaaatcccaaaccctgcctcgtcgtcgcaccgcctccactcgtcccggatcaaccacctcctcggtccgcaaccacaaccacacccgccctcccgctcgccgcagccagaaccagctccaacccaaccagaaccagctcgccccggccgccgcgaccgtcccccctcatcgactcgaggcaacgaagcggccggatgggagcagcagcctgaccctgacgcgatgagcccgcccgccatgctgctgcccgtctgctccgccgcgcccagctgctcccccctctgcccggtgacggcctcgcacgtcgtcgcgcgggtggcgcggagggtggacgtcggcgccgcgctcaggtcctacgccgactcgctcgtcgcgcaggtgcccgaccgcccgccgctcgccgactcctccatactctccccctacatcgccgcgccggacgacatcgcgcgagccttcggcgcccccgcctccgagctcccgccgctccccagcgccgaccccagccctgggctatgttgcacgggcaccgaccagccgctggcggcagtcgcggacctggccgcaactgccgtggtcaactcggctcccaccgacgccgcggagcgggccctgtcggacgcgccgttccccagcacgttcccgtctgacgcgtccgaggtcgaggactccgtggccaggctcatcgataaggtcggcaagcaggtcttccaggcggaggacgcgctcaccgaggcctacgacaagctgaggctgtccgcgtacgacgcgctcggtgcgtggaggaagacggtgcgcgacgcgataggtgggctcaaggcgtcggtcgacgccggtaagcaacaggccgccggaggggtcacggatgcttccggcgcgttgcacgagaaggtggccggagctgggactgtggctgttgatgttctcaggaaggcgattgttgcagcagaggattcactgggcagtgctgccacattcgttgtgtattcttatgggtcggcgaaggagtctctaccaccaaatgttagagatctgttgagctcgtctgaggagaaagctagtctagtcttgagaccaatcggaaatgctctgcaacaggtctatgtagttgttgaaggtgttgagaagaatgttggtttggatccaagtgatcctattgttcaattggcagttgtgcttggaggttcagtgacaatagggacaacgtactggctcttcacatacagtggctattctggagacttgtcacctgaatcagcgtttgacttattgaaaaacgatgacaaagccgtactcattgatgttcggcctgaggcaagatattgatttgagggaaaaagatggtgttcctgatctacgcctcggggctaggtctaaatatgcaagtgtagcttcgcctgagatcaaagatccagtaaagagtatgctcaaagatgaaagagagtttgatgatgctttactggcagttgtcatccgaaacttgaaattggtgaagggcgattcaaaagtcatagttatggattctaatggagctcgatcaaaagccattgctaggttactgaagaagctcggtgtgcagcgaccttaccttgttaaaggtggtttccaagcatggtcaaagaaccttcgtgtcaaagaactgaaacctgagactgcattaacgtcaataaatgaggatgttgaggaaatcctagaacaaataaagcccaccccaactcttgtgtttggatctcttctgggcctctcagcactttcctatgctttactggaatgggagatgactttgcaatacatagctgttttaagcgttgggctgactatctacttgcgattctctacatatgaggactccgaggatttggagaaagacctaaagctgttgctgtctccagtaagagtaggcgcagacgccttgtcatgggcagctaagaagatagagccaaacaaggtgggcctgccaacgtctccttccacgacggcggtgaaagaccgggttcttcaggccgcggcgaagcacgagtcgcagccatcggatgccgacgagtcgtcggtccaaacagccgaggcatgacacgcgccgaaagcttgggagccagtcgagcggtcccgccgaatcctcaataagagcactcggtgggcgctccctggtaatttgtgaagtccatgtcgtttatgatgtaaagcactgtaaagcggttgtaaattaattgcgtgagcagcatctgtaagttgacatcaacttggttggttgtgtgtgtgtagattatagagaaagaggtgtcaatgtaacgttaattcctgagcctgtctgcgatcttgcccgtctggtactgctactctgcttgcttgcttgtttggcacgcgatcaaggtgaattaagtaaaaatggtccgtggtccaagtccagccccacaacttggctgtcaggcgtagtgtaacctttgttggtacggaaatgaaatcctggagtacggctgtttttaaccaccatagtgcctgccgaaatgctgctcggtagtaaacgggtacagaatttaatcccgcatcatttggaagctccaccccaatagccacagcccacaggccccagaagacgaaaggaaacgatgcgctcgctgctcgcataggatcaaagggacgggaatcccaatgtcttgttttcaaaattttatcgtattttcttaaaaacagtataaaaaacatagaaa

SEQ ID NO: 33480 - DNA, 5056 bp, Zea Mays
atggcctcacccacggtcgcctccccgatccgggcgagccccgtcgacaaccccaccgtcgcgccctcactggcctcctgccgctgcgccttatcgctagatgctcgacatccccatccgcgcgctcgaggcagaggccagggacaccaagatgagcccgaccgcgaccgcctagccatcagctccaaagaagaagccaggggaccgatggacgtcagtgttccgtcgtggtggcccgctagatccatattcagcaagaaagatatctcgccatgccggcccagggccgcagcccgtcaccttcctccccccgcacccgccgtgacagccgcctccccacgcccgcttacccgactggccgcacaagatgcccacagtggcccccatcgcgcccacccgctccccccatccaccgcgacctcagccgccacgccgacgccatccccgtcctctagcgcgttgtcgccgtcgtcacaccgccaaaggtgcctgccccctgctaccgaggtcgacgaccagcagcggcaagctgccgagctcgacgacacgcacgccatgcttggccatatggacgagtccatcgcctgctacgagaaggggctccagatccagatgtccgcgctcgatgagcgcaatccctgcctccctgagacctgcaggtgattgacaaggtttaggaggaaacttccaaaagccggtcaagtatggagtgcttaacatcactttggcaacttatatttttttacatgtttgctttgtttgttaacaacataatttatgggctgacaatgtgatcatgtattctttctggtagtcttcgtgtcactgcttgcagttgcaggggagggatcatggctttcttttattttccatgtgcaatgtttaatttaggtgatgaactccaaagcttatcccattgttttctagcaagagctaagcaatactggatggagaacatttatctttttaataacgagtaaaagcataatggcatgcttgtgtttagttctctgtttgttgaccaatcgctatatttaatcttgattttttttatctataacttgaatttcaaagattcaatattttttattcagacattttctcttctctagatattcttttatgcaaataacgcggttacactagatcagccaacattctgggaaataagctatatggtcagagtaagaggttcaagagttgatagttcaacaactttaactgagagcaaatctacaagaaaaaggaaacaagcaacctggaacctacaactgcaggagcttgcttgaaagtgaacaatcaaggttgtgtgtatatattatgcccgacatttttgaaggatattgcgagggccattgtatctgctggaaaaatcatttcaacttgtcgaacatggtattaggatacgaattggagtggtcaacagaaattctggacagatatgtcaaatttcagaatccacgatggtcctccaagaaataaagatgctcttgatcatctattgagaagtggaatactaattttttgctgcagcgtgatggataaaggtttttgcgtattcttgggtttttttcctttcctttttggctacacacaactctttttaaatatacattcagtaggtggcaatgcctcctatttccctaaaaatatagcgccaaagagttcaaaattgaattctcataatctgctattaggaaaagaggtcaacttctatattttttacatcaggtaatttggctataatacaacggcatgctgaggtcaacttctgtatttttttctgcaagtaacttggctataatacagcggcatgctccattctgaagctggtcaagaaataaatatagcacttgcaatattttccagtagtcaaacctctccattacttcaattctcgttctcatttttgactatgttcttcatgtcagttcaacataataattaagaggtcgcttgcccctgagacggcttcatgatccatcgaagatggcgcttaatctcgagagctagggagatgaaatgccttttgtacatgatggaaggaaacaaattacgtacatttgattcaggtggttgattatatggtggttcagagagctcgaggtgaatcacagagtacatatagatctctccactccagtcactatgttgggaatcctcagcctttggaggaatcatgagtgcatacttcagtggttctccagtcacttatggcgtaagatttgtctttggtgttacagcacttttgccactgttccgagtagcagagaaggacaactctggcaaactgtgaagaaaataaaagattttcacaagcggaatcttcagaatctgaataaaggagttcgtgggaatcagttgtaccaaaaactggttcagttttcgtattccaagcatactactggaagttcacactgatcggcgacaaactctcgcccaaggagaagttgaaggaggatcagcgtgaacacccactgaaagagagatggagttgaatgagaaatctgaaaagaatacgcaagaggtagatgagaagttccaaaacacaaacttgtatctcaagaacttagagatggagcttcgggagttacaagtgcttcataagcaatcagatagatctgaaagttttactgtgccaacacatgcacacactggtggtgcctgcatctagctattcagatcaaagcctgacaggtaccatagggcaaagtgaagaagaaacagaagagttgagcaagatcacgctagagaataaggatattcagcttgatatcaatataagagaagaatcttggagctcttcacaacaagtgaacttttacacagaaagtaccagctccagtgaggcttgtttgatggagccgaccctatggagctgcatgtttatgattttaaaggacctggtgtaaccttatcaatgtacaatagcgatgagtttattaggccttttgctaagtcctccatggatatggctctttcaaaaaagtcgtctcttcatctcagcaccaagaatacaatcatcaagaagtatgacgacaggcatggatcatctatgtttctacaagctcgcggtcacatttattaggccttttgctaagttcatggatatggctctttcaaaaaagtcgtctcttcatctcagcaccaagaatacaatcatcaagaagtatgacgacatgcatggatcatctatgtttctacaagctcgcggtgatcaacttgctattgggaaagaaactgcacgtcgtttgggaatgggtactaatatgtacccttcctctgctttactcagacagaataaggatgagtcaattgcttccttgccaattgatgaattgatcgagaaggctgatggctttgctggtgtctttccagaacacaagtatgagatcgtgaaaggcttgcaagcaagaaaacatatatgtggcatgactggggatggtgtaaatgatgccccagctttgaagaaggctgatattggtattgcagtagcagactctactgatgcaactcgtagtgcttctgacattgtcctaactgaacctggccttagtgtgattattagtgctgtgctgacgagtcgggcaattttccaaaggatgaagaattacacgatctatgctgtatcgattaccatccgtattgtgcttggttttatgcttcttgcgctgatatggaagtttgacttcccaccatttatggtcctgatcattgccatcctcaatgacggtaccattatgactatctcgaaggacagagtaaaaccatctccacaaccagacagttggaagttagctgagatttttgcaactggagtagttcttggtggttatttggccatgatgactgtcattttcttctgggctgcatacaagactgactttttcccgcggctgttccacgtcgaaagcctcgagaagaccgcccaggatgactttcagaagttcgcctctgccgtgtaccttcaagtcagcacggtcagtcaggcccttatcttcgtgacacggtcgcgcagctggtcgtttgtggagcgtcctgggttcttgctggtcttcgctttcttggtggctaagctgattgccactctgatcgctgtatatgccaactgggcgttcactgcgatcaagggcattggatggggctgggccggtgtcatctggctctataacatcgtcttctacttcccgctggacatcatcaagttcctcatccgctatgcgctgagtgggagggcatggaacctcgtccttgagcagaggattgcgttcacgagcaagaagaatttcggcacggaagaaagggagcgcaagtgggcgcatgcgcagaggactctccatgggctccagccgccagaagcatccatcttcgagaacaagacgacattcaatgagctgaaccagctcgcggaagaggcccgcaggagagccgagatggcgaggttgcgagaagtgagcaccctgaaggggaggatggagtcagtggtgaagcagaagggtctggacatctagaccatccagcagtcctacactgtgtgactgactgactgacgacgacggggtttatagaggtttcttcttatactatacaatctgtactaggtagcaataaggatcaaggaaggaacccctatatattggctgcggttcgcaggaaatgaatgatggtaatatttatgatgtcggtgtggtgcttctgtcgccaactctcgaccatactaccctcaactcacccccggcaccaccggcaggcattgatattcagagatgaggttttgaatgagacgttcattatttgtacgtatttggaaagtcgtagaacaacatgatcaatactttgttcagaaaaggaacgcagctggcactctagccctttctagtctgcaaaaaattactgcagcatttcgaatgttatcttatggggtagttgctgatgctactattgattcacccctagaagtattcacaaacatgaaatgcagttctcttcttcaagtttgatgatgaagatgtttagtactacatcctgatgaagatgttctgcatgcacatgtact

SEQ ID NO: 33481 - DNA, 2661 bp, Zea Mays
ttcggtcaagggttgctgtcacacccggatttaaggggtaaacctatgtgcgtctcatatgtgcgccaaaaaagaacaacacatataatgaccaagtgtatagagataaatgtcacaaatattattacattgtggaagtgtcttacaaaaataaatgataacaaataaacgaactaatattattccttggcgccattaagactgggagacaccacctagacttcctcgtactcctcgtagtagtcctcctcctaggctacctgctcttcacatgtgggggttatatatctcaagggcgagatcacaaaagatcatagctcaacaagttgtgggaaataatgtgcatgaactcaccaaaggtgggagctcatgtgaagtgtaaagttgatcaacaaataatgggtaaaggtaaatcattgcttttaataagttggtcaagtattattagcacttactaagtataagtaagtaccagtccaaatattgagagatcgcaattaataaataaaccacaatgcgatgcaaatgacctattaaatttaattccataagttactcatgtgagggtccgagccgctcatgaccgtgagcacggctgatataccagttttacactctgcagaggttgcacatctttacccacaagtcatgttatccatctgccatggggttgtataggccccacacacctctaccaaggaagcgaggcacggtaacactatgaagcatttacaaagttccattagcttcagaaaaccctctacgatttctaaggagcgcaatataggaatcctccgtctgaaaagccatctcagcaagatcaacctgagaacctccctataacgacaactccccgcccttgcccctttcgagtaaggtagtcctccactagatttcctaattagttagccaagggcatccgataccacccttgtggtagcactattttcccgggtggtcgctccatgttctaattaacataatgatcttgtcatgaacagtaaataactcatttgtaataaaagcatgatcatgaataatgtgtatcttaacacctaaaaccacataaagcaataacaggtactactcaaaagttgagtggtaaacaaggtataaagatgaccaaactagggtgacctattgggtcccagcaaaattagcctatgcagatcataacgattaacatgaacattattgggtaaagagaagtgatcaagggcacaagttgccttcaatgagctcctgctcagtattttccacctattgggtaccgggatcctcggatgcttcctcgtactcgcaacaatacaaacaaacatggtataggagaaattaacatcacaccaaacataagatcatactgcataataatgttctacacatcgtaacgagatcgtaggttcgagaatcactaaattcggagttacggttgaagagttatgattttctgaagttttaagtgttagatatagaatgaattaagtgcataattttaacctatgcttcataacaaaatggatcaaaaaggagtttaaatgaatcacttattaattaaacaagtttctaattgggctacgccactattctggagttctccaaggtctatcctacaatatccaggactcatgtgtaatggttttatcaataacctggagtgtgggttgataagtaaaagcactaggggctattttgtatagctggatggctgaaggggtaccatcgcatatgggccaccagaacgaacacagacgattcaggttagattggagcggtgagaagatcagtatgctatacgagtcctcagatcggggatctacggtccgaggcccacgtgacaacataaccactagctaaccgatcgacggccaaatcttattgtcgcaatggggtatgttcatgcgctaatctgaaacgcccaacgtgagatcgatggctagggttttatgaaacgtgacccaaatctgacccttggattcgatctcaatggtccgagtgcaatacaaccgaaggggtatccccacctaatcgtggtcgttacacacgaaatctatggcccaggaaccaagggtcgaatcgtaagactaccacggcggaggacttcaccgatgaggcgagtctacggtcctagcgccccaacctctaacccaaacagctctacacgatgcggaaataaaagcgaatgcgggtgaggaaaccttaccgaggatgatgcgcgcaggcgggcaatccacttggaagagcggatctgtggtggattaggctcgacgacgagaaattacacagggctccagtgaacttcgcccgaatcaatgaggagcacgccttctacgaggtgcgatgatcccccaaagccgagtcccaagcccagacttgtcgcggttccgatttcccatgccggcggcctgctctcactctcgtttcacactctgcgtcgaagtggctctcggctattgctcctggtgcgattggggtgggtcgatatggcctaggcgaccctaccgcattggtttatagcagagaggatccccccccagttggctcaccccatcggggcggttgttgtaatgttcctcgccgaaagctccgcgacgtggaagacaaacaaggctggggagagtgccccacacgtcagctagaagaatgactggtgcacgctgagtg

SEQ ID NO: 33482 - DNA, 2129 bp, Zea Mays
ccttacgtaacttatcttccttatcctatctccatagccccatttcctatcctcctagccgatcccctctccctcacggcgccctctcccatggccgtcggccctccccgccatggacgccgctcttccttcctacagatgttgacaattggaaatccatgtagcaaataaatgattttggaactgggggcagacattggaggtggattttcctcaattggagatattgacaaattggaaaaaaatgtgacttgacctgtgctgcaacaaccttaagggcttctttggattacaggaattttgaaggaataatgctggaataggaaagtttcctatcctatagtttggctggcatgatgcaccaattatattccataggattttatctctttatgtgttgattccataggatttctaacatccactcagagctcttggaaaaattcctacacgcgaagcacgagaagtggaatgctaatgctagcaactaatggcccattatggcttgtcctacccaaatttaaatagagaaaaacacatataaagcacccatttgatattgtttttatccaagcttgacattcatgcaaaatgaacccttcgttttttccttgccccaaccaaacaaccttccactcaatattactacgttttacaatcctctgatttgcacatacaatcctacgtttttcctattcctatgtttttcaattcctacatttcaaaggagccctaaactaggaggggcttctaattcttcatctctaccaacagtcctctcctgttactttttaaaccaataactttttcaagtttgtgcagatgcacacatccttgagccaaaatagaaaaaaaatcatagaagagttctttgggatgtgcagtggtggtctcttaaaagaattttgtgttccagcgtagctatttccactgcaaactatcaaatcattacaaactgctgggaacatgctccatcttattatcgaagcctgtatctcgagaaagttgatcgatacatctgcttatttatggcctggttatgttgtaccatctgggactttaaaagatacagctttgccccaagaatccccttggttaaactttatgaaagggtctcgacattcaggaccccttattgatgctctggtcgcatctcctgcttcaagttcaagctctgcaagatgaggtctgttcagtttggccaaaaaggcatcccctacctgaacacctacgacggctgcaccatcctctaccccgacccgctcatcaaggccaacgacaccatcaagatcgatctagagaccaacaagatcatggacttcttcaagtttgacgtcagcaacgtggtcatggtgaccggcgggaggaacaccgggcgtgtaggagtgatcaagaactgggagaagcacaagggcagcttcgagcagctggctggccccgacgcagcgcagcacgcaagagctagcggcgccggcgcggccggtgaaactgaaatccagacgcaccgctcacgcagctttgccaggcaaggcccagcagcgcagccagcagaaccaccagaggaccttcagggcgaagaagagcctgtcgtcgcccgggaacaaggcaggaacggtacgcaactgaggaggcacattgacgccactctcggcagcggcaacctgcgagaggctgtccgtctacccgtcggggaggacctcaacgagtggctggctgtcaacactgttgacttcttcaaccacataaacgttctgtacagcacgctggcggagttctgcactccacatacctgcccggtacgagtacaggtgggccgacggagagccaaggtcaaggtgcccatcaaggtgtccgcgcccaagtacgtggactacctcatggactggatagagatccagctggacgacgaggccattttccctcaacagcttggggctcctttccctaccaacttccgcgacgtcgtcgtcaagacgatcttcaggcgcctcttcagggtgtacgcgcacatataccactcccacttccagatgatcgtcaagctcaaggaggaggcgcatctcaacacttgcttcaagcactttgcgctcttcacgctgtttttcaagcctgacaagcgccccggatga

SEQ ID NO: 33483 - DNA, 4654 bp, Zea Mays
tacaggctcacaccaaaagcggcatagcagtatagcaccataacccctctcttccccgatggacgcgacgacgaagcggcggcaccagcccggcggcgcgcagcccacacgccgtaaggtcgtggaggaacccttccacaccgcaccccctacacctgccgcggcgtccccctcccgcctcgtcggcgccatcgtcgagaagggctactccgccgccgcaccctcctcggcgccccgaccttccgtcctccccttccccgtcgcccgccaccgctcccacggcccccactgggttcccttggtgaaggacgcccccaaggatgagaccgcggacaacgacgacgagatggacatggatgagacagactaccatcctgtggcagctgctgcagctggtcctgtgaggaggaaggagaagaagggcatggattttagccggtggcgtgagtttgttggcgatgctccccccaagcggaggcaggggaagccagtgcaggccaagaaacagagcgatcagagaattgatgctggggctgtagcttctaaggtaggtggtgtggcagctgaggggagaggattggagggaggtgctatgcggcttgacagtggaaatgctagcgaagggccaggtcccgtgcttttggtttctgatgtcgtgtccaagaagccaatgagtcaggttgaatcgagagatgaattggtgaacacaagtgaggctaggaatttggcatcacaagcagagagtatggacctcgacggcagggagtcatctatggaagcagagatcagcgcagagaacatggctaggttggctgggatgtctgcaggggagattgcagaggcccaagcagatattgtaaataagctgaaccctgcattgctggagatgctgaggcggcggggaagggagaagtctggaggcacgaaggatgtgggtaaggacaagggtctgaaaaactcagggctgcagaagaataaaagggctacaccaggggattggttgactgctggtgaacatactgggcactcctggaaggtgtggagcgaaagagtggagcggatcaggtcttgtaggttcacattagatggagacatattggggttccaatcttctcacgagcaacaagatggcaagaagatgccttcagaaagtgttgctgagcgtgatttccttagaacagaaggtgatcctgcagctgttgggtacacaatcaatgaggcagtggcacttaccaggagcatggttccggggcagcgtgtgcttgcactgcaacttcttgcttctattctgaatagggcattgcagagccttcataagaccgatctaatggataatgttaaaggaatgaattccaaggataacattgatgactggcaagcagtttggtcctatgcccttgggcctgaaccagaattggtactctccctaaggatggctttggatgataaccatgattctgtagttttgagttgtactaaagtagttaatgttatgctgagctgtgagttcaatgaatcctattttgaattttcagagaaagtaggtaatggaaaagatatctgcacagctcctgtgtttcgtagcaaacctgacttagatggaggctttcttgaaggtgggttctggaaatacaacacaaaaccttcaaatatactcccacattgtggtgataatgacgaagacgaagctgatgagaagcatacaattcaggatgatgttgttgtgtctggccaagatgttgctgctggttttgttaggatgggaatacttccacgaatctgttttctgttggagatggatccatctcctgctttagaagattatcttgtatcggttcttgtagcactagccaggcactccccacaatctgctgatgcaatcttgaattgtccaagacttattcaaagtgttactaagctgttgataaatcaaggatcaatggaaattcgctcctcacagatcagaggggttactctcttgaaggttttgtccaaatacaacagacaaacctgcttgaattttgtgaatcatggagttttccagcaggcattgtggcactggtacagaaaagctggtactattgaggactgggtaagatctggaaaggaaaaatgcaagcttagttcagcaatgatggttgagcagctgcggttttggagaacctgcatctcctatgggttttgcatgcttaattcaattttggaaagaatatcaccagatgtcactcctgaggataaaagttacagcttgccctggatacctgattttgtccccaaaattggcctgggcataattagtaatggttttttcagctgttcgaccactgttgctggtagaaatgcagaacatcagcctttttgctgtgcatctttggtgcagggactttgttatatgagatgccatggtaatgttgatgtatcattgtcttccattagctgccttcaaagattggtgcagctatcctggtctgtcgacagagtgatccagggagccacaaaatgttgttccgagtgtttcaatgagtctggaacaggtgaagctggcaaactactagctgaaggtatctccagtttatggcataatgatttgctacacttgctgacttcgcttttgccaatgatttcatcacaatggtccatatcacagaacatagagatgtttggtagaggaggaccagctcctggtgttgggtttggctgggggacatgtggtggagggttttggtctcttaaatgcctacttgcacaattggattcacaattggttgtagaattgatcaaatgtttctcttcagttcaaggaagtcctatcatcctcgatgaaggtgtgaagttagataatgtgactaacacagttgtgacagcttcaaattggatcagttctaccctagggttgtctctgattgctggacctggacaaatctatatgttggagaaggttttcgatatgatttttgaaccttccattctgaagtatctcaaatcatctatacataaatttacctctgacatggaattactgaaaccttttgaatgggacttaaatgaagatgaatatatgctcttcagcagtgttctcaaatcacatttcagatccagatggttagccatcaagaagaagcattcagataaatatgcaggagataatagcagcaccaagatttcaaaaacaccagagatattggagacaattcaagaagaaacagagttgtcagaagctgtaaatcaaccttgcaacacattaatggtagagtgggcgcatcagagactgcctcttcctatccactggattctaagtgcagtttgctgcattgatgatccaaaaggcacactctcaacatcagccaactatattcttgatgtctcaagggctggtcttatcttccttttaggtctggaggccatttcagctaccccgtgccttcatgctcctttgatctggaaaattcatgcactttcggtctctatccgctctagcatgcatttgctacaggaagacagaagtagggatattttctgtgctttacaggaactgtatggcctgcatctgaacaggttataccaaaaattctgtaaaccaaactctatcgaggaagttaagggcgttgtagtgggcacttcagaggaagcgatggagatcagtagccttgaaattctcaggtttcaggagaaaattcatggaagctatactacttttgttgagagcctggttgatcaatttgcagctgtctcatatggagattttgtttttggtcggcaagtggccatttatctgcatagaaaggctgagccagcagtacgtcttgcagcatggaatgcactgtctagtgcgtatgtgcttgaactgttacccccgctagacaattgcattggcaacgccccaggatacttggagcctcttgaggatgatgaaaaaattttggaatcttatgctaaatcatggacgtctggtgtcctggacaaagctttacagcgtgattccatggccttcacattggcaaagcatcacctttcaggctttgtcttccagtccagcgattctggcacaatgctgcgaaaaaaactggtcaaatcgcttatccggtgctatgcacagaagcggcatcatgaggttatgcttaagtgcttcgttcagcaaggcatcgcacaggattccaagagcagtgagcttgaccggagatttgaaatcttgaaggatgcttgtgagatgaactccaacctcgtaggtgaagtccagagactgaaggcatgtcttggccaatgaagccagatatttaagtgtgtcattaacttggcagcgttagttgttgggaaagctcgacaaagtggcccaaaatatgcaactgaggaaactcacggtcggggctagtggttacttttaattttgatgaagggaacgccgagcacgcagcaaccctgagtctaacctggctatggttaggctgctcttagcagagcatgcatatggtcatgtaaacagtagaccacactgtctattgagtgaagtttgaaatagactttatatatagcattaggcttcctttgattcctcttccgcttctcatagtcggtggcgttcagccatctttcactatcgtggtttcaacatctaaagacgcttaagtcaggacaaaggcatcacgtataagaatag

SEQ ID NO: 33484 - DNA, 1337 bp, Zea Mays
accccggcggtcgcccggcgccgctgcaggccgcagttgtaggtacagggacaaatccccggttctttctccaccctccgaccggccggcggccgctgcaagtttcaccgcagttggcaactggcaaccccgctctgacctaggaggatgtcgggtttcggcgatgggtacgtggggacggcgcaggacgcggtgaagatccggcggctggagaagcagcgcgaggcggagcgccgcaagatcgaggagctcaagaacaagtccgcggacgggcagcccggcctcctccagttcggctccagcacctccgagattcttgagactgcatttaagaaggaaacagttggtctcgtcaccagggagcagtatgtcgagaagagggttaacattcgaaccaagattgaggaggaagagaaagagaaacttcaaaagctgcaacaagaagaagaagaattgcaaatgcagaaaaggaaaaagaggagagtgaagagtgatccacgcttatctttctgtgatgacattgagaatggaagtgacgaagatgattttgagaatcaagaaaccaagaaaaatggccctgccaaacttgggaaggatccaactgtggagacaagttttctacctgatagagtgatccttcagagaaagggaggcagaggaacaagcagaacgagaacgactgaagaagcagtggtcgcatgagcaggaattgattaaaaatgaacctctttcaattacttacagttactgggatgggactgggcacagaagagcaatccaggtccgtaaaggtgacaccattggagaatttctaagggctgttcaacagcagcttgcccctgaattccgtgaagtacggacaacttcagttgagaatctactttatgtgaaggaagatcttatcatccctcatcaacacagcttttatgaattaattatcaacaaagcaaggggcaagagtggaccacttttccattttgacgttcatgaggatgttcgtaccattgccgacgcaacaaaagaaaaggatgagtcccacgcggggaaagttgtagagaggcattggtatgagaaaaataagcatatattcccagcctcaagatgggagatctatgacccaacgaagaagtgggaacgctacacaatccatggggattagcatggaacatcatacatagagagttaaattattttgtactttggatgtccgaaattaccagcactcaagaatatgagaatggcacaagtgacgatttgaatagcataaattattactgttgtttgcaaacatgtcctgcatagagtactaggtaaagcctctttctcacactccaaat

SEQ ID NO: 33485 - DNA, 2484 bp, Zea Mays
caaaatcgcaacaagaatgtccacaagccacagccttgtcttgtcttctgtatctacatcctctcgcaattccccatcgtcttctacccttctgtcctccgatccccaccctccggttaactcctcaccaagaaaaaggaaccggccgtcctcgttcctgtcgtcgctgttctttcctcgccattaccggcgtataaaaccagccctcggcctgatcgcacagcatccggccaagcgggagtagtccctgtcgtctgtccaccaccctctgcgagtacgtctcctcctcccgtctgtctctctctgtgtgtcggtctgccgttcccgccgccgccgccgcagatgggcctgttcagctcgccggccaaggtgtacaagccggccgccgacgtggacctcggcccaggcagcgacgagctctacatcagccccaatgtcaaagctcctcgggtcgccgggctcctggtgaagatcttcgtgtggatcctggagatgcccatcgtcgggcagatcgtgctctacatcctgaagaaggacaacctcatcaacaagctggtgtccgacgccgacatcccggagccgccgctgttcacggcatcgcacagctgggaagacaccccggagcagagcgtgcggctgaccaagcccgacctgtcggcggcggagcgggtccaggaggccgtgggctgcctcccggcgcggctggaggccgcgctggccgccgacgcgcgcggcatcaggcgctggaccgtccgcgacttctccgacgcgtacaggtccggcgaggtgacgcctgtccaggtggcggcgaggttcctcgcggcggtgagggagagctcgggccctggcgtgagcaatatggccttcttcatcagctgcgaccccgacgacgtcatgaggcaggccgaggaatccaccctcaggtaccagagaggggcgccgctgtccgcgctggacggcgtgctggtgggcgtgaaggacgagatcgactgcctgccgtacccgaccacgggcgggacgcggtggctgggcgcggcgcggcgctgcgaggccgacgccgcgtgcgtcgcgcagctgcgcgcctgcggggccgtcctcgccggcaaggccaacatgcacgagctcggcgccggcaccagcggcatcaacccgcaccatgggtcgacgaggaacccgtacaacgccagcacgatcgccgggggctcctccagcggctccgccgccatcgtgtgcgccggcctctgccccgtcgcgctcggcgtcgacggaggcggctccgtccggatgccggcggcgctgtgcggcgtcgtcgggttcaagcccaccgccgggcgcctctccaacgccggcgtcctcccgctcaactggacggtcgggatgccggggatcctggcggggacggtcgaggacgcgctcatcgcctactcggcgatcgtcgaccagtcccagccgtcctacttgcggccggaactgaatcttcctcagctcggctccacactctccatcggcaacatcaagctcgccagatacggaaagtggttcaatgacagcgccgaggacatcaggagctgctgcgacaaggcgctgcaggcgctgcgcgcgaactacggctggcagaccgtggacgtgaccatcccggaggtggaggagatgcggctggcgcactacgtcaccatcggctccgagtgcacgacgtcgctcgccaaaggtccgagatcggctgggacgcgagggtggcgctcagcgtctacggctccttcagcagcagggcgtacctgaacgcgcagcggctccggaaccgccagatgtacttccacaagcagatcttcaaggccgcggacgtcatcgtctcgccgatgaccggtgtgactgcgtacccgctgcaagacgacgcgctcagcaccggggagctcgactacataaacggagccgcgctggtccggtactccatagccggcaacttcctcggcctgccggccatcaccgtcacggtcggctacgacaggggcggcctccccatcggcctccagttcatcggcaggccgtgggccgaggccaccctcctccacgtggccttcgccacgcagcaggcgtgcgccaaggggtacaagaagccgccggtgttctacgacctcctcggcaagcaacaggactgaggtcagcgacgcgccgccgccgccggcggcgagcgagcgaggatccaccgtatatgtatccgtgggggtcgatcggaggagaagagacgtatagcagcaggacaattgttgtcatgtataccttcattctcgaatcattatcgagtatttgtcgttgactactagttcattcttgaactaaaacacggtaaataaaaaataattgaggtcgttcataatctgagaagagagaaagaaatttcactcactagcggtacatcatcagactcggcggcacaaaatcctgtccggatacatattgttgtaacaattacgcagtaaagcttct

SEQ ID NO: 33486 - DNA, 722 bp, Zea Mays
ctttttacgagataatattttgcttggtaaagaatttgatccaaggagaggagatatgtcacatattggagagaaaggtaccaacttatctggtggacaaagagctcgtctagcattggcaagggctttgtaccacaattctgatgtatacttgtttgatgacatccttagcgcggttgactcccaagttgcttcgtgcatcctggaaaaggctattatgggggcaccaactaatgcagaaaacaagattactaagcacacacaatcttcaggtagttttcactgaatcttgtccaaaaaaaaactacaccacattggtattaaatgtatgaatcgtccttttcccctctattcaacttttgttatagaggctcgacatgattttaataaggtgcgttcacattttatgttttctaagtaattgttgctaggccgagggaagtagctactttgacctgctcaatatgggagacaactatgacagattctgctcttctgaatcctaaaatgacggtgcattacagtaaaacgacagagttctgatggctctgttatgtccgatggccccgggcagccgtcggacataacacaatacgtctgacggctggcagagagactaattggtctactaaagtagctactctgacctgctcaatatgggagacagctatgacagattctgctcttctgaagaagctattttgatcgattttggctgcaac

SEQ ID NO: 33487 - DNA, 342 bp, Zea Mays
tttggcaactgtaccttataaactacaggtccaccaaatgaactaagttccaaggcttcacgaatagaaaaaggtagtatagaaaagcaaagataggtagcatgaataggatggatgaaacatgtactaagctactatataggaggcttaacttaaaattgtatgtcatgatgcatgctcgtcctattcgtcctcacaattcttgccaacatatagtggctttcacattctatggcggtggcaatcctacttactccgtcattgatcactagtcacactttcctagggttttagttagtgtacctgcagaaaattgcattatagttgtgggttagtggttag

SEQ ID NO: 33488 - DNA, 1396 bp, Zea Mays
cttggacctctcgcggccatctttggaggttctttgcgcgttcctgttttcgatgtggaattggggtttgggggactgtcaccgctataaagctgcggcctgccaggcgcaaaattgggctagaggaaagaacggacctgagcttcgcttcttgctgccgctgccgctgccgcgttgtaaaaagatcatagatttttgtgcaagagcgagtggatatggaaccatcccctcagcctatgggtgtcgctgccggtgggtcacaagtgtatcctgcctctgcctatccgcctgcagcaacagtagctcctgcttctgttgtatctgctggtttacagtcagggcagccattcccagccaatcctggtcatatgagtgctcagcaccagattgtctaccaacaagctcaacaattccaccaacagctccagcagcaacaacaacagcagcttcagcagttctgggttgaacgcatgactgaaattgaggcgacgactgatttcaagaaccacaacttgccacttgcgaggataaagaagatcatgaaggccgatgaagatgttcgcatgatctcagctgaagctcctgtagtctttgcaaaagcttgtgagatattcatactggagctgacacttaggtcgtggatgcacactgaggagaacaagcgccgcaccttgcaaaagaatgacattgcagcagcgatcactaggactgacatttatgacttcttggtcgacattgttcccagggatgagatgaaggaggacggaattgggcttcctagggctggtctgccacccatgggagccccagctgatgcatatccatactactacatgccacagcagcaggtgcctggttctggaatggtttatggtgcccagcaagggcacccagtgacttatttgtggcaggagcctcagcaacagcaggagcaagctcctgaagagcagcaatctgcatgaaagtggctgagaatattgctcagaagctatcacctgattcagagttctcattttaggttgtccaaactgcaggttttcttagtaatatcgttggttatcaaactgaaacaggcgattctaagtagggtgtagcatcatggtagtttcatttctgcttgtgatgttagttgaaaggataatgattagtggctagtggattaaagttaccataccatttccttctattccgaaagtttgcctccatgaggcctctgatatgacgtgctagttgttaatgcttctatgctctgcttgtgctgtacagttcaagctgtttttttggttgctcttgatttgtagcatgtaaggtgctgttaattcttgggaaattcgttcgagacctcaatatagttgaattctgagatccagtagagttggggcttggataagaccaa

SEQ ID NO: 33489 - DNA, 5149 bp, Zea Mays
cttactgggaggtgaaagggatgatattatggcaacgttccagagcaacaaaagcagcctgtgcgatcttatgatgcggagatattttcttggcatgatcaaaaactcttaaaggcttcagcatttttacctaatatggaatccccatttgttccaaattcgtttactgggaagagaaaatcaccagttggtaattcagccatagttcaacctcatgttggatcacgggctgttcatgagtatcagttccttcctgagcaaccaagtgatacatatgagagggcaacccgatctcactactatgacactccagtggaagtttcaaatgctaggataccttctatcacatcaggatcacaacttctccatggatctgaggaggctgcgcctagttatgcttttcaaggtcacacatctggttctagcctgttgcctccgtccagcaggccccaagtgtttccagcagcaccaacagattatgagatgactcagtctaatagcaaccttagttctgttcctgttgaaggacagtttgatatttctcaggttgctgcatttgaaaacccacctgtatcatctgaaataatagcttatcatgatgaagatacttctcgcgtggaaagaaaacgaaaacatagtgaagaagcaaagattgcaaaggaagttgaagctcacgaaagacgaattaggaaggagcttgagaaacaagatatgttgaataaaaagagagaggagcaaaggcgcaaggaaatggagagacttgatcgtgagagaagaaaagaggaggagagattactgcgtgagaggcagcgagaagaagagaggttccaaagagagcaaaggcgcgaacatgagcgtatggagaagtttttgcagaagcaatctagacgagcagagaaacaaaggcaaaaggaggaactccgaaaagaaaaagaagcagcaaggcaaaaggctgccaatgaaagggctactgcacgtaggattgcacgggagtatatggaactggtggaagatgagcgtttggaatcaatggaattagctgctcaaaacaaagggttgccctcaatgctgtatcttgacagcgacacattgcagcagcttgattcctttcgaggcatgctaagtcaatttcctcctacaacggtgagaatgaagttgccattttctataaagccttggactggatccgaggataacgttggaaaccttttgatgtattcatataatttcatctcaggagacattttgctaactggattgcaggtgtggaaattcttaattactttcactgatgttctgggtctttgtccagttacacttgatgagtttgttcagtctcttcatgattatgattcaaggttgttgggggaactgcatattgctctgctgagatccattataaaggatattgaggatgttgctagaactccatcaattgcactgggggtgaatccaggaggtggccatccacaaattgttgaaggggcatatgcctggggattcaatatacgtagctggcaacgccatcttaatcttcttacatggcctgagatattaagacagtttgctttatctgctggttttggacctcaattaaagaaaaggaccgtagaagattcttactatcgtaatgataatgagggtcatgatggtgagaatgttatattgacgattcgaaatggtacagcagcagtgaatgctgctgctaagatgaaagaaagaggttacaccaatcgccgtagatcccgccaccgtctcactcctggaactgtaaaatttgccgctttccacgtgctttcgcttgaagggagcaatggtctcacaatattggaagtagcagaaaaaattcagaaatctggattgagagacctcacaacaagcaagacacctgaggcatccatagctgctgccttgtctagggatacaaagctttttgagagaactgctccttcaacatattgtgtgaagtcgccttatagaaaagatccggctgattctgaggctgtgttgtcagcagcgcgtgaaagaattagggcttttcagaatgtgctttctgactctgaagctgaaaaggaggtagatgaagctgagagggatgatgattctgactgcgatgatggtgatgatgaccctgatggtgatgatgtgaatactgaggtggaagacgacaaggatcctcttcttgctgtcaagtcacaagatgaagtaccgagtacaactacagttattggcataaaggccaatttagatggtgtgggtaatgcattgaactcatcaagtagttttactaaatcagcaaaaggcgctcctctcccttctttaggcaggtccaatgcagcagatacttctaatgatttgcctcttggagtctcatcagctaatcatgaagtagtacctgatgattctgaaaatacacaaattgatgaaagcaatcaagccgagccttgggtacgtgcactagcagaaggtgactactgtgaccttagtgttgaagaacgccttaacgcactggttgctcttgttggtgttgccactgaagggaactctattcgtgctgtacttgaggagcgtttggagttagcaaatgccttaaagaagcaaatgtgggcagaagcgcaacttgacaagaggcgtttcaaggaagaatttactagcagagtacaatataactctgacatgggtttgaagcctgatatatatcaagaaaacaacgtgacagagattacttcaactccagcgtgtgatgcttatagagagaatgatgaacatgtcgggacaatcaacaattgtgagatgcttgatcagcataatcagggtaatgctggtagtctaccttatgagagaaatggcgtatgccaggaaatcctcgcaaccccagatacttcgtatgttcagcagtatgcttatgctgataaaaggcgatctcagttgaaatcgtacattggtcaccgggcagagcagctttatgtttacagatccttgcccctaggtcaggatcggcggcgaaacaggtattggcagtttacaacttcagcatcaccaaatgaccctggctcaggaagaatcttttttgaatccaaagatggatattggagagttatcgactcagaggaggcctttgattctttattggctgccctcgatacacgtggcacccgggaggcacagctgcattcaatgttgcaagtgatcgagccaaccttcaaggaagctattaaaagaaatgtgagtatagaattatctgctggaaggtatccaaagaatggagctactgacatgataagggcaaattatcacagtgaggttggaagctcaagcagtactcctagtgctacatctgacagtataacagcatattctgattcttttaaagtagagcttgggcgtaatgattttgagaagacagctatctcaaaaagggcagatatatttttaaaatggatgtggagggaattctacaatcaggaattgacatgtgccatgaaatacggcaagaaaagatgctctgaattgttgcattcgtgtaattgctgctatcagatttacctagcagaagaaaggcactgttcttcttgccataagactttcaaatccatttacaatttttctgatcatacaacacaatgcgaagagaaacagagaacagaacctttctggaacatgcaaaacactgattattctgtcccaataggaatggcatatataccatcagaagcacttcaaccattttggactgatgtgtatcgaaaatcttggagtgtgaagctgtacactaccaaatctattgctgaaatattccagcttttgactgttctggaaggtgcaataagaccagattgcctctcttctgattttgaaacaagtgagtgtctaaactcacaggttggatctgcttctgtccttccatgggttcccgacactacttcagctgttatgctccgaatgttagaccttgactcagctattttgtatgttcaaaatcaaaagatggatagagatgatggaggtttcatgaaatttccgtcaaggtatacagttgctaagagcaaacaagaaacaacacctgaaacagctggtttggatctgtatgatggaaggtggcttcctggtagtggccgtaggggtcgtggacgtggaagtagaggaggtagcaggggaggcagaggtcgaagtcgaggtggaaggatcccaagaggtgttagcagctcatcaaggatcgagttcaagggtggtattgttgcttctgataaagcgccaaggaagaatgtacgccgagggcgtggtcgtggtcgtggtcgtagacgtggacgtcgaactgtgaggcctcggcagccatctgttggcagagccagatcaattccaaaggaaaatttgttgggaagctttagcatgcttagcagctcaaaggctgctaccattgaggagtctccacgaagctctggcgcagacgagtggggcttggagaccagaacgacatacactgaatgtgatgagaacagctctggatcacagtcagaagataacgaggaaaatggccagcccatggatgatgattatgaagatcaagttccagattactcaataggctattctaccggctcgaggcaccatgtaatgatgtccatgatggaccatgatagtgacgaggaggatgaagatgctgaaggtgatgagaatgtggaagaagatgcagaccttgcagttgacgatgccgatgttgagatggacgaagatgatgaaattggtgatgatggagaggatggtggcgttggaggggagatgaatgcggatgaggatccggatgctacttcatattcatccgattacagcgactaagaaagcagaaataagggaaccttatcccagattcctccctcggcatggaatgcatgtagtaccgagtaggcattcccccccgttgtgagccaaaagggagcttagatgcttaggttcgaaggagcgaggaactgttttttaggcaccgcaggttttaatagaatttctgacgcattcgacgaagtgtttggttgtaccgtggtagttgtgttactggggaattccccgagttattatacaatgtgttaagacaaaatactgtcatatcgcatctggttgccatgcgtctaactggttcacggttttaccgtta

SEQ ID NO: 33490 - DNA, 195 bp, Zea Mays
gcggaagacttacaaaaaataaaagataaatataacaggatctagaatccatccttggcgccagaaagtcaactgggagacgccacctatatcaaatcgaactcctcgatgtggctcctcttgaaccatctgttcttctcctgtgggggtgtgggacagcaagggtgagctcacacatgttcattgctcaacaag

SEQ ID NO: 33491 - DNA, 1318 bp, Zea Mays
cgtgttgacatccgcccccttcccctcttcgactcacggcccacccactgcacgcgcaagcgagaggacggctccgcctccgtcccatggatggccgccggcgccacctcatggtgttcacggtcgcggtcactgctaggtggtggtccggcgtgctagatctcacgcctccagggcaggctccctcgcatgggtcgccgtttcctcatggtgttcacggtcgcgctcatcgctcgcagcgcggaggcgtcgatctgcatctatgatcaggagcccttctgcgaggtggacaatgcctcctcctctctggccaatacttctctgccagtcgcctgctcccaaggggaggggcgctggaatacgggcccgcagatggcgtcggctgtgcaggcggccatgatcgacgaagcctcctcagatctgtgctcatcgccaccagggtgataacctttgtatctcgatcctgctcagcatctcggtggtcgtgcggtgccagctggttcggtcggggcagcaggcgctcctggcacccgcctatccccgagggcgcgaccaaagggagtccacgacgaggaagcgacagggccgaaatcagatatgaatgccattggagggttagtactaaattcttgttgatatttatagttttctctatttacataggtacaataagccggcgaagtttcgtggtggaatcagcagggtgcccaccggccggcgaggccccggctgcccgaccggccagccagtcggagtcgggccgggtggtctccgtcgcagggctatcaactttagatcttgaacatgggacccaaatcactggcctggagcacaatacgaagaaaactagcttatgattgcagatctcacccatgggttcaatgagtcaaaaaatcgaaattttcacggaagatgagatcgcaagtattactagcaattatagcactcttattgatcttctcagctttgaacattattaatgtttatactattgaatgattggcatactgataaaattcgatgttaaacttgaaggtcgatgatgaggtatatgatgctttagccgtcaccttctttctatcttggaggatattgaaaatttgattcaaaggcgcctgaatgggcgccgcctgatctagtaataaggaaaggccgtggcccatgtgaaataccgaggcaccgagcagaccacggtggctagtgctcaagcacgaagtgggttgcagtgaaatgcaatgcagcaatagccaacagggcaagtgcagaacgctagaactaccgcattacaatttacaactttacaagatgaatcaaagac

SEQ ID NO: 33492 - DNA, 2689 bp, Zea Mays
gtacatgagaagaaacaagcgcaaatccctgaagcaaacggcgacgcaagtactcacggccagccgtcaacggataaacccatggaccacccaaaaccgcttgctataaacccaaaccggcaaaacatcacctcatcatcatctgcagtcctcttacctcttactatacaattccttcgtttccaacgacccaacggagcctttctcgctgccactgccacgcgggtcccggacccgcacgtcatccacgcgcgtcgccgactcaggagtcgataacgccctcgctttctctgctttccttcctccggttccattccaagtccacctgcccctcctccctccctatctatcctgtactctctctcagtttctctctccccccgttctccgttccacatcgcgtgcgcattgagacgacgagtttctagagcgccgtaccgcgcacggctcccgagccccaccgcaaagcgccggaatcgtgagcgcgtccggcctcgcctagctgctccgcgccgagaggcggccgaggaggacgggcgatgtacccggtggtgacgggcacgccgccggcgcggctgccggcggcgtcgcgggtggacaaggccacgagccacctgctgcagggccccgactgggccgtcaacctcgaaatctgcgacaccctcaacgccgaccgctggcaaacgaaggatgtagtaaaagctgtgaagaagcgattgcagcataaggatccaaaagttaaattctttactttgacgttattggagacaatgatgaagaactgtggtgaatatgttcattttgaagttgttgatcagcatgttttacaagagattgttaaaattgtccagaagaggcatgatatgcaagtgagggataaggctttgttacttctggattcatggcaagaggcatttggtggacctggtggcaaatatccacagtactactggtcatacattgaactaaagagggcaggagtaatgttcccacaacgtcctgtagatgctcctccaatatttactcctcctgcaacacatcaggcatatggttcacctagatatccttctggaagtctaaatgagagaatcacatctgaagctggaacgttgagctttgagggcttgaataatattagaaatgcaacggaactgctgtatgatatggtgaatgctttgaaccctgctgaccgcatggcagttaaagatgaaattattgcagatcttgtaaatcaatgtcgttcaaatcaacaaaagctcatgcagtttgtcagttccacaggggatgaagacctgctaaagcaaggactagaattaaatgatcgcttacagagtgtcctcacaagacatgatgctattgcttctggttctccattaccagttgagacaccgattagagaaccacagagagaggatccaaatcctgagccatctacaccaattacacatgataataaggctcaagttgaagaggatgaagatgatgagtttgctcaaatagcacgaagaaaaaacaaatctgtgatatgcggtgatgaggcatcatcgagtgctggtgatcaagccctggtacctgttgatccagcactttctgaagtttcttcggttgagagcaatgcaatagtacctctcggcgcaacttctgttagtggaaccaggacgaaggagcaggatatgattgaccttctcagcctcaccttgtacagtcctgaatcatcagaagactcttcaactcagaaccaaaatgggagtcagccgagtgtcacatcaaatggatcagaaacactgccaagctatcagcctgctgtggcgaacggggcaaattaccctgccaacacccaggtttatccaacaaatcagggatatgttccatacaataactatgtggcaccatgggcccaaacgggaccggttgcacagcctggggcatattcgactcaaacccagcaatatgtgtcgagcaatccggcacccccatgggctatgcctgcaagtgccaattcagctaatcctttccagcctgtgacataccaaacgccaaacactcctcctgctgcttctgttgccccttcagctgctccatcagcgcaacatgttccatctccagaaccaacaccggtgcaaagttacaacttctctattcctcaaacatacactggttcgaacgtggctacaaatgctcgggtgaacggaaatcagcggccaaaagaaactccagtggcagcagccagaccatattacatgccggacaatttgttcggagacctgatcgacgtgaagagttttggcgccggaagcaagatcagcaggtctaccagcatgccgagtccaaagggtggtggccagcctatgatcggtagaaacaaataggcctctgctgtttaagatagggatgagcatatatttagctggtagccactgtcgtttggtttgatgtaaatttgctgtcttttttcacgtgtcaatttgcggatttgttactttggtcaatttcggagttgctgcatgtttaactttactagagaattgtagagaagtcattgctccagatgatcagtgacatcattatcgtgacggtttgatgacggaaaccattgcctgcttcgtgttttccattctcatgtgacctgatgatgatcatgcatattaatttaatacgtgaacattttattttggattagagcaggaat

SEQ ID NO: 33493 - DNA, 3193 bp, Zea Mays
catatgtccgcgcctccacattaatcctgtcttttgcatacacaccgctacgcccccggctccaaccctacccccctccgcctcctcgccggcgcgctctaccccgcctcactccccatcagtgtctctcatcggcggctctccggtgcatgcccctcgccctccctctcacctatacacgcctccttccacttattgcgcgtcaatttcaccttctgctctcggtctcttcgccttagggcttcacgttggtccggggtacctctcgtgcgatccgcgcgcaatggagcaagatcaaagcccagccgtcgacagcgcggattctggcgccgcggcttttgattttgcgactggcaatgcacctagctcggctgtgaccagcggaagcgccgtggcccctgacggtggggctcaggcagctgatacttctgcctaccaggccgagcacacggagttgaatgggacgactggcgatatgtctaattaccaatctgcaggagctgcagagaatggcacagccgtcaccgagataggcgagccggttcctgagccatcctacgaggaagctgtgctttcagcagaagaggctagattgtggagtgttgttactgcaaattgcttagatttcaatgcctggaccacacttattgaggagacggagaaaaatgctgagaaatatgctgatcatgaagcgagacttgatggtgtcaataaagttattgaggtgtatgagcgagcagttcttgcagttacttattcagtggacatttggtataactattgtcaattcgcaatttcaacatatgatgacccagatatcgtccgaagactgtttgaacgtggcttggcatacgttggaactgattatcgctccaatattttgtgggatgagtatattaagtatgaagagtcactggaggcatggagtcacctcgctgttatatatacaagagtattggaacatcccatccagcagcttgatcgctattttaattgcctcaaggaattggcttcaaagcacagtttttcagaaatacttactgcggaagaagcctcggtgtatgttgtcacgtctgagaccagtgctcaagcgcctgatggtgacacacatcctgatgatatcgataaggctggtcaaccagaactttcatctttggcagatgcagaaaaccttgcaaagtatgtctccatgagggaagagatgtacaagaaggctaaagagtacgaatctgagatcattggttttgagctagctattagaaggccatattttcatgtcaagcctcttgacaatccagagcttgaaaattggcatagctaccttgactttatcgagaaggaagaagacattaataagtatttggacgaagcttcctttgtaatgggatgttgaactgaggatagagcgtggacataatgtttggtttcgatgaggctaagtactccaaactttcatttggcagtggtcgttctgggttcatgatatatggtaccaaataccagttttgaatttttaatctcatatatgcaggtatttgcttaatgctcaccttcttaaccatctatctatcgagcaggatggtccctcctttcttatggaggggcctccataatcagctaatggagttatcaaattgtatgaaaggtgtgtgattgcatgtgctagttattcagaattctggatccgctatgtgcaatgtatggaggataaagggagtctagacctagcaaacaatgccctggctcgtgctactcatgtgtttgtcaagaagcagccggagatccatctatttagtgctcgctttaaggagcttaatggggatatttctggagcacgtgcagaatatcagcatctttactcagatttatgtcctggctttctagaggccatcgtgaagcattctaatatggaacaccgactgggagataaagaattatcttgttcagtttatgaaaaggccatcgctgctgagaagggaaaggaacagagccagctcttgccgacgttgcttattcagtactcccgtttcttatttttggccatccgagatttggagaaggcaagagaaatattaactgtgctgcatgagcagttaaatgtaacaaaaacagtgcttgaggctgtcattcatctagagtcaatttttccatgcgaaaagcgtattgattttttagactcacttgtggagaagtttgttacacctgaatcatctcagggagaggtggcaagtctagttgacaaagaggaaatatcttccatatttttagagtttttggatctctttggggatgcaaagtcaatcaagaaggctttaactcggcatacaactcttttttcatgtaagagaagcattctgccatcaaagaaacggaaagcagatgacactgttgtctcagacagggacaaatttgctaaaactgtggttactcagtcagccacgggaactgatccaaatgcttccaatcctcctgtttggcctgcaacttctgaagcatctgggcaacaatggggagcttcttatgcacagcaggctgcatatcctgcatatggaacttacgactacagccatcaaatgccccagcctgctcctcaagcagctgcctatggtgcttatcctccaacatactctgcacaggcctatacacaacaaagctacccacagcctgcagtaattccagcagcaccagtaccagcacctacagcgccgtcagcttatcctcaacaacctgcggcagctcaaccttattatggcacaacctactactgataagtagagtagtcgtggatggtgatccgatgagcctgttaatctaccttttcgcatgtgtggttgctctgtactgccattgtttagctcgcctttagacgaatgctagcgacgagatgatcacttgagaacaaatctgagattcgtacaatcagcatttttgtcgctaggagttgccattgttttcatgcaatagcataatctactttagacgagatagcgttgttaaccatgaatatgaacataatcgacataattcagtgttcatgcctcctttcgtactgtatttttaccccaccagtggtgatggcgggattcctgtcaagcacgctcactggtggagccctccgaacaaattgtcagctaatggctcacgatctgcgactacgcagttgactaatttatactgtgtcaatgctcaacag

SEQ ID NO: 33494 - DNA, 744 bp, Zea Mays
gtgacacacgcttcttctccaatcttcctgtccctgcaagccttcccttccacaattccatccccctttcccttctggaactctcccgctgctccgcattccgtcgcttcacttcccgtagcagtcctcaccgccgccttcttctccaaatcccctgcagcccaagccctccactcccgttccccgcacgcgggcgagaccggatgaggcgctctaccagcgacgcgacgccgacggtggcggcggcgctgacgagcccgaagcccggcgccaccaagcggcagcgggaggcggcgccgctcggcgacgtcaccaatatcctccccgagaccccggccccgagtaagcccagaagaaatgcacgccgccggcccttctccgcgccctccgacgcctccactgcctcctccacctgctcctcctccgcctcgttcaccccggcgctcaagacgtcctcctccgcgtcggccacccccgcgcccaagccgccgccgtccttcactgcctccgtcacgcccgcgcccaagccgtccttcgccgccgtcaccgacgaggaggggagcgcgttcaaatctccgaccatttgcacggtctatgcgaggcgcaggactaccgaggccgaggctgagggacggagcaaccccaccatcaccaacaggggcaaacaacccatcggtgctgcggcgagttgccctcctcttggaaaatctacgaggaacattagttacggtctgagtgcatctg

SEQ ID NO: 33495 - DNA, 572 bp, Zea Mays
gaacatattcccattcccgtgcgaaacacacgctgattgaaactgccacgtgcaccatcgtaaaaaaacaaccacccctaagattttgctagccaaattaattttgcttcttcacccggcgcccgtagccgagatccatgtcggtggcgacccggcctgacgtccgcccccgcgccaatcttgacggtgaccaacccatccaggacggcgatgcgcgagtgagtggggaggacgagggggccgtgagtcgtcggctaggaaacgcgagcaggcttgtggtcaatggggtcgtatttcataggccgttgacaagcggtctaggtcgatctgacgaatggtggcaagtattgctcatgatagcgttcttccccacccagtctttccccgcatgcccatggcaaacagcttaagcgcctgcgaatccatcccttgcttgctggagctgaacctaggaatcatccagcctcacaatttctaggacaagatttgaggtctgtattttattccttgttaattcaatttgcacttaaatatgttttaaatggtttcttgcaaacagattagatattgag

SEQ ID NO: 33496 - DNA, 3290 bp, Zea Mays
ctctgcaatgggtttacttattcacatagcttttctcatctgtttgaattgtttattcaaaagctttcaagattccaacatcatatacattggtttgcagttatacccataccaccttgcagactatatatgccgagtgctgaggatctcgcctttcagatattattgtgacatcctttttgaaactatgaagaatgaacaaccatatgatagtattccgaacttcactgctgctgatgcactaaggctcactggtgttgggagaaacgagtttattgatattatgaacaaatgcagatcaaagaaactaatgtggaaactgaataaatcgattgcaaaagaaatgctgcctacacagcctgttgacttcccagttgagccttggtggggggtttgtcttgttaactttacactggaagagttcaagaaactttcagaagaagagacaacaacaatagacaaaatatgtaaagaggaagccaattcatatgttctttttgatccgaaggttatagatggactttataaaagagggctagtgtacttcgatgtgcctgtttacccagatgaccgcttcaaagtttctaggcttgaaaattttgtttccaataaggatcaatcatatgaagacccaattgaagagctgttgtatgctgtatttgttgtttcaagtgctaatgctactgttgctgaactggctgcaactttacaagctgacctttatcaactccaggcagctgcatcatttgcttgccgattgggctgggctgcgaaagtcatggatgcgaactctgttcttaatgaagaacgtttacctgcgtttcctagtagtattcttagtgatgatgaagaaggttcaaatacaagtatccactcagagaagtctggtcaacaattgaatggcatggattctgatggacccaggaaaatttctggaactgctcatgtgggctttgttgttgatgccaatgttacatcatacttgatgatgggctcactatcgccagggttaaaatctcatgctgtcacactctatgaggctggaaaactgggtgcttcttgcattgcagaactatgtagtgatctggctagcttagagggaaagaaatttgagggtgtgctagaggagtttgcaagtcatgcattcagtttgcgatgcttcttggagtgtttacagtctggcggagtttccgcaaatgaaattactgataatactagtgaagcaaagactccaagaagctctgttcatgatattgacaatgctgctgaccatttgtccaaggtgaacattgagggtgttgctgacaataaccataatgaattttccgagcataaccagtgcgtaggtgagttagataatagtgatgggaatatagtatcaccagctatggttatcttggaaagtgtagaaagcatggtaaaaaatgatgacaagaatgattcaactgtgcagctaaatgtttcaactgaatctcgagttttgaagaacaaaaggaagtacaaagttgatattcttcgatgtgagagcttagcctcacttgccccggctacattagaacggctattccttcgggactatgacattattgtgtcgatggttcctcttccttcttcatcagttcttccaggcccttcaggcccaattcattttggaccaccatcttattcctccatgacaccttggatgaagctagtactgtatacagcaggacattgtggaccagtatctgctgtgttcatgaaagggctacgttttagattgctgcctgaaccattagctggttgtgagaaggcactgctatggtcttgggatggctctgtggtgggtggattagggggaaagtttgaagggaacttactgaagggcaacttattgttacactgcttgaattcgatgctgaaacaatctgctgtactggtgcaaccacttagtatacatgatcttgatacgtcaggaaaccttgtcactgtggatatccctttacccctaaaaaatgatgaccagtcaattgaatctgtggtagcccaaactaatttgccaaaggaacagatattagatttgacttctgtattgaaagacctatctagtaaatttgagctgagcacacttggctacctccgtctactaagacttcacaggatagatgaaccagataaatttgacccagaaaatgtaagctacaagtgggtgcctctgagcttggagttcggggttcctttattcagtccaaagttgtgcgagaagatttgtgaaagggtggttgcatcccatatgcttcagaaagatgatctcattgagcattctgatgtgatgcaaaatgtaagaaggcagctgagagaactttgcagtgaatatcaagcaaccggtccagtagctaagttatttaacaagcgtggaagctcaagggactcaccacgtgccttaatcaatagtattagtggcagatggaatttgtctaatgacccttcaacacctagtggaggagccccaagtgaacacgagaggctgaaatttgttggaaggcagcgaccccgaacagaagttgtgagctttgatgggagcactgtcaggtcatatgcacttgatcctgagcacaatgaagaacaatcatccatacaagacgtaaaaccagatccagaagaaacagacagcaaggatgtagtcttaccaggagtaaatcttatatttgatggagccgaattacacccctttgatattgctgcatgccttcaagcacgtcagcctctgtggcttatatctgaggcatcaactgcttcatcaacattactatgaggggttaattatgctccaatttctacaagttggccgatgaaatttcattagttggggttattcaaaagaattaatcagatgctcctggttaactgggatgcgcgttttgaagcttgtttactgcatcgtatgtttcttggccaatatcttactctacttttcacttgtgtgaaatttccaagtgcgtgctcctacttcaatattgtgaatctttgaggctcgttcagttgagaggctacaggctcgttcagggtgtcaattttacgtttacacatgtagtagtttcaatgtagttttggcataaatagcacagctttcttgtttgcggtgaccccgttcccgtggttagtataaaagtgttttcgttctttcttcaaaaggtgaaattcaagtttacatttatattaccttgaagaagcatgtacatacacttcagtacctgtaatggtagtattgcaatgatgcagatatacatcagaaattcttaaagcacgaa

SEQ ID NO: 33497 - DNA, 203 bp, Zea Mays
caccttttccatgtgataggattgaacaagagtaaccacaattttctccttttaatagctttatcttaagagttcagacccacacgttgctaatgtgtagtgaagcgtccaatcatactgatactgaaatccttttatctgatctgctcagagttgttcgatccagctgtttaagtaagctcaattccacagccaaacagatc

SEQ ID NO: 33498 - DNA, 3038 bp, Zea Mays
cgccagctccgcgcgtccgccgcagtgatgccgcgcgatgaaggccgcacgggagagacgctgggaaagccgctccttccggcgttgcagtgggggcgtccacagctgtgccatgcccccgccccgtccgagacgccgaccacgacccaggattctcgcttcccgtccacgtccgtgattttcccagcgaagctgaccacgcctccctgtacgcacctcccgacatcctcgccgacatgctcgcactcctgtccccgtctgagatcctcgcgtcggcgccttcggtggaagtccggaatcgcccggctctcctccaccgcgccgccagcctcactgagaagagttcatctgcctcctcctcaacgcttgaccccaccgccgctggatccaacaccctgccctcgtccttcttctccgacctactcaccagtgacgacgtgggcaccctggccagacgcacgccatggacagcaggtgggcaggaacaccttctacgtggatcctcttctcccgtgctcctcgacgcacgagagcgagctcggactggatcctctcctaccgctccatgcagggagagttctataattattctggtttgtagtccgtgaatttatagtggattgcttgaggtacaaatttgtatataacttctattaagttgctcctaatttccttctatcgcttgtcattctattagatgatgcaattttttgaggtatagatagcaatttttgtattcaaacaaaacaaagaaacaagttatctttaattgacattctatcattgactatcagtgtttaagctatatatttgtgaagataaattgtttatacactaataactgagtttgatgttgtagatactgggtaacaggaatgcatgtttatgattttcgttttgaccttgcattgcatctacaatgaccagaggatgcaggtaaaaagttatttttattttctctgtattttgtctttttagacatttcttaaaccaatctttcctttgccagtctatggatccagttaatgtgtatggaaatccaatggaaggtgacatgattacaacagggacacctcttgttgtcccaccacttattgacatgattagcaatgacccaatttttgcccattgctgaagatgggatgcaggaggcctctatcaagtaggtcaattacctcattaacagggacacctcttgttgccccaccacttattgatatgattagcaatgacccaattttttgctcattgctgaagcatgggatgcaggaggcctctatcaagtaggtcaatttcctcactagaatgtttggttagagtggaatgtaaaggtctggacactctatgaattcgatgatctcgagagcatcattgataggacactaaagcgcgattttgacaccgaggaagcactctggttgcttaagataggtcttgtgtgcatcccggatagccctaagatcaagccctccatgtcaatggttgccaagatgctgcaaggtgagtgtgctgtgagtgacaggatcatgaggcctggcctgatcacagacgtcatggacctgaaagtcaggatggtagagccgatttagttcagcttgacatcatgctcgagcactgccgcaccggaccttgttggggatttcctcgattaaaatataagctccttgatatggttctgtaacatagttctgcaatgctcctttatttagttctttactttttttgttaagatatgaggtgtagcgatacaatatgtctactaacagcgtttgtgttcttgatagttcatttaggattgaatgaagttactggtatgaccttgtcgagactgaagtaaggagggatagagctaaaaactctcttggcacaactataaagttcaagctatatgggcgtgtttggatggcagcctcccatgcaactgcctggcaggcaaatgatcctagccacaccacaggcataggaaatcgaacggtcggcattgtttcctgggccagctgataaaatccattgaagtgcaagaggccgataaacttaggcgtatagtgctggatgctccatccactggacatacacttaagcttctgtcagtttctgattggattgaaatgttccttactttgagcattaaggacacatgaggtgtagctattgggcctctaacttggttatcatggttttgggccgtgggtagagcaggcaatgcaagtgcagtctggcacaatcctggtggtttggcattgagttatgttttcttttacttgataaaacaatcttgttccatcacttagtcaatagctcaatatgtccaccagttctgatgatccatgtctgcgcagtgtttcttttcacagtttgcgcttgcgaacatccgaaccccgttttcatcttgaattcaacttatgatgtatatcggacagttccaccacattctggcgccgccttcgtctgatcctggaggcaattggagccgctgcaagtcggatcctggtggatgcagcgcaacacagatcgcaaccctccaaggactgagaagtggaatgttgacatctctgagacagtctgaaagcaaaccgaaggcaggggtgttcatcaactcctgcttcgcgcattgctagagtgagctacaggacacatggttcgcaccaaattctccatccatatataacaagaaaattgcagaggtggtaggtgattggtactttgaaagaggagctgacgtggagattgactgcgcctatccctgtgattcacagtcttgtcgcaaccttataccaattgataaggctgaccatcctagattaaacttcaaagaccggtaccctgagccatacagagattctcatccgactgcccccgttgctgtgcatggatgtcaggtgtcattactgtaatgtagtggtgaaataggtagattaaaacaatgaaatttatatgtggctaggatcataaatgaattgcaaaattttttctcagaacagtataacacatatttgtacataagttgttgtgttattatatgtttccgttgcaacgca

SEQ ID NO: 33499 - DNA, 1982 bp, Zea Mays
taacgtattggaccatactcacaccagacccacgactcacaccacaaagcaatcgagtgcttccaaaccgggctgacccgcgtcgggacgttccggtccgtttcactcgctgttccaccacgcgctcgcccctgatccaccaccgcggccgcgatgagcaccgcctctggcgacggcgcggacgcaggcggcgacggggccgccgcatcggcgcccgccgggaggcggatcccgcccgcctcgtccatgccgtgggtccgcaatctccgccgcttcgtcggcacgggcgccggcctcggatcggaggccctcatggaactggagactaaaaggatattgcttgagattttcaaggagcggcagcggaagagtgccgaggctggttccatcccaagtttttacaagaagaaacctgaagaaggatccattagctctagagttcaaaggttggccaagtacaggtttctaaagaaacaatcagagcttctgctgaatgctgatgatcttgatgccatgtgggtttgtctcagagaaaattgtgttattgatgatgctactggtgctgaaaagatgaattatgaagatttctgccatatcgccacagtctgcacggagcagattggtcagaaatgcaaacgatttttcagcccttcaaacttcatgaagtttgagaaggatgattctgggaggattgctatcctaccattttatctttatgtcatgcgaacagtttctcttactcaagcaagaattgatatgagtgagcttgatgaggattctgatggtttccttcagcctcatgaaatggaagcatatattagaggactcatccccaatttggcgcaattgcgcgatatgccccactgcatttgttcagatgtactgccgcatagctgcacgcaagttctttttcttctgtgatccacacagacgggggaaagcatgcataaagaaagtgttgctgagcaattgtcttcaggagctaatggaactacatcaggagagtgaggaagaggtaaccgataccgagcaggcagaaaactggttttccttaacttcagctcagcgcatatgtgacatgtttcttgcactagataaggatacgaacggtacactgagcaaacaagagctcaaggaatatgcagatggcacgttgactgagattttcattgaaagagttttcgatgagcatgttcgccggagcaaagttggaggtggaaacagtcgtgccttgatctcaatggaaggggtttccttacaactgcagatattcatactctatttagagacgtacaccagaaatggattgagggagggaactatgagctttgcatagaagacgtgagggatgaaatctgggacatggtgaaacccgcagatcctctcaggatctcgctatcagaccttctttcttgcaagcaaggtgggactgtcgccagcatgcttatagatgtgcgtggcttctgggcccacgacaacagggagaaccttctccaggaagaggaagagcaagtggaagaggcatgagttctccagctgccaagtaaccgtacctggtgcctcaaaattgcaacatcctcggaactgcctgtaccgcagtatcagtcattgtaacctagatagtgtattaaatctgtcaccaccagtttcctgaagctgaagcttgttcttaagtgtgccatagtggtcttcgaaacttgttgaggctagctagcgccgtttggccatattgacatctatccgtgagggcctgattcctcggcagcctgtatgtacatctagatttgcaccaagcgcgcaatcctcaatcctgactacggcatcacgcctgtaagcatatactccgtatgtaatacattgtgtttagttcgtacatggcttgtgggtcgttacttgaatgcctggtttatgccatttttgctgcatagcagaaccttgctatgtatcagtggggactgtgtgatcttgaacgcccaacttcc

SEQ ID NO: 33500 - DNA, 620 bp, Zea Mays
agaaacatcgccatctgcccatctgcatggaggttatgacagacccagatgttccaggaccaagtgatccatacctaagggagcaccttcattggatcgtgactgatatacctgggacaacagatgcctccttcgggcgacagatcataagctacgagagcccaagacctagcattggtatccacaggttcatttttgtgctcttcaagcagcagggtaggcaaaatgtaactgtgccatccttcagagatcatttcaacacccggcagttcgctgaggaaaatgaccttggcctccctgtagctgccgtctacttcaatgcacagagagaaactgctgctaggagacgctgaaaatcccagctcttattgcctacctgacgataataagggccttctgatcttctttctaggaagtcgatgaacttattctacattaaattctcctgagcactaccttataaataaaccagatgtattttgcggattgtgttagtactagaatgttttgtaagtaggaagaatgagaactatgaatgatccatgcttgtggtacaatttcatgtgtaagacctctatcactgaaagccagaaatcagggttgggggacatccctcaggc

SEQ ID NO: 33501 - DNA, 1522 bp, Zea Mays
ttttcttccctcgtccccgcgtgtgcctttatccctacagcaacgacttggggcgaccaacgccacaactccacaaggtccgcatacccctttcccccgcgccctttatccctgcagcaacgacttggggtgacgagcaccacaagtattcgtgctgctttggtctttgcgtcctggagcattaatttcccttctgatttgggtagaggatgatgcttctcgccaagctcggggcgccgagcgttccagggaagcgtcgagttgaagaagatgctataagttgcagaatagaaacataccatggtgatctatacaactaatttttatctcacatcctatgaatttaaggttgtgtcatggacagaaggaaactgctgttggtccctgcgattagtatggccattgcctcctttcagtacacttttgtcaagggaatagcaaaagctgaatttgctgatatgcctgcacttcgcggtaaagattatggaaagacaaaaatgcggtatccagattacactgaaacggaatcaggcctccagtacaaggacttgcgggttggtgatggcccttctccaaaaaaaggggagactgttgttgttgattgggatggctatacaattgggtactatggtcgtatctttgaagctcgaaacaagaccaaaggaggttcatttgagggtggtgacaaagacttcttcaagttcaaagttggatcaggacaggtcataccagcttttgaggaggctatatcaggcatggccccaggaggtgttaggaggatcattgtaccaccggatcttggatacccagataatgactacaacaagttgggtccaaaaccaacgacattctcgggacaaagagctcttgattttgttctacgtaatcaaggcttaatagataaaactctcctgtttgacatcgagcttctcaagataattccaaatcagtagtgtgagattctaatgattacctttgaagaaaaaagctcatgttattcaggtccgtcgaagatcagcagtaaatgtatgcaattgaatatgaaaatatttttttaggcatacgcacatacaacatgatgtgaacacatctacctacatctccattaactacgcctcttttaaaagatgccattgtgtgcatctgcggtttctacagaagctctattagatacgtctgtgatcatacctcgactgctgagcaaatagagaatgaccaaatggcgaattgttgaaatgaaggcattctagttggaaatgttgtaaataccccaaatattgcctgtctgtcgtaatagttcatttgggacgtctggggggtgcatggtttcttttggtgattggtcgccccagacaaatcagaactctctactttaccagaaggtaccatccaaacaggatttcaatccagttttagtgaatgttcaatatgttttagtaaataatgtaaaaacggctttttattgctccaaatatgtaattcaggtttctaattttaaatcccatttaagaaatattttgcg

SEQ ID NO: 33502 - DNA, 2598 bp, Zea Mays
gtctcaaccacccacgcctcatctagagttgacacgcgccatgtactggacgattggccgctggagacgacgcacgctcggccatggcgctcgctctcctatccccctccacgccatcccatcgtatactgcttcgtcctattccatttccatctctgccagtcgcgcgcgccactagtgccggtagcttcggcctcgcgttcttctgccccctctctcgcggttcctcctcgctgcagaggaccggcgcggcaggcggcgttattgatagtgccggagagggctcatcggaagaaccggtcgctggatggctcagcgcagacctgctcaggcggatatcaggcgcggcggacgcggaccgggtcctggacattgttgccgagtcagttgaaggcgcgggtgccgctctgggcgcgcccgagtgcaacgcgatcgtctccgccgcttttgaccgtggcaacatcgcgctcgctctctcggtcttcgaagccatgcggtccggtttcgcgggagttggaggctggaggtgggcaaggcctgatgtgaggacttatgcgttgcttgtacagcggttggcggccgccccgcgtgttgctgatgcaatcatgataattgattatgtgtctcgcgcaggtgcttcttctatggatgaggttcctttcggaatcattgttcgctgtccaacctgcatgatagcagttgctgttgtgcagcctcaggatggaactcaggttcgatgctgcagaagtatcttgtcatacccctccttaattttgttaatactggtcaagtagtcattagcttacaatatcttgacatacatagacaagtgctcacagttggaattcacaagatggaagactagaggcagggtaagttgtattaaaattggcagaagacacgcactggaaaaatatggtactgtaaatctctagaggctcaaatccagatcgcaatattttagggcatgtgttgttggcctgtacctaacttagtttctttctaaggatatataccattttgtgggagttttactcttcaggttccttttttttttaagttcagtcggtgtgttctaggctccagtcctctttggcttctatgcgtgttttcttcatgatgtgaaaatcaaaataatctagttcctgctactctgtaatgaattaataccatagattacttatagttgcttggtttgaaattcaatttccaatatgttgttttatctgttcaggttgtttcctgttcaaagtgtcgatatcaatatgaattattttctggagacattacgagtattgaatccgaagaagttagcatggatatttcagccctggagaaagccttgagatttattaatatgaggaaagatggtattccagctgctgtccactctattgtgatccgctcaccttcaggaacagcacgtacttacagatttgctacccagaatgtaactcttcctgctcaagaaggagaaagggttaccatttccttggcggccccagttaacgtttaccgtgacatgggacccctcaaggttgctgcgcgctcacaaggatttaaacctggagaacctatgtgtctcactaatcacatcaatgggcaagtctcgaagttgctaagagctccatcaaagaacaagggaacatttttccttagcccatatttattgacttgttacagcaactgccattgcatcagctgccataggaacaacactaaatggagtggtcctgccaaaaattcaaaagcttccagaaaaagcagtggatatagttgctgtacagcaaaagcttttgtctcagtatgatattcttcagagtcgtcttaaggaactgaaacagtttgctcaaaaagaggtgtggatgcttgcgcggatgtgtcagttggataacaagatagtagcagttggtgaaccatcttatcgtactagacgagatagagtaaagagggttcgggaaagcttggaaagcacactcctggcaaggattgagctaatggaaagttatgcaaaactgtgctcaatgatcgaaattgaagttgagatggactctgatgttatagctgctgaagcggcaagcagtgcagagagaatatctgagcagatacaacaattaatggagatcgatagtcttgaagagcaatggcgtatacaagctgaggctaatgatgaagcagaaaggcttcttagttcagattcctcagaaacatatcctgctggacgtgtaatgtaatataactctgttagtgcgcaggcattattctttattttctatttagttgtttatctctcttcaatttaaatgttctccctaccaaagtacaaacaaaacctctagttagacttgtcaaggaaaataatgccagaaaattagaaaaatagtggaacaacatgataatagatagatcatatcattactacacaaaatagagtgtcacattcgttaataatggcaggctaccactagagacaagtgcccgccgagataagtggttgtccgcgttaatggttaacagaggaggtcaagttaattaagaaaattgtcttatttttctgcacataaagaaataagtgaaattgttggaaatactaaggtc

SEQ ID NO: 33503 - DNA, 936 bp, Zea Mays
cgccactcgccaccccactttccaaaccagaccacagccgaaaacccccgatcatgccgccgccggtcgaaccctacatcccttcgttcaccgccggcttgtccgcgcacgaggccgccgatgccgacaaagactacctctacttcctccgccacgtccgcctcgacggagacgcctacacggtcgtgattccgtccaaggacggcgcctcctgtcctccccagatcatcaggtgaaggatgaagtggtgagcaaaaatgaagaggatgatgtggggcctggatcagatttgcatattactaacgatcaggtgtattgtgagacggagaaggtgaaagaaggaggagggaatacgttgaatgatctagccaggagaacaacagatttggatcctttggacaagaaggaagcaagctcaagcaagggacatctggccatgcctctcaatccttcggaattacaaggcgttatatggcccccacatatcaatgagaggccaaattcagtttttaaagagaagttgattgagtttctcatcaaaccatttacacaggaagaatatgataggtattttgctctggctagtgatcgcattccaatggtcaaagaacgaaggacccgtaatacggtggcatactatcactggacgcatgagatgagcaagtcatactttgataggtacccagatcttgctcagcaattcagtctccaacgcaataactatacaaatggcttggctcttttgcgtgggcttttcttctggttgcagaacattgagctagaagaccaattcagaccatggagcgatgaatttaaaaagtaccgagttgtcatggaatgtttgtagagggtttacccatactagccattactccatccagttcagaaagtcgtttggtaagttagcgcggtcgtctctgtgcaactctctgacct

SEQ ID NO: 33504 - DNA, 2094 bp, Zea Mays
caccaaagaggtcaccacctcaccacagtgaatgcctctccggcgcccgccccgccctcgtggcctcatcacaaagcgagggaaaaaaaaagaaaagaaaagaaaaatcacgagtggaatcgttgatccgcacgagacaatccttgctcgcttagaagattcctacccttacgtttggttggatgcttggatctccatttcctccctctgaacattcacccgtaccgaagactctgattccagactcgatccacgcggcgcgccacctgttcgaggtaattccctcccagatacaacctgccatcgccgcctcctagtgctccggcccggcgccggccatgtcgctggcctgcggcctgccgctgctcgagtgcgtctactgcctcgcttgcgcgcgctgggcatggaagcgctgcctccacagcggcgaggtcgacagcgccacctggggcctcgcctccgccgacgacttcgagcccgtgccgcgcatgtgccgcctcgtcatggccaactacgaacccgatctctccccctccgccccgctcctcttcgcgccgcccggcggctacggcatcgaccccgcctgcgtcctccgccgccggacctacgccgacacacgcggccgcgtcacgccctacctcctctacctcgatcacgcccacgccgacatcgtcctcgcgctccgcgggctcaacctcgtcaaggagtccgactacgcgctccttctcgacaaccgtctcggcaagcgccgcttcgacggcggctacgtccacaacggcctcctcagggccgccggctgggtgctcgatgctgagtgcgacctcctcagggaactcctcgagacgtaccccgactacacgctcaccttcacgggtcattctctgggcgccggcatcgccgccatgctcaccatggtcgtcgtcctcaacctcgacaagattggcaacatcgacaggacccgcacacgctgctacgccatggcgccggccaggtgcatgtcgctcaacctcgccgtcagatatgctgacgttatcaattcggtcgtccttcaggttacggtcactcactcaggtttcttaattatgtccactgactactccctactggtttcaaccattctccacctttatttcccaatggcaggacgacttcttgccccggacggctactcctcttgaagacattttcaacttgccttgcctcctaggtttgagatgtttgagggatacatgtatacctgaagacgctatgcttaaggatccaaggaggctttatgcaccaggccggatttatcacatagtcgaaagaagaacgtgcaggtgcggaagatatccaccggtagtcaaaacagctgtgccggtggatggtagatttgagcacatagttctttcctgcaatgccacagcggaccatgccattatttggattgagagggaggcccagaaggctttggatctgatgctggaggaggagaacacgctggcagtgccgtcggagcagcggatggagcggaacgaaaccctgcagagggagcatgtggaggagcacagggccgctctgcgccgggccgtcacgctgtcggtgccagacgggcggcgaccgtcgccgtacggtacgtttgacgacgtggagcagcatcgccagcagccggagaggagcgagagcttcccgccggcggggcccaggcagcgcatgagctggaacgacctgatcgagcgagtgttcgacaaggacgaggacggccagatcgtgctgcgcagctcggttcttctctgacgggcggctgggccgttgtaaattcctttggtcttgtagctgtgctgcctctccctgtagtacccccatttttcctgtgttattattggttgttcaatgtaattccttcattcattgaagaggattctttttctcatgcgcggttcatttagcgacatcagctccgtgcagacaagttttgtgaataaattatcaaggtagagtagatcaatttttgaaatcattttcctgttgattttgatatgtaaagttaggatccaaaatcaaaacctgcattgctgaacatcattcagagcaaacctaccaaatcgtaacacg

SEQ ID NO: 33505 - DNA, 1209 bp, Zea Mays
tttatgtcgcatagtctcctgcgtggatcacgttgtctcctctttctcttgcgctgtcccactatcgatgagcttggctgcttctccaaggggatacagtcctcttcgctggcgatttcttctctcacactacaaggaggggaactctacgagctcgcgctcgttgcctgccatcccacttcctctctccacctcgtctttggaagtctccaaagcgattgtgcagtctggcaggacaacctggaggattcttcgccgaacgagttttccgagcgcggagtctccgccactgcgccacaccaccgcgtcgcagcaatgccgccgccgcgacgaaagcggaaggcggcctcgtacgagccacggcggcgctcgccatcccgcctggagtttcgtgccacagtggacggcgcgtggtacgaggcacgcgtggctgtgcagtgcggcgcgctgcgggtcatgtacgaggagttcctcgaggagcaggacgagtggtacgaccccgccgggctcgcgacttcctccgcgtgggacgtagtcaagctccgcgccaggtttcgtgtgccgtccacacccctggaagacacccagtgccgcgatctccaagccggcgcacgactctgcgtctcctgctcgctcgacggcggtgacctcaagttctacgacgccatcctcgattccgtgtatccagcggctcacgagatcgttgacggcatggagcggtgcgcctgccgtttcgcggtgcagtggtcggatggaccgcgcgctgggagcatggaggaggtcggcattgagcgggtttgctgcgtgcagtcctcgccggtgcaagacccagtgcttatggagttcctggacggcgtgaccaagctggccggggatgccaacgtggaaacagtgtctcaggagatccacgtcgcgccggtagtcaaaggcggcgtccctgcaaacgccctgcaaacgcgtcaccgtgatttcaacggaaaatttggtccagcaagtaggcaagcggtttgatgtgcgtggttctgaggttggctatttggtgcctctgattttgtgttgctttaacaatctgatcatgcacataaatcttctcttccaaattctctatccacttggtttgagttcggccgttaaaatactaactaatgtttcgttcatggatcatggttaccctgtcaccctgaaaggcctggttatctgacgaacaca

SEQ ID NO: 33506 - DNA, 1776 bp, Zea Mays
gatagtctgattgcctggcaaataatatgaatatcacatcttggctttagagagggttgatgaatgttgattggaaaatggatgacaaaattgatacttgtgcactacagaaagcgaactagttgataaattcatatttcccattggacaagcaagagaaaacagttacagattagtcattttttgagtgtggtatttacctgacttcgaacatggttcaatcaaggatgattattgtgggggaagctcaggatacaactcggaattactgaagatcatggaaactaaccaatctcccccttgcaagcgaccgcggagagatcgaaaccgtgaaaaggcaccctcctcaaacaaaattgaagtcatggaacaagagatatggagagatttccctgaagatcttttcgaaactgtcatagcaaggcttcctgttgctgcaatttttcgattccgcactgtctgccgaaggtggtcttcccttttgggctcagacagtttctctcgtcagtactctgaagctccacatggactgccatggttctatacaatcactcatgagaattcaaacaacaatgttgcgatgtatgatcctttgctgaagaaatggcaccaccaatctgttcctctcaatcatacgaagatagttattccagtggcatccgtgggtggccttgtatgtttattggatctgagccacaggaatttttacatctgcaaccctcttacgcaatcactgaaggagatcccaccaagatcagtccatggttggtcaagagtcgttgtagggatggtgttgaatggaagaagttctagtgatggctacaaagtaatgtggttagatattgatgggacttgcgaagtttatgactctacaaagaacgtgtggtcttgccctggaacttttcctccaagcatcaaacttccacttgctctaaatttgaggtcacaaccagtggcggttggcagcatgatatacttcatgtgcgcagaaccagatggtgttttgtcatatgatgtaagcaccgggatttggaggcaatttgccatcccactgccactgcatctgactgatcacacacttgccgagttccagggaagggttatgctggtgggtctgctgtgcaaaaatgcagcgacctgcatctgcatatgggagttgcagaagatgactctcctctggaaggaggtggacagaatgccaaatctctggtgcttagagttctacggtaagcacatgaagatgaaatgcctgggcaacagtggtttgctcatgctctccttgaaggcgaagcatatgaaccgccttgttacatacaaccttttgaaaagggagtggcagaaggttcctgattgcatgctaccatggagtcgaaaaaggcaatggataacatgtggcacagcatttgatccggtcccctgcgccttggtctgacatggaattttaccttctttgtctgagcactataatattttagtcctttcatatcattggcctatctttagatctttctatgttgttgtgacaagttctgcgaaaacgcattactgtggtttgctttgtataacgccgccgaaacaatcgaacggtttcctttatcacctgctgttctgttaagcttgtaatctttctgaacgtgcagttacctgcccagagctgagttcattatacaataaataccgggatgttaatgtttggactctggtgcatggagatgcagtggtgcttgttattaccatgaaaataatgtttttaattattgtgcatggagatgtacg

SEQ ID NO: 33507 - DNA, 846 bp, Zea Mays
attttgttttcctcttgctgtgacgcatatatgatactaaattccactatctgcagtttgccagttagaaagaacctcctgcagtagtctgtagtcggtaaagagaaaacaccactttgtctatctactgtgcatagctttatgaagagaatctatcagcaactgaggataagtttatgagtcctatgagacatgtatggagacgacgagccttcacgccaaccagaaaggagcaatgaggctgccggcgcttacgcacaggcatgcatagatgttgccacagaattgaaccatccagttatagacatctggaccaagatgcaggaatttccagactggcaaacatctgcattgagcgacgggctccacttcaccccagtaggaaacaagatcctgttcgaggaggtggtgaagacgctggagacgagcatcggtttcagccaggagcggctcccgtcggacctcccgctgttccacgagatcgaccccaaggaccccatgaaagccttcggagcttagcttgggccttatcggaggagacgcacggtcgttggatcagccacgtctgctgcatttgagttcgtcgtcagtatgcccgaggcctgctgaggccattacaggaacagtgagctttaataagcggtgttttcagtaccgtttggttgtcagcgcatcacgtgttgttggaacactgtggttggataaaaaaatcataccctctccgtccgaaattaaaattcattttaccttttttataattcgtacaataattaattaatacatgtgttatatatatatatagattcattattatttatttgaatataaacataaacataaagaact

SEQ ID NO: 33508 - DNA, 1462 bp, Zea Mays
cccaggccccagcccgcgtccatccaccgcccgtgggaaggcagagcagtgagcgtcgcaggcatcggctccagctccggctccgcccgccgccgcaccggcccaccctcctcccccgatccgatcgccgatcaccggccctcgcttagcctcgccacgcctcgcgacaatatttggaacccctgttaccgatcgcctcatgccgtaccactgaacgatcccaccccaacaccgtacccccgccgcctcctccgccgtgcccacagtcgcctccgcctttcgcctgctaccccgtagaggctctatatcccgatcggactagggtgcggacgatggctagcaacgccgaccagcatgctgccgttgtctcggctgccccgtccgatagcccggttggggcgaagaaggctggggcggcggccgccgtctggaaactccccgcggccgcggcggttcccgtcgcggaggtggttgaaaaccccatcatggacgcacactcctggccggcgctgcccgggctgtcgtctccgccgccgccgccgccgccgcatgcggggccaacagccaaagcgtcaccgaaggccgcttctccagctcccactggggcggcgacgtcgcccgtctctttgggcaatcctggcgcgccggatgctagccatggtaacgatgctcgggtgcgcaatcctgtggcccggcgtgccctggtgatgcctgcggcggatgggctggagaagagtgcccctgcaccggaaccgtcccctgtttatgtgcctaatgcccggagcaatggtgcagatcctcatcagaatggacgtcctggctcgcatcaccatggccgaggtggtggctatggtgggggaaacaggaggggtaatggtggaggtggggggcgtcgcgggagtgagcaccacggtggttttgatgggcaacggcgcggaggtggccgcagagatggccatggaccggttcatcagctgcgtggccatcagccaacatacattaaggctcctgttgtagcaggagcacctccaccgcctccaccatttgttagccccgctactcctcagacaccaccttatggaccacctatgggcttccatgacatgtcagcgcatgtttactatttcccggcacccacctcggaaggcattcaaggcctgccttttgtgcctcttccagcaagcccccaagctgttctaattgacccttctcgaaagaaccttctggagcagatagaatactatttcagcgatgacaatttgtgcaaggacctttacttgcggcaacacatggatgggcaaggttgggtgccattatccctgatcgctggctttcgccaaggtcagtagcttcaaggcgcattttttttcaaggttcattgcaagctgagttcatcccaactaacagcagtggtacctccatttttagtgtattcagctacacatttgtacaggctgtttga

SEQ ID NO: 33509 - DNA, 1804 bp, Zea Mays
cgtgcccccgcccccgccagtccgtcaccatcgcgcggcgccaccaactacgcccgagcccccgcctccacaccccgtccccacgcgcggcgcagcggagctatcagcgcccttccccaggccggcttcaacgctgatggagccatcctcgcctcgaatcctcgctgcagttttcgttccaaagttctcgccccgaatcctcgcccttccccaccgcaccttcggtgtctccaccacaatcaccgcggtggcttcaccgtgtccccgcaatcaccgtggcggccagatccactacctcgccttcctgccgggcgacgtcctcttcatcgcgcaccacctcgccacgctcttcgtcttcctgacctgctgccacctcgtccgccacagcgcctacgctctcctcgtcctcgccgaggtcaccagcctgctgcagaacgctggacgctcgccgggatctagcgggaccagtcccccgccgcggcccgcgtctacagcgccctctcgccgtccttctacgcgctctacacgctcgtcaggggcgtcgccggcccgctcttcctcctcaagatggccgccttctacctgtccagccaggccgtcgacgccatcccgtggtgggtgcggatctcctggatcctggttgtcggcaccgccattgcggtcagcaacctgtggatttggaacctctggaaggagctcatcagggaatggaagcagcaggcccctcccaagtcaaagaaagacacataggccgccacctccaagccgagtgccgagaagtagaaggacaagatctacatcctcatgccggtcatggccagttgcccaccccggcgcctacgctcgagaagccacccatcttggccgcttcggtgcgaggaggcgctaccgtcctcttcctccgatccacctctcctgccaacccgccaggttgccgctgccgagagcgagcggaggcctccctccgccgacgggggaggaagatgctcaccaagttcgaaaccaagagcaaccgggtcaagggcctcaccttccactcgctcagcccatggatcctgtctagcctccacagcggcgtatccagatgtgggactaccgcgtgggcaccctcctcatccgcttcgaggagcacaacgggcccgtcaggggcatccagttctaggtcacgtagctgctcttcgtgtccagaggttggggacctcagggattctcccacgcgattccgacggcctccttcctctcgcgcggctgcaggcctcctccccccacctccacctgaatccacaacacgtgagaaaaagcgacgatgacgaagaacaacgtggttgacatcgggcggcctctcgattggtggtcgtgctcggatccgcacctcgatggggccaccctatccctcaccgccccatcgcgtcggattgagttcccttggacgggcgacagtgttatggcctgtaaataaactacattgtcatgttagttagagggaagtgggtctacatactgcttagctagattaattgtgatagtaaggtgtattttgctgctttgtcaacaatttcaatttagacacttgttttttgggatgagctgctaaaaacgagctgaaggctgctactgcagaaagtgttgtggtcatgcttgtacaaagaatatttgtaaacaatgcttccgataccgtttccttagatggagcgcataaacctgctcctgtatggctgagtacattggttgttgtctaaactgtaattcttactgaagtactgtataatcttcttttgaatgtattaagtgtactgggagccag

SEQ ID NO: 33510 - DNA, 1098 bp, Zea Mays
ccaattccccattccttctcctccctttgctcgcctggaggtggtctgcccccaccacctgtgcgcttcccgcttccctgtcccacctcacgctcccaggaggagacactccggaagatggtggggcggcggcttcgcgctccacagatgttgtcgggtccaagaagcagagtctccgcgctccatggaggtcgccttccgcgtggacaacagcgcgacgagatgctacaactacactcatgacagcttcaatagcatatctgcattttttcctcatcctcagaatcgtctctctcggattttgacagcctgttgtcaacgaaggcgagcatggtgtactctaagctcagcaatttccagaaaaaaatcgttaacttgcaagttagtttcaatatttctagcatattccaatcacagcatcgtccagtccacacccatccaatttaggggcttcttgttgtgctctcaggccccagtcgaaaagcaaggtcctgtcatcacaaactcctagcaaatttaggatatgtcatgagaacaagacatgacaacattacaacctcagaggttagaggaatgtgtttggggtgagtaatttttttgtgttgtttcctctgtccatggccatggaggagcaaaggaggccacctagctcgaagatagcgccagtgtccatgaaggcgtcctccgcaaatgcgacgcttcaaggcatgaagaacagaagccattttcgaagggacatgaaaactgcactgcaacaagacgtggacaagctgaggaagaagttgtggcacgagaagaacgtccactgagctctaaagcaggcgttcgcgaggccgctctgcctcgcctccctattgtctcaagtcaatgtccttctttgcttttcgatcaatttcacaagcaagaagcaacctaaccaataatttgttgcccttccgaaggactcgatacactttctgatttctgcctcttctgaattgttcctagacattggagcttctggccccgttgcaagtggaaaatccttgtacttaaaggttgcaatgtagtggtcccgttgcaacgcacgggcactcacctagtaaataaaataagcat

SEQ ID NO: 33511 - DNA, 1567 bp, Zea Mays
agaatggcggcgcactcgtgctgacctcgttcggcttcggtcctaccgccgccgcgtcgtgggaggataatcgaactgcttcccttctcgtcttccctaacctttccgtccttcccggattatttccatcaccagagcgtatcgcgtcgtctcctctctatccgattccgcccgcggacccaggctcccgcatggacgctgccggcggggtggaggccgccgccaacggcgggatcgagggctccgccgacccctgcagctcaggcggtgccggcgggtacaggcgctccgtccaccagatcgccggcggcgggaaagctgctgatatcatcttatggaggcgagcgcgtgttacatttggtgttatatttggtgctactctggcatggtggttgtttgagaagtctggactatcattattaactatctgctctgatatacttctcatcttgatagttctgcagttcataagggttaaaatagctggactgctagataggcagcctaggccactacctgagttagttttatcagaggagatggttagcaatgctgcggcttcattccgtgtgaaagtgaacagcatgctgatgatagcgcatgacattactcttggcaaggacttcaggctatttttccaggtcgtgattgtcttgtggctgttatctgtcattggaaatttctgctcgtctatcactcttgcttacataggaaccgttgctttggtcacaatgcctgcattgtacaacaagtaccagaggcctgttgataggtatgctgggatggtctaccggaacatttcgaggcattacaagatagttgatgagaatgtgatcagtagactaccgagaaggtttatcagagataaagaggactgatactctgaaaaatgaactcgctaagctagtcaggtaatcttttacctacattgtcagaccttacatggtgtgaaactatagagctacgaaaacagagaacggcatggaacctacagtagataccgttgcagtgtactcttgggcaaaggtttgagacgaaattaaaatgtatagctttctgtgttagctctttgcaacgaactggctaaatgttgttaaaaataacaaaagcaattgtcatgggaagttgaaaatgaagtggttgtaacttgtgaaagcgagtgctgtagcaggtaccagcaatggcaacagactgaatctactgcagggtactttggttgcggcttgcagtcagatgcatggctacgtctcactccgaagtcagctccgaacatgttacccccctggtgcaagtgctcgctgctcagtatcgctaaaccttactccttcagcattatgccacaagtgcaatacatggttcaaaataaaggcgctgtttggactttggacccattagctaacagtaattagctaatagctagttattagctatctgatttggtccagtttgaatctagctagctgttagccaatagtaattagatatccaatttggtccagtttgagtctagctagctgttagccaatagtaattagctatctaatttcgtccagatagttactgtcta

SEQ ID NO: 33512 - DNA, 3253 bp, Zea Mays
ccgcaggccctcgggctctctttacccatctccagtcctccaaccccaatcctctcctttccatccacgccgctgcgcttccgatgcaaccctaaccacctcatcgccggcacgatcttccccgcccccactccccggctattgcctctgattggcggctctccgggattcacgttggtccggggtacggctcctgcgattttcacgcaatggagcaagatcagagcgtggttgtcggcagcgcggactctggtgctgcggcttttggttttgcgactggcaacccccctagcttggctgtgaccggcggaagcgccgtggcccccgacggtggagctcaggcagctgatgcctctgcgtaccaggccgagcacacggcgttgaatgggactgtcggcgatatgggtaattacccatctacaggagctgcagagaacggcgaagccgtccccaacgagacgggcgagccggttcctgagctatcgtacgaagaagccgtgctttcagcagaagaggctaggttatggagtgttgttaccgcgaattccttagattttaatgcctggaccgcacttattgaggaaacagagaaaaatgctgagaacaatattttgaagatacggaaagtgtatgattcgtttcttgcggaattccctctttgctttgggtattggaagaaatatgctgaccatgaagcgagacttgatggtgtgagtaaagttatagaggtgtatgaacgagcagttctcgcagttacttattcagtggacatttggtataactattgtcagtttgcaatttcaacatatgatgattcagatatcatacgaagactgtttgaacgtggcttggcatatgttggaacagattatcattccaatattttgtgggatgagtatattaagtatgaagagtcactggaggcttggagtcatctagctgatatatatacaagagtattggagcatcccatccagcagcttgatcggtattttaattggaattggcttcgaagcacagtttatcagaaatacttactgcagaagaagcctcgttgtatgttgtcacatctgagaccactgctcaagcgcctgatggtgaggcacatcctgatgatgttgataagcttggtcaaccagaaatttcgtcttcaacagacgcagaaagccttgcaaagtatgtctccatgagggaagagatgtacaggaaggctaaagagtatgaatctaagatcattggttttgagctagctattagaaggccatattttcatgtcaagcctcttgacaatccagagcttgaaaattggcataactaccttgactacatcgagaaggaagaagacattaataagtatttggacgaagcttcctttgtaatgggatattgaactgaggatagagcgtggacataatgtttggtttcgatgaggctaagtatttgcttaatgctcaccttcttaaccatctatctatcgagcaggatggtccctcctttcttatggaggggcctccgtaatcagctaatggagtaatctgtgtgaacttctctttttttgtcaataccatatccttactatcattatttaccctctttattttgtctcgtacacaagatttctgatgttatgttaaactgttttcaggttataaaattgtatgaaaggtgtgtgattgcatgtgctagttattcagaattctggatccgctatgtgcaatgtatggaggataaaaggagtctagacctagcaaacaatgccctggctcgtgctactcatgtgtttgtcaagaagcagccggagatccatctgtttagtgcgcgctttaaggagcttaatggcgatatttttggagcacgtgcagaatatcagcatctgtattcagatttatgccctggctttctagaggccattgtgaagcattctaatatggaacaccgactgggagataaagaattgtcctgttcagtttatgaaaaggtcatcgctgctgagaagggaaaggaacagagccagctcttaccaacattgcttattcagtactcccgtttcttatttttggccatcagagacttggagaaggcaagggagatattaactgtgctgcatgagcagttaaatttaacaaaaccagtgcttgagagtcgatttttccatgcgaaaagcgtattgaatttttagactcacttgtggagaagtttgttacacctgaatcatctcagggagagttggcaagtctagttgacaaagaagaaatatcttccatatttttagagtttttggatctctttggtgatgcaaagtcaatcaggaaggcttcaactcggcatacaactcttttttcatgtaagagaagcattctgccatcaaagaaacggaaggctgatgatgctgttgtgtcagacagggacaagtttgctaaaactgggtctgttcagtcagccacaggaactgatccaaatgcttccaatcctcctgtttggcctgcgacttctgaaacatctggacatcaatggggagcttcttatgctcagcaggctgcatatcctgcatatggaacttatgactacagccatcaaatgccacagcctgctcctcaaacagctgcctatggcgcttatcctccaacatactctgttcaggcctatacacaacaaagctacacacaacctgcagcaattccggcagcaccagtgccagcagtggtaccagcacctacaccggcgtcagcttaccctcagcaacctgcggcagctcctcaaccttattatggaacaacctactactgacaagtagagtaatcttcgatggcgatctgacgagcctgttaatcagcaggtttgtcgatacgaggtcaaaggcatcacaaaaccctctgtactgccattgtttagccccccttcagacagatgccgtcgacgagatgatcacttgagaacaaatttgagattggtatagtctgcatttttgtcgttagcatgtgtcgctagggattgctattgtttttcttgtaatagcataatctttactgtagaagaggcagcgggtgctaaccaatcctatgaacatataattaacattattcactgtttcatgccacctttcggagtgctttttttttcaaccactgatgatagcgggattcctgtcaagcacgctcactggtgaagtcctcggaacaaaattgtcaagatctgcgactacacagttcactgatttctactgtcactgtaggtcaaactatcttgatttgac

SEQ ID NO: 33513 - DNA, 5012 bp, Zea Mays
ctagtctgtcatatgtggacgctatgatgcatggacagtgggcttcttagggcctttatgggccaggaattcgtcgaagcctgaaggaaggaaaaaaaaaacctaaagatggtcgctgccaccaggtagtttccaggcttccacgtttcactccaccgcttgtttccagttaccaccactccacttctaggttccagccgtgccggcgccgccgcttgcgctactctgcgcgccctcgccgctgcttgcttgctcgcaacttagaaggtgacgccgcctgcccagtgcgagcacgcctccacttgcactgcgggctgcggccctgccgaatctggaaggtgtcgagaagaaatagatccttgcactccatgccgctatgatcagcgctggccgcagcaggcggcgggggcgggcaccggcgtccctgcccacgaccacgaccgctgcttcccgccggaccgagcactccatctcctgctgttattgtgactgcaagatatattccttaaacgacgccctcttcaatttggggtggaagtatgctagatatatgagagcatggttttctgtaggtgtttatctatctctcattgctttagtcagtatatccttgatgctattgtgggagtcaattggtgtgttttattttaggagtggattccttagtgcctggttacagaacctactgacttcaggtctcaacatatctattgtagacaccacaatcattataatgtcaacaatcctgtctattgtttttcatgagtttggacatgccattgcagctgcaagtgagggactacagattgaatatgttgctatatttgtcgctgtactttttcctggggcatttgttgctctgaactatgacctactacaaaatatgcctctcttttccatgcttcggatttattgtgcagggatttggaataatgttatgtcacaactgtagggaactgaatgagactggacctgaagacattgaactactgtgtaagcagtctcttagtcataatgtacgtgaactgattagttgaggccacatggagtaccctaaagccaccttctcacgaacaaagtggatgtcaattgtcaatgtctatatgcttcgtacgacgatggtgaaccgaattggcagtcatatagactgtggtgacattgtcacaatagacaatggtcgccaaaccgagtgatagtctgaaattgaccatcgactatgttaaagctatcgtgagggaggctacacttgagcccttgcccccatcggttgcggcaagtccagagcagcaaccttcttcagcgatggaggcggaaaagaacgccgctgaggaactatcttttctaaagcacgcaactttgggaaaatattgtctgattgtggcgaagaagaaagatgaaggctctttggcgcgacctgttgactaggtgtaaattttgtacactaggccatgctgaagattcgttaggttgagttttgcttgaaggccttggaaaatattatgtctgattgtctgccacgcttcaattgtcgaccaatacatcatgcacggtgaagcttatattacagttgattaccatgatattgctgtgtgggtaatatcttagccgaaggtcatcttgagtgaatgttacaggcatatgaaccacttagatctgatataggacccctgaacacctatatgttggaccctcctttgaagttcttgtttttatctcttattgagtggcccgaagcttgatcttctcattattgggaatatgtgctttgctggtggaactaagttgttgacgtctgagctttgggctcttcccttctactgagctggctatgttctcgtatgtggcgtttttgtggaggttgattatataacattggatcatattgtgatgggtctggtagttgggggttgtaagcttcccactgttgtgactgatgttgcacaattgggcttgaggacgaagaatgtgagttctgcccttgatgctggatgtatgacacatcatagttagtcgagcattaagatgatgtatggcacacattcttcggctggccttcctgcttcacggttgccaattccttatgcttttggatggtgatgctacaatattttgttgtatgctctttattctccccgcaaaatacacaatactagtcaatggcgcgcgccagcgcttgcataggatttccctttttttactgggaaggtagagcggcacaacaacagtcgtcgcccacgcgtgcggctagatgtaccaacggccaagatttttcgcgcgacatggatagtgcgaatgtcgaggaagttgcatcggtttaataagaagaaatagctttcttgattgaccgttgttggagtacctgcctccaaaggtgtggccccccttctgtccctttgtgttgagccaccccagaaactactttgctggctttgctaaggtccgttcgaaggttggcttgttgttggagtttgcggaaactacttttctccatcaaactagggtgtagtctgaattgttcgggcttcccttgcatccttgttgaaaaccctcatgatctctctgtgtttctgttgttcttgtcaacgctgtcgaaagtcattgtgtgctctaatatattcatccatcttctgaaacagcttcttcaaggtttgcggaggctttcaggtgaagtattatgagcatgggtcaactttgagctccttgattgttgacttaatgacaattttaactagtactccttgtgcatgtactttgacttagacaaaccttcacatataactttgaagggattcatctacttcttgaaaacatggaacaatgcatgtgccatgactaggtttgtttgaaagccttggaaacttgcaatcgattgtttcttaagttgttcccatgtggttatcgatctggacaaagggatgagtactaggtttgagctatgccttttgttgacggagggatgagtaccaggtttgagctatgccttttgcggccataatatgatttggctaacattgttgtgtttctgccgaattatgcaatggttgcttcgtaactcatgaggaattgctttgatttcgactgcccatcattcagaggaagcatggacagtttatatgcagcttgccatggggctacctgcaaatcccttgagaacgaagatgcactatcatagatgaaattacatttttacctttccctatttcatagtcaccctttgcaattaagggagtacaataatgtcattttactgcgtagacgtgtcgcacacatcttctcttcgtagaagcttcttatgtctcctctccttcgaagtcctctttatcgacgacaaagctttgctttcaatgccttcggcttcatgcacctttggctcattcagatctaccgaagctttttcaaggagagcggtgatcttcctttggccttcattagctttctggacctgaaaaaccatctaaatattgatttcatcattttggaccttcgactagagacctccccaacaacaaccaaatagaaacaattgctggtttacaaatgccattaaaccctggttagagaagtgcaaatataattctaatgcagtcttagacatacttcacgcgagtgtgaaatgtaacgttatatacttgtatactgaccttgttacttaatcattgtgatgttttataatttttttgttatgatttcatgtttaatagctctgtacagcatgtgtgatgataacattgttacttcctgtgatgttatatcctctctatgtgagtggtgatggcctcatgaacaggtcatggaagtccctgaaatatctcctatgtcagaatacttgtccactcatgatgttattctttctgtggatggtctgaaaataaccagaactgatgattggatcaagattctgaaccaaggtactacagcgaaatctagggatcctgaattccttgaaggctctcatagatatgttgccactagttctaccaagggttattgcgtgcccgattcatggatagatgcaagcaaaaatctctggcagataagagacaagctgccttgcccagatgaactgatagccttcgaaaaagttatctgtaacgtctcaaccattttgacagagaagactagcataggtagtgaccagaaggaagttgagggaaaatattgtttgattgcgaaagatgtagtaaagcttagaagatgtggaaacggatggcacatgactgaagatgatgaaagtagctgtgcatgttttgaggatgagcactgtttggtacctgttctgaacccaggcttttcatggattgaggtctcctatgccaggccatactctttgagatgtttacaaaaaggaggaaatttgttatcatcacatactgcaaatagtaactttggacagagtccttgtgaaggatcttttgtttatgtgggtgatctgtcatcagcagcacgttcggttaggttatcccgctaccgacctcgatgggcacttctacttttcattgcagacatcccatatatcttggaaaatggtttaagtagcttgcttcatgcatctgcagcattggctgtaatcaattgcctaccggtgtattttctggatggtgaagcgattctggagactaccttaagctatgtagcttggtttaccccaagactgcaacgcagaattctaaaagtatgcagcgtggtgtggacgggtttattagtcattactttctcaagtatttgttattccacagtgctacattatggcgtatagcaaataacccatgtaattttgtcttgaacaaagagaagatcattttaatggaacatgccaactgtactctgtccattgtaaattataagttgttttgacttttatatatacataacttttgttaggctatcttcagtagactatccacgtactcatattcaagcttcactccttgaatagtgtagtctgtagtgtaaaatagtgttttaggtgactatatggataaactgttggatatgacgtatctacactaggt

SEQ ID NO: 33514 - DNA, 9667 bp, Zea Mays
cacaaacccctcgggcctcgtcccctccgcctctcgccgcgcggcttccctgatgcgctcgccccccgccgcggcctcccagccgaaaccctagctccgattcccataccgatggcggccgtggccactgcgcgcgacgtggaggaggtcgtccagaagcttcagtctgatcgggccagagtccgcgacgagggggtgaagctgctggggacatggctgcagggtgaccgcgctgcgtccttctgccgcctcctcggccgcaacaccgtcaggttcaagcccggccacgggaaccttaccggagggcattcactacatttgctctcagttgctaagcaactttttgttcatatttgggaggtcataaaagatggccctagccttcagttagagtacagcataatccttagacagcttctaaatgtgaaggagtaccgctatcagatgaaacctcgaacatatagcaattttgtatcactctacatgaagaaggttgctagtgcttttgatgcaaaattcagcaatcaggcgagctccaaggatgaatccttccgctgtacattgacacttcatgttctacttgaaaacccaccaagtgattaccctgatattatgcgggaggaggttcttaatggatttagtgcaatcttcttacatattagggaggagggaaagctgactcgcaaacttatggaatgcattaacacctttttactgaaggatgggccaaatctgggatacaaatctgtgaagatccataatgcagttcaagagtttatattccgttgttggatgacaactcatgatcaggccttgaagagtttgttcataacctacgtgaaagttcagctgaagattgccaggaatattccagagattttggaaaaacttattgatgtcatcattaaggaactagacaaaaatgttaacactggacctggacttctatggtgtgaggcaccaagagatgagaaagctgtgtccttaaggtgtttccaagaggaatggatggatctctctgctactgttttttatctggcctgcaaatgcacaacaaagacagcaaacagggagaaaaggatgaagaaagaacacattatgaaccttatcgttgatggcctttttagaggatctttgttttggagtggttctgtttgttttctgattcacaagtatggatatcatctagagaaatctttgctaattagttggtttgaagcaagttgcaaagctttgagaagtatcttgatccatgcaaatgccatacgttttcaggattcactactctggcttctcaggacattcaaggagttctccacagtgctcatgcttgacactagggataaagtgcaattttgtttaacaaaaggcgagatgtcaattgttgaagattgttggcaagccatatggaattcccttgttcacgcatttccgttgttaagcagcatagatctagttgctgattcagctctgattttgctgggtggaatgatcatgcgggaccaagttcatacatcatttctatcagaagatacatggaacctgcaaatatttaaaaaatttccatcgccgtctgctctgtattttgttgcctgttacttctcgaggataggctttcagggtgacttatccaattctatctttgttcggaagactctgctaaggtcaactttggagttaattcattcaaaggaattctctcttttgaatgaacaaaatgttgttatcattcctgaagctattttctcgctgtgtgctggcttttcatcaccagtaattaattcatcggatatattgcaactgtttggtcattgtaaaattcattccaagatgtctcttgaggatgataactgggttcttaaagatgaactaccctactctgtggaagctttgtcagaaatcactctggatacttgtaccaaggttatgtctcataaatgccaccttatacatcttccggggactatccagcaaccaatgctcctagagctcatggaattcatgaaaggatttgtggcttcaaatgagcagtttgagaaagtggacttgaataatcttgttcttgtttgttctcttctctgcaatctgattcattgtgcattgttgtcaaggaccatggaagaaaaatcttcacttttgcaagaaacagtagattatgtcaccaatattttaaaacatattgtgtcatttgttgtgaagaagaatgatgaactttctcatggtcttactaacataagttcagcattggatacaatgggctctgctttctcctcaatcaagagcttactgtcttctccaatatttaatctgtcaagagttgataatggagtttgttctgttgttatcaaaagcattactgaattacttgatgaactcttggtggcaatttctcagctgttttgtcagatctctagtttagtgagcaattttgatgcagagagtactggtaaaatgctaccaacatctagtatcaatttagaggacctaaatcctgttttggactgtaaaagtagtgttgctgatatggatcttgatgtgatggactctagtgaagtagattctgtcacagctagtgcgagtggaagtatgggtagcttcttacgacctttggaatggaagctagatctagtttgcattatttcaacttttttctcagtttcatcacttcatacatgggaaattttgtacagcttggtggataaagaaggtgacgtgaaggttcgccaggccatcttgcttaacctttgcagaaacatctccgcgtcatctaaaactgtatctttagtggtccattttatagttgatatgagggacagaggtgcaagttcattacttggacctgcagagtgcttaactcacatacatgctttattaaaagcgttgatagctatccatggtggacagaatgctgatggaaagcaaccaggacgcgaagtatttttcagtgagaaccaggatatcttatttgacttgttaaatagggctacagacataagttctgtagattggttttctcgcatcaagttcattgattgtgtctcctcctttgtttgcctgttccctgatgttgcccaggatttgatcggatgtttgcttgacatgctgcatgatgctgattaccgtgtcaggttgtatttggctaggcaaatcgtcgtgttattccaaacatgggaagggcacaatgaattatttaatgatgtttgctcaagcattggtgccaagatggtgaagttctcaaatatttctccagttacagctagagaagtcttagctgttggtccacaatctgttctcgtaattgaaactgctctcattacactagctcatttggctgtgcatagcgaggatgttgaagttgagtgtttgttcatgatttctgctgcggctgctatagagccttctcagcgagaattagcttttgcgttatttgattccatttcaaggaggcttggttatgcttcaagaagcaagtatctggaccaagtgatgggcccgattctttttcgatgggttgcttgtgagatgaatctaatttcacttgttgaggtgcaagaaatgtttggttatggatctgctgagccaaacaactttgttgaacattgtagttcatggcttctccctttcctcattctcaggggtgatggtgctgatatgaattggatatcgaagattttatctcaacctttgtcaatcattatcaagagatacttcgttccaatctttggaatgtgcattgctgtcagatgtggcacagggccagagaaggacttagctgaaactgtcttatgtgaatcagttttgcagcttggtgaaatttctgaacttgagcgtgatgatctcattaaaaaacacatggttgcgatcgttgcctttttgctctctgtttcttcatctgctcatgggccacaaattccatatttttccaagaagaatgttgcactttcagtcagaatggttgttgatggatttgtggacacaatggatgataacttggctgatacagttgttagtgataaagttaatatatttcgtgctgacagagtttttaagttcctgttgtcgatacatcagcaagttgcagatgccagccattccaggcacatgggtcatcgtctttgtgcaattgaggttttaatagatgtacttgggcacagagtggttcttgagagcacttgcttctatattatttctatagtggggaactatattcagcaaaaaccactgcaaggccagtgctgtaatattttgtctaaattgttggctgcttttgatggaaacacctctgctgaaaccctgcaagtgcttggcagacagcttcaggtagtagttccaaaattaattttttcctgcctaattaatgagaaagaagaaagaagtggtactgaagattcatcaagagttctttctttactccatcaattgacagtggagattgatcctctgctttatgattacataagagagttagaaccacttcctgatcttgattgcttgaaagatgtacaggagtttcatgcttcactttctgcctcacattcttcaaggaatcagttcttaaagtttgttaataaggctccttatttaccaccagaactatttttgttgagtcttcgtgcgtatcacaaaaagttatttttgggagaaatcattcgtagaagtgacctatctgcggctgatacaaacatggttagctgctggcatagtgacccagatgtcatttctgctgtatgggctcttgttgacatttgtagctcatcatctgtagcaaatgaagcttcttgggtgcttgctgattttatctctagggctggtatatctgatgcacatcaagtaatattccgtctgccaactaccaccgaaaattattctttacaactacatactggttctgcttccaaggaggataaattatccacaaactatggtatttctgatgatgttctggttgggcttttgaaactcttgaagacttatttatctgatgaatctgttgaaataatagatgctgcttcacaaacactgaggggtattctgtcaacagcacgggggctcaatgctctgcagtttcttgattctcccgataggtctttactcatggttcattcgagaggggtaaacattcagatagttgaacagactatatcacaaatggaacagtgtgctggtgtttcacttgatgatgcagatgtgtgggacactgatggtcgaacttgcaagcaatggctgtgcacccttgtcagctcacttatttgccactgtgaagataccatcttgagactctgtaggagtattgtttttgtcaaagttaaggctgctgagcttttgctttctagtactctagtgaacattgctggcaatgttgattctaatactgccatctgcaaattaatttcaacaaaggttgagaaaataattttttccgactccaatcattcattgaagtcaatccatctgtttctggatgcactgaatgtcattagatctttttatgttgctgaaaaagccagaactttcccttctaatactctcaaggatggtagatctgctagatcaaaaagtcgatcaccagtgacaaccccatcatcatcatggaagaaggtatactggctttctgttgattatcttgttgctgccagagctgctagtcgatgttcatgtgactttgccatactaatgtatgttgagctttggtgtgaggaacaattcaataggctggtattaggacctccagagttttccaatgaagagttgttgccacctcatgttgatctgttggttgctgcatttactcgtataaatgaaccagacagcatttatgggctcacactatctaatgagatagcgtctcagcttattaggtatgagcatgaaggtgattggagtagcgcacttgaatactatgatttacttgtaaggtcaatgccaaaggaacaccttggcactttaactgggtcggtgttgactggaccatctaccgtgtcttctagagcagaagatacaatgttgaactggaaaatgcacaaaggtcttatgagatccttgcagaaaactggatgtagtcatgtgcttgatgtctactgtgaaggtttatctcaccaaaaggggtgtcttcaacaagacgcggagtttattgatatccaatatgaagctgcttggagggcaggaaattgggatttctcctttttcgttccatattcttcttggtcttcaacccgctctcgaagtagctgtcttttcaatgaaaatttacatagttgcttaagagctctgcagaacggtgattctgaggagttccatgcaaaactttgtcaaactaagatggatcttgtcttggctttgtcaaacactagcaaggagagcacgaaatacatccactctaccatccttaaattacagattctagatcatgctactatggtttgggacctgcgttggaaccttaatcccaatcaaacttcaaaatctcctgtaaccaaggaattttctcacatatctactgtccctaaagggatacagttggagttgttggataaagagtggaacttaattatgttccaagcagaacggaatcttgatctatttgaaccttttctggcatttaggcgtgccctccttaagattttaggttgtgaagaacatcttgtaaaacatttatttcaatctgcttctgcgctccggaagggattaaggttttctttggcagcggcagctttatatgaactcaaagaactttgttttcacagagatgagagcactatgacaaatacctatttgcttgcacggcttgaagacgctaaattgctcagagctcaagggcagcatgatatggctattagtcttggaaaatacatactacagaagctttctgacaagaaaaacctgtcagatgtctatcgattagttggcaagtggctggctgaaacaagatcaagcaactcaagaactatcattgaggactatttaagaccttctatagatctctctgaatttgagaagagtacagataaaaggtacatgtccaggcagtgtcgaacacatttccatctagcacattatacatatagtttgttcagaagctatgaggaaagactctcatctaacgaatggcaagcagctctgcgattaaggaaatacaagactagggagttggagatactgattaaaagactgagaagttcatctaagggtgtgaagactgattactcagtaaaaatccaagagttacagaaacaacttgcacttgacagagaagaagcagagaaaatacaggatgatcacgataatttcttaaatctagcacttcaaggctaccaacgttccattgttgttggtggcaaatatgacctacaagtggtttttcggttggtctcgttgtggtttagtcttttctcaagggatcaagttgtgaaagcaatgttgaaaaccacaaaagaggtccaaacctacaagttcataccactggtttatcaaattgcttcgagacttgggagcaccaaagatgctcaggggtcatttaactttcagattgaaagaacagtacatgtcagggaggcactgtccacccggtgaacagtgcctccgtgacagactgacagtacagctctggtatcatgggcagattgcgttagcttctcttttgaagaaaatggctgttgatcacccatatcatacaatattccagcttttggctctagcaaatggtgatcgtgtcaaagacaagcaaagaagtagaagttcttttgttgtagatatggagaagaagcttgctgctgaaaatttgttaaaggagctatcttcctgtcatggacctctgatttgtcagatgaaacaaatggttgagatctacattaagttagcagaactggagaccaagaaggaggacactaacaaaaaaattccgctgcccagggaggcccgcagcattggtcagcttgaactagttccagttgtgactgctaccgttcctattgatcctagctgtcgttatgaggaaggctcctttccacatttcactgggttggctgactccattatgatcatgaatggaattaatgctcccaaagttatagaatgttttggctcggatggtaacaaataccgtcaacttgcaaaatctggaaatgatgacctgcgacaggatgctgtgatggagcaattttttagtttggtaaatacattcttgcaaaatcaccgagatacttctaaaaggagattgaaaatccgtacatataaggttgttcctttcaccccaagtgctggtgttgttgaatgggtaaacggtactgttccactaggcgattatctaattgggagtactagaagtggtggagcacatggacgatatggaattggggactggacatatcttcaatgcagagagtacctgatgagtgtaggatatatagtcggtcttggggatcgccattccatgaatattctcatcgaccaagacacagctgaggttgtacacattgatcttggtgttgcatttgaacagggtctcatgcttaaaacacctgaacgggttccatttcggttgacaagggatattatagatggcatgggtgttactggtgttgaaggtgtgttcagaagatgttgtgagaaaactctctgtgtcatgagggcgaataaagaagcattgctcactattattgaagtcttcgttcatgatcctctatataaatgggcactctcaccactgaaagccttacagcgtcaaaaggaaacagttgatactgattcatgtttggatgactcccaagaaccttacgatggcaacaaggatgcagctcgagctatacttcgtgttaaacagaagttggatggatatgaagatggcgagatgagaagtgtgcagggccaggtccaacaactcatacaggacgcggtggatgttgatcggttgtgccaaatgtttccaggttggggaccttggttgtaagctccattgaaagggatgtaaattttgatcgaaggcaagagcaacttttttcactgcttatgaggttttattctttggtgtgtttttttccctcaccaccctgtcaacattcctacaaagtacagcaaacggcttttggtaccctgtaaattgatgggaaggcaaggacgacatttgagtgcaggtgggttgtaccactcctgttttagagcatgtccagactagaggatgggtgattgcatagtgaggccacagttttctttttttgttgagcttcattaataccccctctgtctaaaagtcctcatcgtttaagcgtcccgcaccaagaccaaggatgcccctccgcattgcagccgctgtgaagttaattatctggcgccgttttgtattttcaaaacacgcatatgtaatgtcgcaaaaattcagctgcttcgatggttggccggccataggggcggtatccatacatcacaccatcgtgcagcgtacattcagctgcttcgacggttgcataccgtagtttttgttcaggatttactttgtaaagaagtgaggctgttttgtcatgtatgtaaagggcttgtttcgatgtagcatgaaatacgaagaattatgatgcatttgaatataccgtgctcccctgagcaaaaaacaaatcaacagaagctaccacctggccgccacgctcagagtcgtcttggctgaaggatttcttgggtg

SEQ ID NO: 33515 - DNA, 2567 bp, Zea Mays
gtgggggcgggcgcgcgcgcgcggtggatccgcgggagcgcgcgcgggatccgcgggaggttggggatagcggggcagtctacacgtgactcttaataattaggtctaaatgtgatttaaaaaaaagacaaataaaaaaattcggacgacctacgcacacgctcagacaggtttacgcgctgacaagctgcccttccgcgaactacacgttcgacgaaatgccgccgcgagagtcgagacctcttcatcgtcaactgagattcgcctagcatcttctcggattccttccccaactttcgtccccatcagcggacctactcgagatcgacgagactcgtcggagcccggttcctaggcgtcccagcgcccgactggatctcctggctcgggccgccttgatggtccctggggtcggtccggggtggagttcgaggcgatgagcaggcttgcgtcggggctccagcgcttgcggaggtcgtcgtcgcagtgggaggtgctgtggtcggcgctcgcgtcatgcggcctagtgcttttctcgcagctcgccgtggcgatggttccccgtctcttccctttcctctccctcctcgcgatgctccccatcgcgggtcggtgctctctggttgctcgcttcctttttggttctctgcacagctgcactgcacccgattgcgggagtttctattttttaagcgccagagcgattctgatcttccttcgactgcgtgttgcatagggttggtgttcatcgcggctatcgtgctcggccgcctgtggaggaggttcatcggggtggcggcgtcggccccgctcttcgtgctcttcaacatcctcctattgtggggcgtttacgtattcgtaatccggagagaaacttcttctctgctggacatgctaataaatgcagagtgtgcacttcttctgtggggattctacaggattttatctggtgatcctggtattgttgcttgtgattcttcatatttggaagaagctggctgcaaggattttgtggaagctatatactcgagtgagaaactcccaatgctctcaagggtcaggcagtgtacctggtgcaaagcaaacattaggggctatgaccatcattgtcctgcatttggtacttgcataggacagaaaaatcatcgtctatttatggcccttttgacaggatttgttgttgctgaatcaacatatacgatgtgctcaacaaaatatattaccagatgcatcagttcagggactataagatcggaggtatctatgcccatatcttattctttgtgcatgaattgtaaggcaattttgtttggaaaatgtatgtctgtgccattgtctcagctagtatttcgatttttaccagttttttctgaaccatttacttggatgaaataattaaaaacagtggcaataatggaaacagtaattaacctgattgtacacacctacatctttcattttgtttccaagaatttcttgcagtttactgtttttgaaggtgctcagcttccttccaccccccatatttcttgaacacgcaggagaagctgaccttaggaaataagctaattgttaagtaaatgtgttcaaccatactcattattttttcctcttctaggactatttagatgttttagcatagtagctattcattctttttctcaaacacaacgctttttactgcatatgcatagtgagtgcatttgtatgtctttagtactttcaatggtaatatatttaaatcaggtcaaccatgatatagtggaaagcaattatattaagctatgttctgggccttttgagttggtcttccatgtttctgagaaacttacaacttcccttttgttttatttttccatcaaactgtacccttggtttctgatatctgtaagaatgaccgcaagatgcttactgagtgtactcatttactttccagaatcctgtatctttaaacatagtaatcagtacaacgctcttctctatcctccaggtcctctggcagattgtattcttgatgtggcacatatattgcatctgcttcaacatcaagacagatgagtggattaactggaagaaatatcctgaattccagatgaaggaacaacctcgatcagattctgaagtcaaatttgtgaacccatatgacaagggcatgctgtgtaacataagagaatttctaaagccggaatgatagatagccaattttgagtacgaagacctggaactagaaagatgggaagtctgaagtgcgttataactggatggaagcttgtttccttgttggctatagattttcaggaatctattctgatgttgtagccgtttagttgagattccagatttatgacagcgaatctggttcagtaaactgaaccaaacacactctgaggatcattgaactccctgtagtttaatgtgcaagtaacattcttttgtaaggttactttcacttatggaattcatatcgtggtcctgcatttttcaccgtttggtctgacgttctgtgggaaaagggtcgcacctgtagggatttgaaataatttgaagggaattgccgtgcttttgtc

SEQ ID NO: 33516 - DNA, 2206 bp, Zea Mays
aaaagtaccctcgatctccaaccggttcaccactcaccactcaacagccctcccctctcatcatctcctccccccgcacctgcacagcctctcccgccgcgcgccgcctccgcgcgccatccagacgccagtgcgcgtcgcggtccgctgcccgcgctggtgttacacacgtgtaacaatacattacatggcgctagtacagttcaatggtgccttgcttccccaactcggtgaaaaacctcggccgctatcctcgccgcctgcagttgcaagggctacctatgccgatgcaaggttcctggcaccgaaaaccagttcaagaggtagaggtaaacacctgctatcacctagttatagtttgcattcacagacctcttctgaacaaataaaccatgtaccgtcgtcaagatctcgccagaaaaggggctcaagttttgtcgtcagagctgaagctgatttctataacgtacttggtgtctcaagaaatgctagtaaatctgaaatcaagagcgagatcctggtgctgaacaaaagttcaaggaaatcagcaatgcttatgaggttttgtctgatgatgagaagcgatcaatctatgataaatatggagaagcaggtctgaaaggtgctggcatgggcacaggagattactcaaacccgtttgatctattcgagtccctgtttgaaggattcggtgggatgggtggaatgggtggcggtcgtgctgcccgtaacagaccaatgcaaggtgatgatgagagctacaatctggtactcaatttcaaggatgcggtgtttggtgtggagaaagagattgagataaccagattggaaggctgtaacacctgcgatggaagtggtgctaagccaggtacaaaggcaacgacatgtaaaacttgtggaggccagggccaggtggtctcctccacaagaacaccactcggaatattccagcaagtctccacctgcaatacctgtggtggcaccggcgaattctccacgccttgcaacacctgttcgggcgatggccgagtgcgaaggacaaagaggatcagtctaaaggttcctgccggagtggattctggaagcaggctgagggttcggtctgagggtaatgctggccggagaggaggccctcctggggacctttatgtcttcattgacgttctctctgatcctgttcttaagcgagatgggacaaacattctctacacgtgcaaggtttcttacatcgacgcaatccttgggacaaccgtcaaagtccccactgtcgatggaatggttgacctcaagataccttcagggactcagccaggcacaactctggtgatggccaagaaaggtgttccgcttcttgggaagtcgaatgctcgcggagaccagcttgtgcgcgtacaggttgagatcccgaaacggctgagcagcgacgagaagaagctagttgaggagcttgcaaacctgaacaaggctcagacagccaatagcaggagttgatttattgagcaaatctttttaggacaccatgcttgtggtcacaggcaattttgatgcaaattgcagtgatgaaaagagttggtagtggttcaacacttctacgaactaaagaggtacactggagcgaagcgtgtcatgctcatgccatatctgtggcctcgtttctaagctattggaaaccaagtcggtgaccactggacgtcttgcaatagcttaacatatacgactttattagccattttttgttacacggctttttgtattcttgagagccttaggcaaaatctctggtagtggaatcaggcttagacttttacatttcttgcagaaatgctgcaccattgatggaatatgtaagctgcaccatggaaatgtgactgcagttttatggtttgtgatgcgtcgggggtttattgttttgctcttcaagttcgttatctaaacaatacatttatttgcccctggcaggggcagctgttgatttgaagctgcctctgcgcagagcaggtgcatttttgtggtctaggcagctgttgacatgaagctggttgttctgtgtttgcaactacttgggactctaatttaattttgttcctgtatgatgtttttaataaaatcgcaaatgctttttttctgcatgcacatgcgtaaaggcatccgcatgcacagtaggcattacaaatccggttggaaaggacgaaaatttgtccaaaaa

SEQ ID NO: 33517 - DNA, 1288 bp, Zea Mays
cgcggatggaccttctgacttgtccggttctccccgcccctgcgtgcgctgcgagctcggctgcgtgccttcgtgagagggggtgcgaacggccagatggggatctaatcagacaagcgaacgaggacgggaacgggcacgggggtgccgcgccccgcgatatccgtcgtccccggcgaggcggcgacactgctgctgtaggataaggacttaaggaggcgtcgctcggtgcaaagaatccatggcatggggaggtctgttcttgtgcatgggccgccccacgcaggagcaacagaagtcctgccttgcagccgctggtggcttcaactacgacacagctctccaaggcgccacacgcccaaagtcagtgtctaccttgacctctgacgaagctggtggcgaaataggtgacaaggatcttaccgagcgtggattctttgtgaaccgatcgcgtgttctggtcggctcaggttctgacgcctttgtccatgccaaatctgccctcctctcatggaggcacttggctttagggtgggcgaacgtggaaccggacaccccggtgaaggtaggtacaaggttctgcatctgctacaaggagttgatcccctgggtgacgctgccgcttcagatagcgtatgtgaccgacgtcgattcagacacgtccaaagggtgctcccggtccaagatgtttgccttcggcagcggcactctacagggccatctgctggccggagaggagcggttctcggtacaggtggacgaggaggagagggtgtggtacgaggtgctttctttctcgaagccggcgcacgtcctggcgacgctgtgctacccgtatgtgcagctgaggcagaagcatttcgcgcagcagtcgggacaggcgctcgtcaggcatgtgtccacctgctcttccaagcagaagcagtagtagagctttgtggagatgcactgcacagagaatgctgtatgtattccccctttgaattctattccgacatggcctggtttggcggcgctggggcctgggtgggatgatatatgttcgggcattccgagtggagtttgcccatcccatattttaatttcttcatgatggtggtggatctgttgcagctgaatgaattaagacaggaagatatataaaattcatgcgcacacagaatgaacacgagatgagaatcgagaaggtgcagtgaatgatttatccattatttatgaagtgattaatttagtaattaatttaatcttcaaagtgcgtagttatctaacaaattattagaaaacatgg

SEQ ID NO: 33518 - DNA, 1483 bp, Zea Mays
cgatgctcagtcatcaagtttcagactttcagtcatcaagctattgaatgtcttgttgataattatatgttgacatgtgaggaagaagttgagttattgtcctctctgcaattcggtgaagaagatgggtggctatcagcattctattcatgtttggtcacgaagcatgaaaaagaatatttagttgaagcaaaattcaaggaacttgagcaagaagcttgtagtatttcgtcctcgagttctggtgaaacaatgaaaaataacattgatgttttggtttgcaaagctgaatactaccaccagagtggagagtaccaaaaatgttttaaactcacatcctcgttacttgagagagaccctttccatttaaagtgcacattagttcatttggcaactgcaatggagcttggtcattgcaatgatctttatcttttggcatgcaacttagtgaaggattatcctcaaaaagctctttcatggtttgctgttggttgctattactactgtatcaagaagtatgatcaagcgcgaagatacttcggcaaagctacaggtttagatggggcatttcctcctgcttggattggtacaggcattgcctatgctgctcaagaggagggtgaccaagcaatggctgcgtttcggacggcagctcggttatttcctggatgccatctgccaactttatacatgggcatgcagtatgtgcgaatgcacaatttcaaacttgcagagcagttcttcacacaagcaaaatccatctgcccatctgatccacttattcacaatgagttgggggtcgttgcatataatatgaaggaggaataccagaaagcagtatcatattatgcaaaggcactcacttttccaaccaaaagtttgagtgcatttgctggtcttgcttacacttatcatcttatggatgattttgaggctgccataaattattaccataaggctctatggttgaaaccagacgaccagttttgcacagacatgctaacatatgctcttgagtccatctgccaaatcactgctcgtagaaagcctggtcgaggtttgctaaccgcaacaggtggtgtcacatgctagggtattattttccttacagacatagtagtagctaattatatgtaaatttgttggtgtacaatatgtaattgctcaagttcatttcagtcactcgaggctgatcgtagtgtaaagccagacattttctgtaccttttaatttatactagaaataggcagcgtccgaggacgctttgtaccagccacctacactatggaaaaactggggagagaccggagttgcaagatcaggttgttcagaggtatttttgcaaatcctaatagaaatgcatttacagaaatagagcatcgtgtcagacaagaaataggttagtgatgctcaggaaattgaagttttcctcttcctgaatattcattctcctgtgtgttagagttcaaaaaaaaaaatacaa

SEQ ID NO: 33519 - DNA, 3554 bp, Zea Mays
  misc_feature (3553)..(3554): n is a, c, g, or t
aagccccaaccacccttagcacccgctttcgtctcgctgcgtgcgctctctgtcactccccctcccctcccccctcctcatcagatccggccacctcctgctcacctcgcctcgccgccggtcccgcgccccggagccctagagctctccccgcggcgtgggccgccggagtccccgggcgcgcggagagaatggaggcggcgctggaggcggcgcgcgccaaggacaccaaggagcgtctggccggggtcgagcggctgcacgaggcgctcgacgccgccgcgcggcgcgggctggcggcggccgaggtcaccgcgctggtggacacctgcatggatctgacgcgggacgccaacttccgcatcgcccagggcggcctccaggcgctctccgccgccgccgtcgtcgccggcgaccacttcaagatccacctcaacgccctcgtccccgccgccgtcgagcgcctcggcgacggcaagcagcccgtccgcgacgccgcgcgccagctcctcatcacgctcatggaggtttcttcaccaacaatcatagttgaaagagctggtagttatgcatggactcataagagttggagggtgagggaagagtttgtacgtacggtggcatctgcagttgggctatttgcttctacggagatttccttgcaacgagttttgctttcacctgtcctgcaactaatgaatgattcgaaccaaagtgttcgagatgctgctatctcttgtattgaggagatgtacaagcacatgggatcacaatttcatgaagagttgcagcgccataatctgccttcatacatgctaaaagaaataaattcaaggttggataaaatagaaccaaaggttcgatcctctgatacagcaatgcagtataaggctgtagagtctagatctgttagtgctaatccaaaaagaggcagcccaaggacaaaaaacataccaagggaaagtacactatatggaggtgacacagatgttacagaaaaacctgtggaaccagtaaaagttcattctgagaaagaattgcttcgggagtttgagaagatcgcggctacccttgttccagaaaaggactggtctttacgtattgctgccatgcaaaggattgaagccctggtttatggaggtgcaatcgataatccatcatttcttatgctcctgaagcaactggttcctccattgtctactcagctgtctgatcgacgttctagtattgtcaaacaggcatgccacctacttaatatactatccaaagaactccttggtgattttgagccatttgctgaactattcattccgatgctttttaagcttgttgtcataacagtgcttgtaatcgctgaatctgcagatacatgcataaaaactatcctgcggaattgcaaggttgctaggattcttcctcgcatagttgacacagcaaagaatgatcgaagtgcaatactccgtgcaaggtgctgtgagtatgcacttctggtactggagtattgggctgatgcaccagaaatacaacgttcagctgatttatatcaggatatgataaaatgctgtgtagcagatgcgatgagtgaggttcgtgcaactgcaagaacttgctatagaatgtttgcaaagacatggcctgagcgctcacgccgtcttttcatgtcatttgatcccgcgatacagaggataataaatgatgaagatggtggtgtgcacaaaaggtatgcttctccctcgttgcgtgatagagtcgtgcagccttcacgtgcttcctctcattcaagtggtacacatgtacctggatatggcacttcagctattgtcgcaatggacaagagtgcagctatttcttcagattcatcttttccatcaaacactcttcggttatcacagtcaaagacgattgacagaagttctgagaggagcctggagagtgtgcttagctccagcaaagaaaaagtttccgccattgaaagtttgctgaaaggtgtcagcatgtcagggcaaaatttctctgctgcacgctcaacaagtttggaccttgcaccagcatcaaacgttctgtcattgcagaactcagcactgttggactcatcccttcctaccatcccacctagttcacgaaatggaggttcccgcttattggatacgatgacaacacacttgcccaccaaagaacgatcaaggtcaccatacttgagtaatatgtcatctgagtccatgtctggcttatcactgccttactcaagaaaatctttggagaggctccaagaaggtggccgcatggatgagagctatgatatccgttcaactaggcgaatcccccaaatgcacttggacagaaactatgttgatatgccttatagggattcacataataaccacgtccctaatttccagagacctcttctaagaaaacaagtaatgtcaagagcttctgcaagtggcagacacagctttgatgatagccatgtaccattaggtgatgtgcctggctatacagattctctggcttctctaaatgatgcactttccgagggtctcagccctagttctgactgggtagcaagagtttcagcttttgaatttattaggaatttattgaaacaaggacagaagggcattcaagaaattattcaaaattttgagaaggttatgaagctgtttttccgtcatttggatgatcctcaccataaggttgcacaggcagctttctctacacttgcagagattatcccagcttgcaagaagccatttgaaagttacgtcgagcgaattctaccatatgtattttcacggcttattgatccaaaagagttggtgaaaaaaccatgctccataacattggagattgttggtcgaacatatgctattgatatgttgctacccgcgctagtacgctcattagatgaacagaggtccccaaaggcaaaattggctgttctggagttcgcaaataaatcattcagcaagtactctgtggactctgatggttatagtaacagtggctttcttaaactatggctttcaaaattggcacctttggtaaatgaaaagaatgcaaaattgaaggaggcatctatttctgagcaagaaagaacgcccgcgccccaaaccttatgaccaggtggattttggaacttcttcggaggatggctatgcactgacatccaagaagagctatccatttgggcggttttcttctagttcccttgatgctgaagggggcaagatgatcagctcgatgcaagaaccagcgctgcataatgtctctataggtcgaacagtttctgatatgagcatggatcatgctattcaaagtttggagtcatctacaggagctgaagttcatttaactaggggtagagaaccaaagaataacagtaacttagttgcggaagctgctcgctcttggacaagctaccctgaaaaaactgatgcctccgtagatggtgaaactgctaccggtactcctcggttagatttcggtcggtttattacttctgatgggcataatactgttggttcaactaccgaaggaagtgttcaagacnn

SEQ ID NO: 33520 - DNA, 815 bp, Zea Mays
ccgcaatggccccgagaaggccagaagccccgcaatggcaaaggcgttactgggcaagcccgaacgacgaaactacgtggcccatcgtcaccgcaccctgcagagcaaagcaccatccgcaccgcaccgcaggcgccatcgccggagccaaggaggttagggtgtgatgtccctgccgcgatgagccactaccggacctgagatacgcgcacaaggtcgtcggctagccggatggcgaagcaggaaactgggggctgtggagagggaagcgctgaccaagttcttgacggacagggaggtggaagacgagctcgccggattcttgcactactacgtggcaaacaagcaaggagaagatggaactgctccggtggttgaagagtgaagatgaaaccatttcagtagaataagaagccacacagcaggtaatatgggtgattccaatacaaatgagttctaagttaaaggccatattgttgggtgggtcgatgatgatgagctagcagtgacgcctaagaaaaatgaaaagccaagtgcaagtacctttgttggttaagtttatacctacagttgcagctcctattctgtaaaattgaagcttgcttttgggttttaacctatctagtgtctgtagtttgatttctgaaagaaaaacggaatacatgtggtccaacaagactgtcaaatgaatagagcaatttgccgatggtctacctgtgtaatttcagtaggttacttctgttaacttttttttggaccgggatactgctgttaaattgatgtagccaacttgtgccaacccacaacgaaataag

SEQ ID NO: 33521 - DNA, 7605 bp, Zea Mays
atggactttgccagccgccacgccgcagcggaggctgccacatcgtctgctgcatccgcctccgcccccgcggcggtcgctgaggagcctgagtacctcgcccggtacatcgtcgtcaagcactcgtggaggggaaggtatcgccgggtcctttgcatcgcctcttcctgcgtcgtcacgctcgaccccaccactctcaacctcaccaactcctacgatgtcggctccaagttcgaccatgctgaggctctcactgccaccgacgagttcacgctcgcagtccgcaccgatgcccgcggcaagttcaagcctatgcgcttctcatccccgctccgcccggggatcctcaccgaactccaccgcctccgcccggtccaggactccttcgacttccccgtcctccatctccgccgacgcacccacgagtgggcccccttcaaacttaaggttactcctgtgggtgttgagctccttgaggcttctggttatatgcgctggtgcttggaattcagagatatgaattctccagcaattattctcttggggaatagctatgggagcaagactactgaaggtggagggtttgtgctatgcccgctttatggtcggaagtcaaaagcttttatggctgcttcaggaactacaaacactgcaattatatcgcatctgacgaaaactgccaaattaaagattggattatcactatctgtggataattcacaatcaatgaaagcggacgagttcatagcaaaaagagctatggaggcagttggagctgctgaaacacgacatggagagtggtcagtaacaagattacgttctgctgcacatggcactgcttatattgagagcttaagtttgggtgttggaccaaggggtgggcttggagaacagggcgattctgtctcttgtctgcttgttcttacaagcacttcacttgttgaaagacgtccagagaactatgaggtagaaattttgtcctcaattttatatgaattgttaaaactcttctccctcgagctattggcaatccaagacatgatatcaattttgagtaccaacaccctacccccgcctaacacaaacacacacaaaagagagcatatggctgtcatagtacgaccactctcagcagtaagtgctcttgttcgatttgtagaagaaccacagatatttgcatttgaattcaatgatggctgcccaattcatgtatatgcaagcacttcccgtgataatctacttgcaacagttcttgatgttttagaaacccagagacagtgtgcaattccagtgctaccaaggttaacaatgtctggtcatcgcatagatccgccttgtggggtagcacatcttgagatgccctatcatggttctgttgacatggagtcagcttccatgcacacaaaacatttggccgcaattgctaaagaggctgtagtgtcatctgacactgttcctggagcaaaaatcagattgtggcgtagaataagggagtttaatgcatgtgtaccatacactggagtgcccgtcaatattgaagtacctgaagtggtcgtactggccttgatcagtcttcttccaaccataccacatagccttcctgctgatgctcctcctcttctgcctccatctccaaaagcagcagcaacaataatgggttttgttgcatgcttacgcaggctacttacatcaagaagtgtggcatcacatgtgatgtcgtttcctgtcgctgttgggagaataatgggtttgcttaggaatggttcggaaggagtagcagctgaagctgctggacttgtggctatgctaattggtggtggtcccggtgattcatccatcttaatggatgcaaggggagaatcccatgccacctacatgcatgcaaagtctgtactgttctcgcaaccaatgtatgttccgatccttgttaacaggttgaggccaatatcggtgtcaccgttgttatctttgtctgttgtggaagtccttgaagctatgctttgtgaaccccatggtgaaacaacccaacatgctacatttgttgagctactgcgtcaagttgctggtttgcgccgtcgtttgtttgcattatttgcacatccagctgaaagtgtgcgagagactatttctgttataatgcggacaattgctgaggaagatgcaatagcagcagagttcatgcgtgatgctgccttgaaggatggtgctcttctgaggcatttactaaatgctttcttcttgcctgctggagaacagcgtgatgttagtcggcaacttgttgctctttgggctgattcctatcaacctgcacttgatttgctatcaagaatacttcctcctggacttgttgcttacctccatacacgttcagatgaagaatcacagagccagtatgatgaagcaccgttgagcagaaggcagagacgaatacttcagcagaggagggtccgtggtagtaaaagtatgtcagtacaagaacaaggggtaccccccaatggtgttgaggatggggaacccttcaggcacaccagtgcgggcacttatggagtagcagatgttcatcagaggcatgttggcccatactcttccacccactctcctttgccaggtataagcattgatccttcttgtgcagttacagtgccacatggttttgtacctgaggccctttctgaaaataatcatcaaattggggaaccacagctggattcacatgtttattcagtggactccaatgccaatggtgatcttgtgagctcatcgcattcagatttttcagtccctgcacaggttgtggtggaaaacactcctgtgggatctggcaggctcctgtgcaattggtatggattttggagggcattcagtctagatcacaacagagcagatttgatatggaatgaacgcaccagacaggaactgagggaagcattgcaagctgaagttcataacctggatgtcgagaaagcaagaacaaatgatattgtccctggaagttcagtcactgaggacgctggtggtagtgacaacttacctcgaatgtcatggaattatgctgaatttttagtgagctacccaagcttgtccaaagaagtctgtgtggggcaatactatttgcgactgctgcttgaaattggaagcaactatcgagcacacaattttccactacgagatccggttgccttttttagggctctgtaccatcaatttttgtgtgatgcagatattggtcttactgtggatggtgcagtacctgacgagttgggatcatctgatgattggtgtgacattgggagattagatggctttggtggtggtggagggtcttctgtaagagaactctgttcaagggcaatgactatagtttatgagcaacattataaagttattggggcttttgatggcactccacatattactgtcctcttagaccgaaccgatgatagggttttgaggcatcgtttgttactacttttaaaggtcttgatgaatgacctttcaaatgttgaagcatgtgttttggttggaggctgtgttttggctgttgatttgcttactgttgcacatgaaacatctgagcggactgctattcctttgcaatctaacctcatcgcggcaactgcatttatggaaccttcaaaagaatggatgtacattgataaagatggcacacaagttgggccacttgaaaaagatgcaataagaaggctgtggtcaaagaagtcaattgattggacaacaaaatgttgggcttctggcatgtcagactggaaagggctacgggatatacgggaactgcgatgggcactttctgtaagagtgcctgttttgactcccactcagattggggatgctgcattatctatattacacagtatgacatctgcacggtccgatcttgatgatgcaggtgaaatagtaactccaactcctagggtgaaacgtatattgtcaagtccaagatgccttcctcatgtggcccaggttatgcttactggggaaccaagcattgttgaagcagctgcctcattgcttatggctattgttacaagaaaccctaaagctatgattcgattatacattactggtgccttttactttgcattggcatatcctggttcaaatctcctatcaattgcacatttgttttcggccacacatactcatcaagcttttcatggtggtgaagaggcagcactatcttcatctttgcctttggcaaagcgtagtgtactgggtggactcctcccagaatctttgctgtatgtcttggagcgcagtggcccttctgcttttgccggtgcaatggtgtctgattctgacacaccagaaattatatggacccacaagatgcgagcagaaaaccttatttgtcaggttctgcagcatctcggtgaatttcctcagaaattggcacagcattgccattcattgtatgattatgctcctatgccacctgtgacttacccgaatctgaaagatgagatgtggtgccatcgttactacctccgcaacctatgtgatgagattaggtttcctaactggcccattgtagaacatgtggagtttttgcagtcattgttggtgatgtggcgtgaagagttaactcgtcgtccaatggatttatctgaagaagaagtctgtaagatactcgagatttctcttgatgatcttgtgcttggtgagaacggtagcatcaagcagtcatctgacttaagtttggctaattccggaaacaaaattgaaaacattgatgaggagaagcttaagcgccaataccgaaagctagcaataaaatatcatccagacaagaaccctgaaggaagggagaaatttgttgctgtgcaaaaggcttatgagcgattgcaggctagtatgcagggattgcagggaccacaagtctggaggctgctactcttgctgaaggcacaacgcatcttgtacaagagatatggagatgtcttgggaccattcaaatatgctggttatcctatgttgctaaatgcagttactgtagataaagatgacagcaattttctttcatttgataggacccctcttctgatagctgcttcggagctaatttggttgacatgtgcatcatcttcattaaatggagaagaacttataagggatggtggtatccccttgttggcaacacttctttctcgctgtatgtgtgttgttcagccaactacaccagcaaatgaaccagctgcaagaatagtcaccaacataatgcataccttctctgttctcagtcagtttgaatcaggaagagttgagattcttaagtttggtggccttgccgatggcattgtgcattgcacagaacttgagtttgttccctcagctgtggatgctgcgctgctgacagctgcgaatgttttggtttcatctgagttgcaaaatgctctgctcagggctggatttttatggtatgtgctacccctgctgcttcaatacgattcgacagcagaagagaatgagacatgtgaagcacatggtgttggggcaagggtgcagattgccaaaaatctgcatgctgttcatgcaactcaagctttgtctaagctttgtggtctcagtggcgatgatatcctgtacccagataacaaacctgcatacaatgcactgaaggctcttcttactccaaagcttgctgacatgctgagaaaccacccacctaaagagttattatcaaatctaaattcaaatttggaatcaccagagatcatatggaattcatccaccagaggggagcttctcaaatttgttgaccagcagcgtgctagtcaaggccctgatggttcatatgatttgacagaatcacattctttcacctatgaagctttatctaaagaattgaacgttggtaatgtatacttgagagtttacaacaaccaaccggattttgaaataagtgaccaggaggaattttgcattgccctgcttaagtttatagtagagttagtactacagtggaattccattaatttggagacgattcatcaacatggttcagttactgaagcatctatgtctggaaatgatgaagtcagtgattcaactattgaaggaaaaatggataattcatcaggaaaacaaagtacagatggagattctgaagttattataaacctccaaagtggactaacatcacttcagaatcttcttacaagtaatccaggcttagctgctgtttttgcttccaaggagcgtctgattcctctttttgaatgccttgcactgcatgttccttctgaaagcaccagcccacaaatctgtttaagtgttctttctctgttgactaagcatgcttcttgtttggaggctatggttgcagaaaggatgagcctgattttgctatttcagatactccactgcaatcccccttgcagggacggagctcttgctgtactgtattctttagccagcacaccagagcttgcctgggcagctgccaagcatggtggtgttgtttacattcttgaacttatgttgccacttcaagaggaaatccctgtgcagcaaagagctgtagctgcatctttattgggcaaacttgttgggcaaccaatgcatggccccagggtagcaatcacccttgccaggttcctgcctgatggtttggtttctgccattaaagatggacctggtgaagcggttgtttcttctcttgagctgacaactgaaactcctgaactagtatggacacccgcaatggcagcttctctttctgcacagttggcaacaatggcatcagacctctatcaagagcagatgaaaggacgtgttgttgattgggatgtacctgaacaagcttccggacaacatgtaatgaaggatgaaccacaggttggtggaatttatgtaagactttttcttaaggatcccaagtttccactgagaaaccctaaaagattccttgaagggctcctagatcagtatgtctcctctgttgctgctacacatcatgaagcaattgctacagatccagagcttcctttgctactgtccgcggcattggtttccttactacgagttcatccagtgcttgctgaccatgttggctacctcggttatgttccaaagcttgttgcagctatggcttatgagggacaaagggaaactatggcatctgggcaggcttccagtggatcgcaggcagaacctggtgaacatgacaattcatctcactctgaggccactgtgcagactccacaagaacgtgtccgccttagttgtttgcgtgttctgcatcagcttgcgtctagcacaacctgtgcagaagctatggcatcaacaagtgcaggaactcctcaggtcataccactgcttatgaaagcaattggatggcaaggtggaagtatactggcattggagacattaaagcgtgtagtcggtgctggtaatcgggctcgtgatgctcttgttgcacaggggcttaaggttggtcttgttgaagtgctccttggtattcttgactggcgtgctggtggaagacagggactccgtaataaaatgaagtggaacgaatcagaggcttcaattgggcgtgttttggctgtggagccatcgtctgccttccgactcgcgctcgaacga

SEQ ID NO: 33522 - DNA, 1068 bp, Zea Mays
atgagtgaagtaccttatacacaatgtatacaggttgcagctgcccattcatgctatttagttgttgaactaaacattgattcatactcggaaagtgcaaggttatgcctcattggtgtagaccatttgaagtgtcctcgaatatttgccagccctgaagccattcagccatataagctgatatatgcatacatgcttgtggaagtggggaaagtttctgattctttgaggtattgccaaccgtctataaaggtactgaaagcctatggtcgtgcccctgaattggaggtttggaaacaattattttcttcgctgaaggagaggatacgcactcaccagcagatctgcgcaaaaagtatagcaatggtaacctgggtttacgaagccgctgacaatgcgcaggtcacggcgggcaacaacagcacaccacatgctcccatggcgatgttgcttatcataacattttttcaaggatttggacgcctttcattagttgcagcctctgctgtccagtctgctgccagtgttgtccaagtcggcacaaaagaaatccaatcaaagatgagggatgggagctatgaccagaaggtgaatgaaactgtcaatgttgttgccaataaaactgcagagattggaagcaagacctgggggatcatgagaggagttatggcaatggcctcacaaaaggtcgaggaatatactgagcggctggggagaggattggcaacacagcgagcagaatgttcttgggacgattgggacgaccaaggcaagaagggtgaacctgcgaaaccgcaccaaatcagttactcctgggctggctgggatgatgggaaggacgatggttttgatagtcctggttacaacaaccacaacaactctaacaaggggagcaaccacaatgggacttccggtggctcattttggaggcgaggcccgttcgatgcagggagtccgccgcgttcaccggagaataggagcagcgccacgaggcagacgcgccaacagatctgctgcatcgggctgctcccaccccgtcgcggctcgtgccgccccgcgcggccataa

SEQ ID NO: 33523 - DNA, 1566 bp, Zea Mays
gagtcgacgatctcccgttcagccgtcccagttccggatcactctctcggctgccactggtccgctccccgcgtctgcggcttccactctccgctcttcgctcctcctcccgccaagatatttccggagaatttgagagccccctcctggtcatgtcgctgctcgccgtcgcctcctccacccgcgccgcggcagtgcggccgctgtgcgcctcggcggcctcggacgaggcggtgccggcgcctgctgtggcggataccgcagggcggaggccggtgaaggtgatcctaccaaagaagaaaccgcagaagtggtcgacggggatggcaccgggtgagtacggcggtgggccggccaccatcaagccgcgcaagtactggtgggggaaggaggaccgcgaccccgtggggaacaccgacgacttcatctggaacaaggacttcctcccccacatggaacgcgtcatcgccaacggcggcgccgatgcagaacccaccatcacccgccttgcgccggtggatgaggagggggagtccgggtttctgagcatcaaccgcgcaatgagccttgacagcgtggaggttgatctgagccaggagcttcaggcgccgaccaggccaatcttgcaaacccaggttgaggctgcctggagaggacgggcaattggtgctgaggctgtgaatggagccagcgctcctagatggaggctagtccctactcgcagggagcaggcaaagtgggacagagcggccaaggcagccactggtggaagtgatgttatactaagggagtcaaagtcaagagtgcagcaaggagaccctaagctgaaacaaagattacagtggttcactttaggcattggtggcgttggtgtaatctctgcttatatttcatacactcctgaaattgctgtcagctttggtgcagggttgattggatcattggtgtatctccgcatgcttggaaccagtatagattccctagcaggtggaactggagaaactgtcaagagtgctgctgcacaaccaaggttgcttattccagtggtacttgtgatgatgtataacagatggaatcagatattagttccggattatggtttcatgcagcttgagttaataccaatgcttgttgggttttttacctataagattgctacattcgctcaagcaatccaggattctatacctccagtcggaaatcgtgaaggttgaaaagtgtcatgttgtatataaacgaaggtggtagccatggtccctggtcagtggtcacccagatagtaaggtatgtatagaagaatctggtctggtgtcatcgccaagtagatgagatgctcgttgaggacgccatttgaaaatctcgagtgcttaactatgttctgcacaaatattttgacgaaaggtgatgttaccacattcattccatattacacgcagatcatcagtgtataaatttacggctccgaacttttaccacaacgattaattgacaaaacaattgtatgattgaattcacatttagcactggatgcaaattatgcagtctgcaagtacactcatttaaagc

SEQ ID NO: 33524 - DNA, 2311 bp, Zea Mays
gcacgtgccacttgcagaaacaggaaaccagtagaccacgcccgcggtgcggtgcggtggatccgccaacaacgggcgcccgccccgccccccgcccggtctccggttcccgaacccccactcctcctccctctccgctcgccactcccgtcgctcctctcctccacgcctccctcgctcgctcgccccctcgtccggtcgtccctccctcgctcgtcttggcatccccgcaaggaatgtcccttccgtagcgtcccttgcttcttccccaccccatcctgtattagtgcgttctctgccgctttattttccggtttctttgggctctttcgccgccttggatcttggttgcctcatccggttcataggtaccttctttaacctttgctgggactccattgatgcactctttggttgtttttcggtggagcatttcgtcgaacacaggggcggagggcccagtatggtccagaaatcaaagtaaaaaaaagccctagtgtcttcgcatcgcgctcccgcacacagaccgaccagccgcagcccgtggcgcacctgcctgcgcccgccgcctccgtcatccactcaacctcgcccctcggccactgccgcgcggcgcccgcccgcctgccgcaccggccgaatcatccgacggcccttaagctgaggcggtgtggcctaagtagcagcgcggcggtcgccccgtgtctcgtccacttcggccccgacaggctgtccacggtggcgcgaactgcccctcgccggttcggccccgcccgcccgtagcagctcaccagagaactagcctctcgtcggccttccccaggtctgcgcgtggcgcggcgccgcagcaaagctccacgcgtgcgtgtccgccacccgccgtctcgcccgggccgccgtcgttgctcgtcggtgaacgacgtctcactggattagcattgaagggttatccaatattcagtgaaaactagctactgaagaataggagtagcaatacctttgatgccccataaccccattcattagtttctgcaatgtctttgtcttctatttgctgtgcgaagttccatctactaaggaactctataggagacacttgcagtgtcagatggcttaaataccatagcagattgatatatgaaactttcctctcaagcagaatacatcaaagtaggcctcctagtacaacagtgctagcaagaagcacaagaaaaggaagtaagcagtcatttagcaatggccgccatttgcacagtaaatcggttgaatcatcaattgaagtgttcaagcagtcagagcttgagcagcttaaatcacttcattgctacaatgttgaggaagagttttctgaagtcaagaccgaatggcctgcaactatccttgtttttgatattgaaactactggcttctcacgtcgtgatgacagaattattgagtttgctgtccgtgatcttatggggggaaagaatagcacttttcagacactcataaatcctgagaaagatgtgaaaaatacatatgttcatggtattaacaacagtatgctctgcaggcctgatgttccaagatttggagagattattcccattctgctacaatatgtgtggagtcgtcaaatggacggtaaaccagttctctgggttgctcataatgggcgttcctttgacgtaccctttctcatgtttgagtttcgacggtgtaaagtagaaatgcctggtgattggctctttgtggatactcttcctatcgcaaaacaattggtcgattctaatgggtcaaaactcagttctgtgtcattgaagttcctgagggaacgctacaaaatcccactcacagggagcgcgcatcgtgccatgcaggatgtgacaaccctctcttacgtgcttcagaaattgacctttgagctgaaactaactgttcctcagctgctcgagaagtctttccgagcatcggatcttccagctaatcgtcctgcaaagtgactgtatctgcctcacctgaatatcgcctgaagcactaaattattatcaccgccgttttcgaatatttgtcgtctgcaagtttatttttgaactaaaacacgacaaaaaaagagggagtacattgttgttgtattattacagagatgttatttggagatcccagctctgatttcttctatgttctttctaacaacctaataaagccagcctgattgccactgatacatcagtagcacagtaatccgtattactgatactctgacattgtaggcttgtatacattactaaatcatcaattcaacatatatttacttgactgcgaacttatg

SEQ ID NO: 33525 - DNA, 2621 bp, Zea Mays
cgccagctccgcgcgtccgccgcagtgatgccgcgcgatgaaggccgcacgggagagacgctgggaaagccgctccttccggcgttgcagtgggggcgtccacagctgtgccatgcccccgccccgtccgagacgccgaccacgacccaggattctcgcttcccgtccacgtccgtgattttcccagcgaagctgaccacgcctccctgtacgcacctcccgacatcctcgccgacatgctcgcactcctgtccccgtctgagatcctcgcgtcggcgccttcggtggaagtccggaatcgcccggctctcctccaccgcgccgccagcctcactgagaagagttcatctgcctcctcctcaacgcttgaccccaccgccgctggatccaacaccctgccctcgtccttcttctccgacctactcaccagtgacgacgtgggcaccctggccagacgcacgccatggacagcaggtgggcaggaacaccttctacgtggatcctcttctcccgtgctcctcgacgcacgagagcgagctcggactggatcctctcctaccgctccatgcagggagagttctataattattctggtttgtagtccgtgaatttatagtggattgcttgagatactgggtaacaggaatgcatgtttatgattttcgttttgaccttgcattgcatctacaatgaccagaggatgcagtctatggatccagttaatgtgtatggaaatccaatggaaggtgacatgattacaacagggacacctcttgttgtcccaccacttattgacatgattagcaatgacccaatttttgcccattgctgaagatgggatgcaggaggcctctatcaactcattgctgaagcatgggatgcaggaggcctctatcaagtaggtcaatttcctcactagaatgtttggttagagtggaatgtaaaggtctggacactctatgaattcgatgatctcgagagcatcattgataggacactaaagcgcgattttgacaccgaggaagcactctggttgcttaagataggtcttgtgtgcatcccggatagccctaagatcaagccctccatgtcaatggttgccaagatgctgcaaggtgagtgtgctgtgagtgacaggatcatgaggcctggcctgatcacagacgtcatggacctgaaagtcaggatggtagagccgatttagttcagcttgacatcatgctcgagcactgccgcaccggaccttgttggggatttcctcgattaaaatataagctccttgatatggttctgtaacatagttctgcaatgctcctttatttagttctttactttttttgttaagatatgaggtgtagcgatacaatatgtctactaacagcgtttgtgttcttgatagttcatttaggattgaatgaagttactggtatgaccttgtcgagactgaagtaaggagggatagagctaaaaactctcttggcacaactataaagttcaagctatatgggcgtgtttggatggcagcctcccatgcaactgcctggcaggcaaatgatcctagccacaccacaggcataggaaatcgaacggtcggcattgtttcctgggccagctgataaaatccattgaagtgcaagaggccgataaacttaggcgtatagtgctggatgctccatccactgtttgtctcttctcaccacaatatttccaatctgactatgttcttcattttgtccactgacagttatttgactacatgcattttgtatagggacatacacttaagcttctgtcagtttctgattggattgaaatgttccttactttgagcattaagtgtttcttttcacagtttgcgcttgcgaacatccgaaccccgttttcatcttgaattcaacttatgatgtatatcgggtaaaatgcgacttgtgatcgatcaatatagttttcggcacctggaccaggtggcaagtaataattctggtttggaaaatttcagacagttccaccacattctggcgccgccttcgtctgatcctggaggcaattggagccgctgcaagtcggatcctggtggatgcagcgcaacacagatcgcaaccctccaaggactgagaagtggaatgttgacatctctgagacagtctgaaagcaaaccgaaggcaggggtgttcatcaactcctgcttcgcgcattgctagagtgagctacaggacacatggttcgcaccaaattctccatccatatataacaagaaaattgcagaggtggtaggtgattggtactttgaaagaggagctgacgtggagattgactgcgcctatccctgtgattcacagtcttgtcgcaaccttataccaattgataaggctgaccatcctagattaaacttcaaagaccggtaccctgagccatacagagattctcatccgactgcccccgttgctgtgcatggatgtcaggtgtcattactgtaatgtagtggtgaaataggtagattaaaacaatgaaatttatatgtggctaggatcataaatgaattgcaaaattttttctcagaacagtataacacatatttgtacataagttgttgtgttattatatgtttccgttgcaacgca

SEQ ID NO: 33526 - DNA, 2507 bp, Zea Mays
tgtttcagtggagcgtacatgtagcactagtactcgactatagactgcagtacacgtcttcagtgctgagctcatcactatcagtccccgtccgggggccgtcggctgagctcaacggctttctcctgtgctgcgtgcgcatcgtgcggcggccgctgtgggcgcagaccccgacgaaacggcagaaaatttgaaattcctctcgctcctcgccgctgcacgcctgcaccatgccgcatctcctgtcatgttgtgtcatgtgtgcaccacgaagcgcaaaactccaatccacgcatccggaagctctacccctcaaacaccaccgccgcatcggttcgccgttagccggtcacctcgcctctctcctcccccaccgcgtccgaatcccatggggctctgtttcagcaagaagcagcaagcgaagcgccgagacgagcagccgtccagtgacgccaagaagagcagccgccggaaatccggcagcgacaccgtgcttgtggccgatgccaaaaaggcgcctcaggcaaaggcgccggcgccgcccaagaaggctgtagccaggccggaggagctggcagccgacaagaggacggtgttcgtcgtcaaggccgcggcggcggcggcggccgccgaggtcgcagccgccgcgaagggcgggtccgaggaggcggaggcgaagagggaggcgccggaggaggagccgatgcccgtcgccgtcgccgtggcccgggcgccggtgcggacgtcgagctgcaccaaggaggaggtggacgcgatcctgatccagtgcggccgcctcagccggacctcgtcggcgtcggggaatccgccatcgggcgagcacggcggcgggcgccgaaggtacgccggatccaagcggagctatgacttcgaccacggcacgaggggcggtggcggcgacgtcgacgagtgcgattggggcagggagggggccgcggtgaccaggccctccccgcgccggaggacgccggagcggaagcgctcatcgagccacgatggccgcactggcggcgggagcgggagcgggagccggagccggaggattagccggtcgccggggcggcgcgcggacgtcgtccccgccgcggggagctccgaaaccggcgagcgaggggcgaggcagcatcctggcaagatggtgtcggtcccggccagggagaaggggcgcgcgcagtcgcccgtgaaggctgcttcgtctggcaagagatacccatcgccaaggtcgaactcgcccgcgagggcagcggcctcggggaacgagaatgccggggtgcagtcgacgcacgggccgtcgctgagccgcaactcctcgaagaaggccgagcagtcgccattccgtcgcaaccccatggcggaactcgacgagaatgcgctcggcaacaaccaccatcacagcaacggcaagcctgtaaagactgcggagcgggcaaaggatcagatccccagctgccgaacaactgcgaaggagaaggaaattgtggaggaggccgtggcttcggacaccagagcagcgcccgcaaggatgaaggcgacccactcggtgagtattgtggctgagaacgtcaccaatccgaggccggggagccggtcgtcgaggcggtcctcgcgtgacttcgagcacaacgacaacacctacgcatccctgctactggaggacatccaaaactaccaccagcagagcgccagcgctgccaccgccactgccactccagcgccgaccttggcgctcccagcgtgcgtgtcgaatgccttctcgatccttgaagctgtcgccaacctcaactcctcgtcgcccgacaacaagagcttcgagctggagaggtcggtcaacgacaaggaatccttcgtcaacgggaggtacggcggcaatggtgcgagcaccaccctcgtggtggagtcggaggtcggcgtgaaggacgacctcatggagccgagcatgcacaagtacgtctccgtgcgtgacatccgtggggagaggagggagaccgagccgcaggagtctgcggggagcaacagctttgccagtgacgcctggacgtgctcgtgggagcccaagtccgttgactccacagaccggaccaggagtaggacggcctcgaagtcgtacaacggtgacaaggtggagcagtcgtggcagagcaagcagaagctgtcgtcatcccaggagcccagccaccgtggttctactagcaatgtttatgcttagcgtccagctaaatatcgagagtgtattgcttccaatcgtacttcgttttagttttgtttacggtgcaacagtttttgttgtcaactctttcttggaattccatcatcaaaactaatcaaaattgcgttcatagttcagttgattagagcatccacctcgaagtcccctggacctccgagaccgcaggcatcagggccctttcttcgagactcttcaaggaccaccttgaaagcaagaagagataaacctaaagagaaaatctcacctaaataaaacctta

SEQ ID NO: 33527 - DNA, 1964 bp, Zea Mays
atgaatctttattgcaggaccagcggatgtcaagaggtcgtggtggtcgaggtaaagcaagaggtggtggccgtggtttttccagaggtggaaagcagcgtaattaccatgaagatagcaacaacacccaaaatcgcaccccaaaggtagtgagagggcgaggacctcgacgttatgaagctgctgcaaggaacaacagagaggttgttggatcccaacgaaaacactagatttcgagaatctgctccaaatgctgtagcagccagagattccgggcaagtttcacatgcacagccagaggctgcccctcccaaaaggaatgtcatgagttcaagcctaaattctgcgtccccacctttttatccctccagtgcatctactcaagattttccggtagcagctcaaacgagggacatacaagcaggaggttctaataagatccctccatcttccatgaagatggatgataactcaaagctacaatctggttcaatggttagagggagaatagccatggattatggtgggcgtgataagttacttgctgatggtcctattaggtcatcccaaggaagggcaccaacggcgtcactgaattcaggattcacatcatcatctgttaatcctggccaatcccctattgcgagggcttcagggggcaattcaaacatcggaatatcttcaaataatcagccacaaagtcatggatcagtgatgcaccaaaagttagggcaagtgcagaatcagtctgcaacaagaatcccaactcagcaattgagtcatcggactagtaatttgtcaccagtggctcagcatctacctggtaaatcaggagaaagtggcgagaatggttcataccctactctgaatgattcaaagacagcttctgcggtggtaaaagtcaatagccaggaaactgggatgagttcatttatgtatggtggcacccaggttattggggctgcgggcctttcccagggcgatcaaaattttcctggcactccagctctgctgccagtgatgcaatttgggagtcagcatcctggtggtcttggagttcctactgttggtatggccctccctggctatgtagctcaacagcagatgggaatgggaaacaacgaaatgacatggttgccattattggctggtgcagcaggtgcttttggaggatcatatccaccctatatagcccttgatccgagcttttactctagatcttcaggacagacatcatcatcagttccatccagggaacctagtactaatagagggtcaaaatatcctcaaaatgatattgggaatgaggagcttgatgagcgccagaacaagcctagaagatactcagagatgaacttcagccagtgaagcatcttgtaaggtgaactgcatctgaataagctggttatggtcttatgcctgttcgtggagtgttatctgatgggtcacttcacagcagagcagggggtggaattcgttacttgaattatagtattgctcggttgtgctgcgtctggaaatgtcaaatttgttgctgcgtctgaagacgtggacggttgctgaagagagcttgaaaataatggtttgcgttggttgataaagtttaagagttttttttttaaagtacatcctgttagtgactccagttggtggcagtgtactctgatgtatcgggtccgcatatagtggctgctaagaccaagcggcttcattgccgaagcttgtatattttggaatccgttgagtgcggtttgtgacaattttcagcttgcatgagcgtgtccaacatggattttttttttgaaaagccaacaagaggaatccgcccgtctttttatccccgggtgatagaaatttctatttcatggtgaaaagctacgattgtcatattctgtaattgtggaatgaaccgcatgccatcttactgaagctagaaatgagtagttttaactataaaaccttcg

SEQ ID NO: 33528 - DNA, 468 bp, Zea Mays
gggtggtctctcaacgaacaggtccttacggagaggtactcgggaaacagcccgagtccccttaaatgccacgagtatatcatcatatcgagaataaaatcgtagtatcatcattgtatctcatcatgttcattgattaaagtaaagcgctagcatgtagctaaccatagtaacccaaaaggtaaatcaaggacaaggtaaatagaaagctagtaaatccttaggtttcaattaagtagtgcgggacagtgaattataaacagataggacataatgggtcagaggacacttgccttcaccaaactgatgctcaggtcttcaatctcgtggaactcaaagaactggatcacttggttgcccacgcttgatctttgattcctcgaagctcgaaaacggatcgcaatctattcgcgacgcaaagcgaagacaaacaggcacaagcaaacaaatatatatatgcataagaac

SEQ ID NO: 33529 - DNA, 1682 bp, Zea Mays
gccttacacttcctattccacatccgccagctcctgaacgtcttcctcccttgccatctccacaccttcatcagtgctggcgtctgctttatgtgtaacatctgccccctgcagaattggcttgtccccaagcaatggcatctggaaaacgctgacgaaggacatggtaatcttcccaagtagttgcttcttttggcaccgaactctagcgaaccagcacatgaggaattgcacgattacccttcttgaccagccgacgatcgactatctccaatggaaccagttcatacttgctgagccaataaaggtagatccaaacgataagcaacaggtgttccagcactttgtatgggccaaaaaatttgaacgcgagcttgggacagggtcggttcaccaccgaatgctgagcatatggttgcaacttgagcaaaaccaaatcccccacttggaactaccgctcagaccgcaatcgatccgctttgagtttcatcctgttctgagcaacagccaactggtctttcaacatctcagtaaagtgagcacgctcaaccaacacctgggccactgaattatcagtatcagatggaataagaggggcaacaacaaatggtggatcatagccgtacaaggccttgaatggagaccaatccagggaagtatggtatgatgtattgtaccagaattcagccagcgataaccatgccttccacttgtgaggttgagcatagacaacacatctcaagtacatctctacacattgattgaccctttcgctctatccatccgtttgaggatgatacgcagtgctcaagttcaacttagtacccaagagtttaaacaaccgagtccaaaagagactagtgaaaatcttatctctatcactcacaatagactgtagtaagccatgaagtttgaccacattgtccagtaacaactgagcaacctgagccgcagtaaacgagtgcttgagagccaaaaaatgtgcatatttggaaaaccgatccaccaccactaaaattgtgtcatacccatatgatttcggtaacttctcgataaaatccatcgtaatatccctccaagctccttgtggtactggcaacggctgaagcagccctgctggatgaatccactcccctttggcctgctgacaaacttggcattgccgcacaaaatcttccacatctcctttcatcccttccaccaaaataatttcttcaaccgttgataggtagcatgaatgccagaatgcccgcctaacgcattgtcatgcaaagctaccacgatcttggtacgcaaagcagagttgttgcccaaccatatacggtgctcctttcggatcaccacttgagatagcgagaaaccatgttcatctagactgtgcactgacagctgagctaacaaggtttgtgcctccccatcagtgacatacgagtttaacacctcctgcaaccaaactagctgaacaacactgaccactgaaatagccatacaatatccaacacgagaaagcgcatcagccaccttgttttccttaccctgcttatacaccacccgaaactgcatacccatcaacttagacatggctttacgctgcaactcagaatgtaactcctgattgcctagaaaactaagggatcgatgatctgttcgaatttcaaactccaccctttgtaggtaatgac

SEQ ID NO: 33530 - DNA, 387 bp, Zea Mays
ctgacacctggccgtcgttgctcctatgtgcgcgcgtgcccaggttccagctcgctccaaaaaaaatctcgtcgtcattccgtgtgccatcatgaaatcccgagatttgggtgaagaagcgattctcgcgtggcgctcgtcaaatattcgacgatctgcttaaacatgtgatcgtcgtagtttctgcaattccaagtcgaatttaggtatgcttattaatcacgagatgtggaggacaagagtcaagtcgaccccaagtgcgggctactccgcatggtgatgctgatgaatcaacctgaagatggttaaataaagcaagtgctcggtcgaagaatactcatcaagcggacgtcacctaaccaacactaacctagtgttactcaggca

SEQ ID NO: 33531 - DNA, 1029 bp, Zea Mays
atttgccctgtttggaaggcggatccgtgggggcatcagcccaccccgagcccagcttccgcgtggaaagacgccctgcctctggacgtcggacaaccatcgctccgattgtctcgtctattcctcatctcgtggatggtggcggcgtcctatctctgttgctgttgatgatttcttgaacgcacgacgaacgcgagctatgtcgaaccctaccaaatcacagccatgtcaaaggaaggtgcaagggcgtcctggaactcaacatatgagaagggtttagtcgatgtactacatgacaacaaagataacccaaagttgaagggtcaaaatggatggaattcagagggatggaagtgtatcactgctaagtttaatgaaaggttctctttggctcatttcacaaaacaacaattacaagagaaggacaaagaacttaaatcaagttataaagcagtaagagattcaagaaaagaaagttggactggttggaatgactccctatgtatgatattagctgaaccagaggtttgggcaaggttgattagtgctcacccaaaggttgcaaggtttcgcaagaagccatttcctcttttctactctttagaagcactttatgaaggtgagtgtcaacaaagaaccacaatgttcgaagaatgtggctaaagcacaaaatcagagtgctaagtggaagcaacacttgaagctgacatggagaagaaaaatggaacaacaatccacatgaagcttgtaaaaaagaagttaaactaataatttattctagtgtcaaagttcataatgactggacttgtactctgttattatgctataataatttgttgaatattagatgatcatgtcatgtgctgttttttttacatttttagtgatgtttcattgtgtttttgtttttctaaatatttcctatttttctttgatttttatgattttttgaagaattttgtctccagagaggtttttagccccttgtttgccaaacagtgagtgacaggaaaatacattaaagtggga

SEQ ID NO: 33532 - DNA, 2361 bp, Zea Mays
acctttctcaaccccatctctctctcgcgtctatctcctcccttagtgccgcccgccatcatcgcccccgccgcacccgcccacgccgcgcccgctcccggcctcggccccgtccgccgtggaggcccccgccgcgcccgcccccggcactagccccgtccgccatggaagcccccgccgtacccacccctggccccgtccgccatggacgcccgtgcccgcccccggcctcgtccgccatggacgcccccgcactggccgcatccgccatggaagccctcgccgcgcccgcccctggccccgaccccgtccgccgtggagtggatttggaatttgaccccgctgtcgtgctcgcacgtacatgatgcctctaaaccagagccatctgctgcaggtatggtgtacatttctgcccccgccagtgaactctacgattttctgtatcgaaatttgttcgagtctctggagcgtgaatcatgtgttcttttccggcttaccatggtgcctgtgttgttcaggaggagtgctgaatttcttttgattgcagggggaaatgaacgaaccgatcaacaaccctcatttgattagtacttcattcaatctattattactgttactgagttcaggactcaggtagcagtcgatgccacattgttagattgcgatctgcaaaaacgctactgattcataaataaaatcgacccagcatgtacacacgcacagcttcaggctggtccaagcaaaaactgcattcatgtttttgcttgtacactgcaccgtactcatattggttttagcagtaagagcgtgcttatgggtgcaaaatgtcatagtgaaagatgttttattgcattgcatttagttaataacatgtcattcaaagttttgtggtaaaatttcttctgacctggatatggcgcggaaaatttgaacggtcctatgggagaattataccagaaaagagaagggtatgcgttactagtagcttcccccaaactgctggcgctatgatcaaaatgtgctttcccaatttagccactgcatgttgcctcataatttctagtttttcgatatctgacaatgccctgaccgccgcggaatgtcacgccaccggacaccgacatctactccattccgagggttcttgccccgatgccgtagaagtacgcgaggtgcacgaagaaaaactttggccgttaccacgtgagcgagccaccagttgagcatttgcgcgattcactgtacaagacagagagggatgtcatgaaggtatgctgggatcttctttttttcctgatctcttgactccccctattttgcttctccctgctaaatgtcaagatggaatctactttgcaagttactacccctatctagcacttacgtgtaggctactgtgcttgtgtgaagttgatttagtcaagcatcttataaagcatttcgtagagctttgagttcatcatcatgaagcagtttattttcagaatttttctattgtttgttgtcctagttttgtaaattctgtagaccctaaaacaggaatattcaaacagtgaagcaccctcttagatcagagaaacaagacacattgcagtctatgttaagggtgtggcactataacaacattatattgggcgagccagcctgcaccgtagtgagaatttactagtaaataatcccagatttcatgtatctttgtttgtctgaaggccctaggtctcattttgttccaaaatgtcccagtcagctgaaatagaaatatccacctatgcttctgtattaccctactttgatagcttctgttaaggtcagtttaaatttgatactgccctggaaggtgagctacgactgttaatgcatactccctccggtgtcctattagttgtagttttggaccatatttgagtcaaacttataaaactttgatgtactatgctcgaatccaggtgattagtccagctatgtttggtagtgaagggcgatgtccagagagtaagaatgaggcgacacagtatggactcgatatgactgagcaataatatcttgagcattcgattccatggatagctgccaatgatgttgtacatttatattagacccctccagctaccttgtcgatgcatgaacaagaagacaggttagactttgttgaaaccctcttcactagtggaggtatcgaccatcactcgtcattgtaacccgatggtgatcgacgaccatgagcttccatgttattgcgttctgatacttgagacttttattatgactatgtataagatattttctcttattagtactggatgatgagatgtgtcttattatgactatggatgagacttttgtgatgtaattgatgagact

SEQ ID NO: 33533 - DNA, 2906 bp, Zea Mays
caaaaaattcgggtccagtgttcagtgggcggcgacggcggttctctaaggtcgactccggcggaaggatttggacctcgccaccatcgttgattcgtcggatccgcggtccagaggagaaggcctgagccaagtgcatgattgacataaaggacaatgttccatgagtgggaggtgccgagctggtgaagtttcagtgcccttcttacaagataagcgaattattgttggccacctatttatagtttctgtttcttctagttgtagttcttgagaaggctcttagatatatattctttaagtttagtgcatttatccggatattcacaaattcaatttgtaattgaattcaccaatcaatcaccactgtatcttcagagaaagacatccccgcacacatacaatgaagagaaattgtctaagttagtgactctcagctagggctagaaacgagccgagctcggctcggtgcggcttggtgcctgaacgagctgggctcggctcgtccattccacgagctggcgaaagaggctcggctcgaccttgactcgcgagccatattctggtacttatcgttgcattatttggtgaattaacattatataaatttgaaatatagaatcatcattgaacattatgagtaaattaaattataacttgtaatatattcatcatcgaagactaaaaaatgagctattatctataaaattatctaatattcattattatttcataaattgatcatttttgcaaggctcgcgagccggaacaagccggctcggctcggctcgctgcaaaaacgagctcaaagaaggggctcggctcggctcgttcgaggctcgcgagccgctccgagccgagccgctccgagctcgagccggctcgggagcctcgagcttattttctagccctactctcagccaagcaactcgagtgtgtttggttggacgtacaaggagggatcgaagggggtggccacagtttctatagtgtttggataagagtcacgtgggggcgaggtaaacaccgtagtaatttttgatgacggcgtgatccaaaaaaatcgaggggacggtgtcgccctcacctcatcctattttgaccttaaatcaaacacatactaaggaatcatcgaggacatgtgagggtgctcccattgtgcggcagcaaacccctcttccagtttactgcttttttcactattattattgcttctatatgttccaagcacttgtaagcttctgataactgcgaactaatttaaaaccggtaaccgtgaactaacttcaatttcactaccattcattttactcacaagagctcaagttgcaaacccccacaggtgaagctaatgatagctttatatatcgttttcacgttggtcacatttgtgtcttaatgaattaggttttatcctatttgtctctagaactcctctagcagggaggagattttgaagcgaaagtcagcttgtggagcttggttttgacagctgtaacacaagcgctcaagctgttcaaagggaagcataatcgaaacttgtctaatggaaagagagtagaaattgaattgaaccattctatttctgattttgtggctttggcctttttcatgttaacctattgttttcctgtaatcaatgtaacttttcaaacgagctatggtaatagacaaaagagaacatatctggtgtacatggaagtttagtgcacatattaaatcatcagcattcatcttatatctaacgtatgtagttgtttggtatattttactaatcacaccctccaacgtggtggagtgtagtggtggaatgtgttatttataaattgcaataatcaactagagacgttagatataagatgagtggtgatgatttaatatatgcaccatatgtactaagcttccatgtgcactagatatgtcctctagacaaaaatagggaaacattaaacaaaatgtggaggtttgatgtcatttttttaaatgactatctcatttatacgagtctatttagatgatatataaaaaacgtagtaatgcacgaacatctaactagtgatttctaatgcctcatcaatgcctgatatttcaccctgacacaagtttaccttcagtccacaacagttgttagaacaagcataaaagggatatttatagacctctccaaatcagtttgcacccaaaaaaacagtatggtaataaaaagagttgtattggatgtttcaataactggcagcaaaaccatctgcacgggtgcatagtttagtgtaagattcagatcgtgagattggagagcaaagttgtgcagctgttggctaggctaggctggttgatacatgctagattgctagtggaaggaacagttgacttcagcgttcttggtacttcatgacactgacaggctggtctgtttctcctgcctgctgtgcgttaagcatttagaatctgaatcctgcaatttcaagatgatcacatgccttccaaatttcttatgcgttggcaccttaccgaatgctgaacaactattagttgcatgtgcaaatctcatggctagagttggcatgctatcagttaaaggagcaagatccactttattaggatcttatgtctatcgttaaaattaacaggccgataatggaccgaatcatcagcaccttatgatagtttatttttctgaagaaacttcaactgcagcactcccatttcattgattgtttttttttatttagctgtcctccatgttgaacgagatgaaagatggaaagcgaaaattgacagcaggaaaatagacccaaaacatcgatttccagcactagagttgttgtatgatctatctacaaagtgagagtgttcagaagagagactctgctctggatcagcgtcctgaacaaagtcgcaactccgct

SEQ ID NO: 33534 - DNA, 2671 bp, Zea Mays
gcaggctagcagcacacacagtcggagaacgcgcgcacagcagcagcagcacaagagcacacgccctgagatcagggaggaggaagtaagagagaaacgcgcggttggttgctcggcaccacaccgtacgcgcgcgccatggggaactgctgctgcggctccgctgacgccggcacgaagccgccgggtcgtcgtcctactcctaccaaaggaacgccgccgaaggggacgacggcatgggcgccggcgccgaagccgaagccgagcgacgacggcagcagcggggcgaagcagcgagagatgggaggcgacgacgacgacggtgctccgggcccgggcccggtcgtcgggcgggtcctgcaagcgccgaggctgagggagttcacgctcgccgagctgcgggccgccacgcgcgggttcaagccggagatggtgctcggggagggcggcttcggccgggtctacaagggctgggtcgacgagcgcacgctcaacccggccaagagcaacgccggcgtcatcgtcgccgtcaagaagctcaacccggagagcgtccagggcctgcaggagtggcagtcggaggtgaacttcttgggtaggctgtggcatcccaacctggtgaggctgctgggctactgcggcgaggacagggagctgctcctggtgtacgagttcatgtccaagggcagcctggaaaaccacctcttcagaagtaagctaagcatgcagttcgtacgtctctatagctacttttcttgtatacgactgacgaactgcaataatgttatggttttactttttggggattgtgttcccgttcccggtcaccgaccgatcacctgcctaacatagtttgaaaaatataatgcaatgcaagcttgaattttgcattattctggaatcgcatttgacttttgttggatacatgtctagacgaagacacccaattttgactagtttgagcaagtcgtcgcttttgttacaagtcatgcacggtgcactgtttgagattgatgggagagcgtcctgcagtctgacttgcctgtcgatctgagcaggccggggtggaaacttggaggcgctgtcgtggagccggcggctcaagatcgccacgggcgcggcgcgcggcctcgccttcctgcactcgtcggagaagcaggtcatctacagggacttcaaggcgtccaacatcctcctcgactcggatttcactgccaagctgtcggacttcgggctcgccaagaacgggccctccgccgggaagtcgcacgtcacgacccggatcatcggcacctacggctacgcggcgccggagtacgtcgccaccgggcacctgtacgtgaagagcgacgtgtacggcttcggcgtggtgctgctggagctgctgacggggatgcgcgcgcacgacccgaaccgcccgagccaccagcacaacctggtggagtgggcgcggccctacctctccggcgccggcagcaagctcaagaccctcatggaccagcggatcgacggccagtaccacaccaaggccgcgctccgggccgcaaggctcgccggcaagtgcctcacgggcgaccccaagagccggccctccatggacgacgtcgtcgccgcgctcgaggacatcgaggcccttcagcagcaggccgccggggggcaccgggacctgccgccgcggcctggagcgcgccggtctgccgccgtaccatgattcttcacgcggcgcccctgttgatgcagtgcagcatggtcgttgcttggcttgagcaagcctagctgctgattcagacagaacactagcattggttcttcagcttcgttcaactaatcgccggtgttttcattctttactcgattattaatccctcattgttacagcagtatataggttcggtaatgttcttgttggaatcggacaggatgcagggataacgaatgatcacaatcatagcaacatacatgcaggtcccattctgcatttcaacggatgatgagctcgtattgtggccctgtcatcactccagctgctctctgctttgctctgggatatgaagtgacgaaggtagcggtagggcgtccctgttggattaatgtaaactactctggttccaccctctgacctacaatgctgtaaactagcttgttacatgcaacaaacaaactacctgtactgttaagaaactgaactagaagtacaaagtcccatactctgttaccacagagactgtatgcagcagcttactgcatacagactaatcccagttgatgatagggaacaccaacagtcactttgtctccgattctgccacacaaccaccaagcagcaacagacagaagtcactaggcacttgaccattggatgatgacacaagtgtactaggcattaacagatgctgcttgtgcaatgccaacaaattctttacttccaagagagaagggatgcttttactgcatcctgatgagctttgttccattgtcaggacaaatcagtttcacccaaggaaggaacaactgaaaagtacttactggccgttagagtgtaacaagattcttactgttggagtatttgatggcttgtacacatcatcaatacactcaagcaggtttagggttaaaagaacccactctgattcatcatccaagtacttgaggtccacatacatctcctgag

SEQ ID NO: 33535 - DNA, 1041 bp, Zea Mays
tggttctagccactccccactcctcacggctcacgagggtacggcacctcgccgtggcccgcggctgtttccgaggcaagcggactcaccggcgtcctgcgcacgcgaggcgagcagcggctccgtcgacctgcgagccaatccgtctttatttctccaccccaatatccaaacataagataaaaatctatccaacactcatttcccacgccactcccccactccctctccaccctgcttccgttttcggccggcgatggcgacgaccgccgccgcatccacgtcgctccggccgctgtcaccgtccccacctcgcatcgcgagtttgccccgtcggtggtgttggggaatcccggtgcagtcctccgggcggagcgcattccatgctgaacggcggaggcggagcactttattatgcgctgctgataaagctcctgaagaatccctcaagaagaccattgaagtggataggcttattgatatgctgagggacgcaaatcctagagagcttgatcaaatagtggttgaaaatgttctggcattcgacgcaggtttctgggttcgactggcagctagaattgatctctgcaaatcagatgatgataaaaaagattatgaagagctggcggaaaatgtcatgaacattgttgaccggcttgttcacaagactaatcaaaagattgaacaatcaactgatgtgctgaaggcaattattagtcctgcaatgcatgaaggagatgtgaagtggccaccaagagatccagatacactcaaattgatggagaaagaaataacacgccgagaacaagaaggacaacttgatgagggatttctgtcagaagttagtgctcagttgaggctaaacaagacggagataagccagggcttcaggctatgctgcaaaaggtgttgcagttatatgcttctaaatctctccaaaaacgtagttatgcatacaaaggggggcaagttgtagttcctgaaaagtttctcgaatgtgtaatacagggtctgtatttccacgtagagattttcttcgtt

SEQ ID NO: 33536 - DNA, 3831 bp, Zea Mays
ctcgtctcttgggccgccaagaggcagcccgtcgtctctcgctccagcgctgaggccgagtaccgtgccgtggccaatggcgtggccgaggcctcctggctgcgccagctcctccacgagctccacagtcccctccagcgcgccaccctcgtctactgcgacaacgtcagcgcggtctacctctctaccaaccccgtgcagcatcagcgcacgaagcatgtggagatcgacctgcacttcgtccgcgagcgtgtcgctgccggtgacgtccgcgttctcagcgtccccaccacgcttcagttcgccgacatctttaccaaggggttaccgtcgagtgtctttttagacttccgatccagtctcaacatctgtacaggatagagttgtgactgcggggggtgttagactacccgtctagggtttgtgctattccctgtgtaatgaccgttatacccctgtgtaatgggccttggcccagttactctccctatttaataccactcccaacccctgattagggtatgggttcctattctaacaatttctttaacctcgcccgcgtggccgcgtccccgtctctatctgttcctctctcccaactccagtctaatgttctcataggaggagggcgagagaagcgagcgagcgagcgaggaagctggagcaaaacaagccggtggaccaagtattcggtgacgaagctgaggcgaaggagaggaggaagggaagggccacgatcgaagagaattcatttcgtacagtgctaacgactttgatacagaggcataaacaatctagcctaagagaagaacactggaaccatggtttcaaaatcatactcaaatctgctagacctgacctctggagatggatttgactttcgacaaccttttaagtctcttcctcgtgtcgtaacttctcctggtattatatctgacactgattgggatacaataagtgatggtgattcagttggttcagcatcttctactgagaggaaaataatcgttgccaacttccttccgttgaattgtacaagagatgaaactggggtgctttccttctcattggatcatgatgcgcttctcatgcaacttaaagatagtttttcaaatgagactgatgttgtgtatgtgggcagtttgaaggttcaggtagatcctggtgagcaggaccaagttgcacagaagcttcttagagaatatcgatgcatacctacttttctcccatctgacctacagcagcagttctatcatggcttctgtaaacaacaattatggccactttttcattatatgcttccaatttgccttgacaagggtgagctatttgatcgcagcctgtttcaagcttatgtccgagccaacaaactttttgcagataaagttatggaagcaatcaatgcagatgatgacttcgtttgggttcatgattatcatctcatgttgctccctacattcttgaggaagaggttacaccgaataaagattggtttcttccttcacagtccttttccctcctcagaaatctataggactctgcctgtaagggatgaaatcctgaagtcactgcttaatgctgatctcattggtttccaaacatttgactatgcccgccacttcctatcttgctgtagcagattgctaggcctgcattatgagtcaaaacgtggttacattggaatagagtattttggccgaacagtgagcctgaagatcctttccgtgggtgtccatattggtcggcttgaatctgtcttaaaattgcctgctacagttagtaaggttcaagaaattgaacaaaggtataagggcaagatactgatgttaggtgtagatgacatggacatcttcaaagggataagtctgaaatttcttggactggagcttcttctggacagaaacccaaagcttagagagaaggttgtccttgtacaaatcatcaatccagcaagaagcacagggaaggacgtgcaagaagctattacagaagctgtctctgtggctgaaaggattaatacaaattatggttcttcaagttacaagcctgttgtcctaattgatcaccacataccattttatgaaaagattgcattctatgctgcgtctgattgctgtattgtaaatgctgtgagggatggcatgaacttagtaccatatgagtatactgtttgccgacagggaaatgaggagattgataaactcagaggtcttggcaaagacacccatcacacaagcacacttattgtttcggagtttgtgggttgctccccatctcttagtggtgctttcagggtaaatccttggagtgtcgatgatgtggcggatgccttgtgccgtgcaactgatttgactgaatccgagaaacggctgcggcatgaaaagcattatcgctatgtcagtactcatgatgttgcttactgggcacgcagctttgctcaagatctggaaagagcatgcaaagatcattatagcagaaggtgttgggcgattggattcggtctgaattttagagttattgctctttctcctggcttcagaaagctgtcgtcagagcactttgtttcttcttataacaaggcttctagaagagcaatatttcttgattacgatggcacacttgtgccccagtcatcaatcaacaaagctccaagtgaagaagtcatttccgttcttaacaccttatgtaatgatccaaagaacattgtgtttatagtaagtggacgaggacgtgattcccttgatgagtggttttctccgtgtgagaagcttggtctagcggcagaacatggctattttatcagatggagcaaggaagccgcatgggagtcaagctattcaaggccgcagcaagaatggaagcacattgccgaacctgtgatgcaggtatacacagagacaacagatggatcttcaatcgagtcaaaggaaagcgccctagtatggcactatttggacgcggaccatgatttcggttccttccaagcaaaggagctacaaggtcatcttgagagggtgctatcgaatgagcctgttgttgtgaagtgtggtcattatattgtagaggtgaaaccacagggagttagcaaggggcttgctgtcaacaagctgattcacacactggtcaagaacgggaaggcaccggatttcctgatgtgcgtcggcaacgacagatctgatgaggacatgtttgaaagcatcaacggtatgacctccaacgctgtcttatcacccacaatgccggagctgtttgcctgttcagtcggtcagaagcccagcaaagcaaaatattatgtggacgacaccagcgaagtaatcagattgctcaagaatgtaacccgcatcccctcgcagcggcaggatgtcagtgccagccatgggcgtgtgaccttcagaggcgtgctcgattacgtggactaggcaccaccacttagttactcgaaaaattattagctgggaagcatgtaaattccaccgtcttctgcctctcaatggttcattctaggagggtgtgttaatccagaattgtagtgtagcctacatgaatcgtcaccattacacaaacagcgtaaatgtgttcgccgtttcagggttcaggtgatgtgtgtaggcaattttggtagggaaggggggagctgctgctggaggttcgcggtgtgaaagggaggcctcttgttcaaacagtaattggttgtctgaatctgttctcctgctgctatattgatgatcgtgttagttctaaaatttatctgtgggtgaattgcagcacagcattagcgcttgactcgattcatgggcttgtttttcacgaagaagaggacgttcttcgttc

SEQ ID NO: 33537 - DNA, 1673 bp, Zea Mays
gcgaaggaccgccgccgccccttcacggaacccgcggccgactccccctccgccttccccgctcgtccgcttctccgccgtccgctcctccactgcatggcctccacccctccgaccctgcacctcggctcctccacccttcggccccacgcctcggctgctccgctcgtccagccttcggccccacgcgcaccgcggccgccgtatctcccgtcatctgatcacccacaacggtgatgtggacgacgtggtgcgtcttggaggcagttccatttctggcgttacggtgagggaatgccacaacgtggtggacgccactgccgtggcgctcccgttgcaggccggagtctggacgcctaagcttcttgttttgctgggtttggtgcaagtggcccatatgttgcgcagaggagcactggtgaagcctaagaaccctttatgtcgatgggggcggtctcgagggaggtgtcgtcagcatgtgagaggctctgcttcatttgcccatcactgcggacgaggtcccgccatccagtcaagcgctacaagaagttgcttgcagaaatcttccctcggacacaggatgaaggaccaaatgatcgcaagatagggaaactgtgcgaatatatttcaaggaatcctatgcgtgttccaaagattacagtttacttagagcaaaaatgctacaaggaatttagggctgagcgctatggttcagtgaaagttgttatggcaatctatcgaaaggtgatatgttcttgtcaggagcagttgccactttttgccaacagcttgctaacaattgtagagacattattggagcaaaatagacaggatgacttgcggaaattagcatgtcaaacactttttgactttataaatagtcaggttgacagtacttacatgttcaatttagaaaaccagattcctaaactatgtcatctggcccaagagatgggtgaaaaggagaagatatgcattcttcatgcagctgggctacaagctctttcatctatgatttggtttatgggtgagcactcccatatgtctgcagagcttgataatttctggaaaattatgagagcccatatgcaaatgctgataatgatgctgctgttgaggatattcgaactcagtgggtggatgaagtgctcaaagccgaaggtcatgaacctcctgctgttaccattttgaccagggttccttcatggaaagttattagagctgttcatggtgaattaagtttgacaatagaagaatcaacaagcccaaatttttggtcagggatttgtctacataaccttgctagaatatccagggaaacaacaacaacgcgacgagttctggaagctatatttcgttattttgataataacaatctatggtcaccttctaaaggatttgcgctgtgtgtcctgctggatatgcagattgtgatggagaaatctggacagaatgctcatatattgttgtctatgttagtcaagcatcttgaacacaagaatgtattgaaacaaccagatatgaatctagatatcattgaagttacttcacgccttgctgaacactccaaagctcagtcttctatagcactaatgtcttcaataagtgatatggtcaggcatatgggtaaaagcatgcaatccttggccagtgatgcaggtcctggagacaac

SEQ ID NO: 33538 - DNA, 8214 bp, Zea Mays
tacatagagcctatccattccaccgagggagaaatggaccaactcataggttttcgatccgacgaccacgtccttcacacggagttgcttcgccttgacgcaccctccgcgatcacgctgcgtgccgcagccagttccctccggaaccgccaccgccgagttttgaggcccaaactctggtgggtttgaggcccaaaccaccaaacctgccgtgagcaccgcacttcgtgcacgtcctccacgatcagacgcgtgtcccgccagtccctgaccacaccggcaacatggtccattccaccacgtcctcgcataagtgtgtgtcacaggtgtcagccaccacgattggtcaattgactgctttgatccgccagtcaagacccatcactcgtcccttcaccgctccgggtccatcagtacgagcccgcatgactttcacctcagtcgtcgaccaccgttcctgtgctccacacctgcacaccacaagtcgaccgacatggttgcacaagcataatctcacactctggactaacatgcaaatacggcgcaaatctatggtgcaatgtggaaaagcgttggtcggtaagggcccgataaaatgagacctcctctcctccgggagagggatagagtgcgtccgtcttcgttccttgccccccttccttcagaagagcgaggccgcggtcgcggaggaggctttacgaacaaacgagccattagtccccaaaagccaacacacaaacccaggcgatagcgagcgcgcccgcgaaggctacgacgcgagagcgcgcgaggtgtggagcccccaatcccggaagcttccttggccgcgcgcagggcgcgggagtgggagctcgccgccggttaccgagccctctccgccgcggatctcccgatctgagacgccactcgtcaattccccgcagggttttgcggtgccagcgacggacatgagcgtggagagcccaggggagctagggttctgaagcgcaccgtggggcacagcgtggcgaacgacggcccccgacatcctgctaggttttccatgggagatgggggagtcgcgtgcgccgtccgctcagtcgagagcttccgtgccggcgccctcgtgaggagaggaggagcgggagaagcgatgccggacaagggggagagggcccatggccaccgccaccagcaccagcactggaagaaccagcagtcggcgacagctgctgacctggaggagggggagctgcttaatggggaggccgggaccaatgggttgcccgagaggagcatgccacctaagaagtggaggaaggtgctggcagcctccgcagctgctgtggaggtggagcctggggagattgtgagtacaaagcaagcagtgccattgaagaaggaaagaagaaacggggacgttgagaaggtagagctgctgccagagaggcagaggaaggaaaagtcttctgggaagagcaccaggaagtctatcaaggatgatgtggagccaggggagattgcactgccaggaaaaaggcgggatgccaagtcccaactggcccatgataacagcaggaggccaagttcgtctgcccagaaaggctccttgcgggattctgatgaagaacctggtgaaattaagccagagagcggcatcagtggcagtgtaaggaagaaccggccaacagagcctcatagcagtaaccacaagcaccacactgacacctctgaccagtcaggatcaaaacatcgcaggaagggagaaggaaagagttcatctgctgccagacatttgtctgggagaattcgtgaggtctcgccaccaacacgggatcggcgtgataagcacgagaggagcccaggcatcttgggccgttttcctcatgaccgttttcgtcatgacaggtatgacaggagcccgagccgcttggagcgttccccacatcgcactcgccactatgatagcagagaccgcagtccatatatttcacctcgacatagagctcgtccgccccaattcagggataacacaccaagtcgtgttgataattcccctcgtgggagggtccagcatgaagatatcagagaccgtagcccatttcgtcatgacaggtcgccttctgaacgttgtcgtcctactgacacgcatgaagcaagcaagaagagcagaagtagcaacaactcagagaagtcacatcacaaaagcaaatcagcgaagcaatcttcaaaaatcaagagtggtagcaatgggaagaatgaggagaaaatctccaaagaaaagcacactgaaagcagtcagtacactgaactgccaccaccacctcctcttcctctaccaccgccaccaccaccgccgccgccaccgccacccctgccgcctgctgtaccacctccattgcctccatcaccagaacctgagccacctggagttctagccgaggatatgatagaagacatggatatctgtgacaccccacctcacactagtgcagtacctgaacccacagaaccaatttgtgatatagggaggtggttttaccttgatcacttcggtatcgagcaaggaccttccaaacttgctgagctgaagaagctggtgcaagatggatatcttctttctgaccatctgataaaacatgctgatagcaaccgatgggtgactgtagagaatgcagcttcaccactggtgccatctgatttcccctctttatattcggacacttcaacacagttggtcaacccaccagaagccccaggaaatttgctcgatgaagctctagaggaggcttctaacttggcatcaggagctgaggataaacaaatggaggaaacgtctgcagaagatagtgaagaattctgcattgatgatagggttgaagcactgatggatggatcaattttggtgcatggccaggagctcgagatcattggagagcttttaggtgcagattttcagcctgctgattggcaaagatggagtcgtcgtgaagattttactaggctcaatgtgcacactgaagtaaacaatgaaatcaatggaggcacagaaaatagagcaacagatgcttatggtcttgtttctgtggagaagaactttcatcataacgctgagtctagcgaatggttttctggtagatggtcttgcaaaggtggtgactggaggagaaatgacgaactaagccaagatactccattcaggaaaaaacttgttctcaatgaagggtatcctctgtgtcaaatgccaaaaggtagctgtgaggatccacgccggccctgcaaggatgagttgtactaccctgtacgtgctaaaaagtatgaactgccattgtgggcattctcattgacagaagaagatattgatagtgttaatgacaccactaaaagcggtgttgtgcctgggaggccaggtcagaccagacagccttctaggggagtgaagggcatgatgctttcagtggttaggataaattctcgtgttgttaaagatcaatcatctgttgaaccccatacaaaacccagaggaactgatcgaccactgtcgaggtcttcacgctcccattcaattggagctgagagaagttctgtccatgaaggttcgtctcatttcaggaagcaccatgaccatgattcacaaagttcgcacaagtccaagcctgttccaaacattccaaaggaccgtgtatgcactgttgatgagctgtcagtttatcggggtgactggtattaccttgatggcactgggcatgagcatggtccattttcttattctgaattgcaagaattagttaaaaatggcactatcattgaacaaagtagtgtgttccgtaagattgataacacatggtttccagttcttaaggatttaaaacctggaagctctgttcccagtgcagcacgaagctcaagttttactgctgctcttatgctcccagaccaatataattttggtgtgaaccaaggatcaggtagcttcaatcagttgcacccccagtttgtgggttatacacgtggtaaattacatgaactagtcatgaaatatttcaagagcagggaacttactttagctataaatgaggtcttggatccctggatctcagcaaagcagccaaaaaaagagtttgaagcatacttctcccacaattcagcatctagaaatttgctgccagaagatggtgggtctgcaaaaaaggcaaagttgctacctgatcagagtgatgaagatattcatttgtcacaagacattcttgccagtcggaaggaggacatctgttttgacgagctatgtgatgcagaaccttctgttgataatgattctctgaatcccggagcaggaaatgaaacctggggtctactaaacggccatgtgttagcaagaatcttccattttatgagggcagatgtgaaagcacttatttcttctgcagctacctgtaggagctggaatgctgctgtgaagtattacagaaacatgtgtagattcattgatctgtcttctgttggccctctttgcactgattctgtgttttgtgatattatggctggttatgagaagcaaaatattaggacccttattttagctggttgttcgaatcttagttcgcatgcccttggcagagtacttgagcagcttccacaaatatcttatgttgacatccatggttgcggtcatctaggggatctgaaaaataaatttcagcatgtaaaatggatcaggagctcattgaatccagaggagtcatatcggaaaattaaaaccttgaagcagataggtgatgggaacaactacgcatccaaagttgcaaggaacttcaccaatcatctggatggttctgatgagcttgatgggtattttgctgatatttcaaatagagagaatgctaacctttcatttggacaaggtttctataaacgatcaaaattgcttgatgctagaaagtcctctgcggttttgtcgagggatgcagaaatgaggcggttgatgcagagacaggcagagaccagttacagaaagatggaagagttcatcataaacagactgagagaaattatgaggagcaacagatttgattttttcattccaaaggtttccaagattgaaggtaggctaaaaaacgggtattatgctcgccatggctttcgtaccatcaagcatgacatccgtaccatgtgccaagatgcattgagatataaagatggcaatgattcgggagatataaagcaaattgttgtctccttcatacagctagcaaagagactagggaacccaaggtacatttctgatagatatggagcaggagcccaggacagcctggacattaatcaatattcatttgatactaaactcaaaaagaagcaaaataaaataagaggagcaaattcattggctgctggagcagataattcatctcgtgcatttgaccttgaaatcaaaagaagcctatctaaattaaagaaaaaggatgtctactctggtagcgaaacatctgatgatgatgatggctactctgaagttgatgaaactgagagcgaaactactgtttctgatactgagagtgaccttgatgtaaattctggagcctgggatttaaaaggaaacagtctaaagttaattgaacctggggaatctgtgaccgatgatcgtatattgggtgcccgcatgacaaaggccagccttgttcctccagttactaggaagtatgaagttatcgaggagtaccttattgtagcagatttggaggaagtacagcgaaaaatgagagttgctttacctgatgactattctgagaagttgctgtcacagaagaatggcaccgaaaacttggaacttccagaggttaaggattatcaaccccgaaaagtagcaggagatgaaattcttgagcaagaagtatatggcatagatccatacacacacaatctactgagtgacattatgcctgctgatcttgagttgtcacctactgacaagcatatctttattgaggagttgcttctgaatacattgaataagcaagttaggcatttcactggttcgggaaatacccctatgacttacaaccttaggcctgtcattgaagagatccaaaggtctgcagaggataatggtgatagacgaacttcaaagatgtgcttggggatgctaaagaccatgagaaatcgctctgaacagaacttcgttgcttatagaaagggtctcggtgttgtttgcaacaaaaaaggtggatttggtgtagatgactttgttgtagagttctttggggaggtttacccttcttggagatggtatgaaaagcaagatggtattaaacatatacaaaacaacagtgaagatcaagctcctgagttttacaacattatgttagaaaggccaaagggagacggagatggatatgacttggtttttgttgatgcgatgcacaaggccaactacgctagtagaatctgccactcctgcaacccaaactgcgaagcaaaagtgacagcagtgaatggtaaataccagattggagtttacacacttcgaccaattgcagaaggcgaggaaatcacttttgattacaattctgtaactgagaagagcatgaagcatcagtctgcctctgtggaagtcaagtatgccgtggcagctatttgaatttttctggtgaaggagcctttgagaaggtattaatggaattccatggtgtgctcgataggcatagcctgctgctacaggcttgtgaaacagactctgtctctcaacaagacttaattgacttgggtagagctggtcttggtacctgtttgcttgctggtttgcctggatggcttgttgcttacacagctcacctggtgcggtttatataccttgagagacagaaactccctgatgagatcttaaggcacaatgtggatgagaagcgccagttccttatagaaataaacatggattctgagaagaatgatgctgaggttcaggcagagggagtattaaattcaagattacaacaaatagtgcatacacttgacaaggtgagatatgttatgagatgcatatttggagacccaaagaatgctcctcctcctcttgtaaggttgtctgggaaaagtctggtatctgccatctggaaaggggacagttcaatagttgctgaactcattcagtcgatggaacctcatgttgaagaagaggtacttagtgatctgaaggccaaaatccgtgctcatgatccgtcagagtctgaagatattgagggaggcatccggaattctctcttgtggctgcgtgatgaattgcgaactctttcatgcacttacaagtgccgtcatgatgctgctgcagatttgattcatttgtatgcttatacaaagtgcttcttccgagtccgggattataagacagtaaaatctccaccagttcatatcagtccgcttgacttaggccccaaatatgctgataaactgggaccaggctttcaggagtactgcaagacatacccagaaaattattgcttagcccagcttatctattggtatagccagaattcagaacctgaatctagattaacaagagctagaaaaggttgcatgtcgttgccagatgtctcatccttctatgtgaagtctgcaaaaccatcacaagagcgagcttatggaaacagaactgtgagattcatgttatcgcgcatggaaaagcaggcacaaagaccatggccaaaggataggatatgggtgttcaagagtgatccgagattctttggtagtccaatgatggacaccgtgttgaataattccccgcttgacaaggagatggtgcactggctcaagactagaccaaatgttttcctaggctagtaaaaaaggtttgtaggcagataaggtggtatttggttctttctcctttttggagattttagtctacatgattctttttccgactcacaccttggctacctgatcatggggagtttagcttttagatagcagggtagtctcaccacccccatctgtacattcctctctccctactttccttgtagagatgtatctggttaataactgatagattcgtcattgatttgatgtagtgaattttccccataggaatgctccctcttttgtttcatgtaaatgcagaacaatttcaatcttgaattcagtaatgtgttacaggcatgttgcatttctgtggttcagttcgttgtttcaatcaataaaatgttttaggggcttataggtttcattcataggaaa

SEQ ID NO: 33539 - DNA, 1826 bp, Zea Mays
ctctccctctccgctccccattgccgcattgctctccctcggctcggtccctctccggctctccctcacggcctcgcccactgcgccttcgaggagctccgaatcccgatcgcctcggtccccgcgagctcacatggtgggggcgcgcaccagaggctagggttcccagttcccatcattctcctgctgattaaaaccgtggggttttggagagcctgaggctgtggcggcggcaggaatgaacggggaggtggaatgcagcgtgtgccatgcgaaggtgccggtgccgccgccggtgtcgaaagcgtacgacagccaccggagcactgtgtcgtcgcggcaacgtgcgctaaacgtgctcctcgtctccggcgactgcgtccttgccggcctccagcctatattagtgtacatctcaaaagtggatgggaaattcaaatttagcccaatcagcgtgaatttcttgacagagattacaaaaattatgtttaccattgtaatgctattcatccaggctagacgtctaaaggtgggagacaagccactttttacagtttcaatatttatgcaggctgctcgcaataatgttcttctttcagtacctgcttttctctatgctatcaacaactatttgaagttcataatgcagttatattttaatcctgctagcgtgaaaatgctgagtaatctcaaggttctggtaatcgcagtgcttcttaagatgataatgaggaggcgattttccgtaatccaggtaacagttcccgcattggcttcagtttacaacgaaaaggctcttaaaagccagtttgataccagtatttaccttcagaacttgtttctgtatggttatggtgcgatatttaactttattgggcttgttgtcactgctatcatccaagggcccagtagttttaacattctagaaggccactcaaaggccacgatgtttcttatctgcaacaatgctgcacagggcatattatcatcatttttcttcaagtatgcagatacaattttgaagaagtactcatcaacaattgcgactatcttcaccggagtagcctctgctgtgctgtttggccacacactgacgataaattttgttcttggaatttcaatagtaatcatatctatgcatcagtatctttctaaccaaattaaggacgaagtgcctagcagcaaagttgaaatggctgaagctcatgatcacagcagaaaagaacctagttatgtcaacgtgcctgattcaggggcaagtgagtctaaacaccgccatggatctgacgagaggcagccacttcttcccgtatgattttgtagaagaggcgcactgtttcctcaacagagcagcatgtaaagagagtatttttagcgggtatttgacctaattgtctctgaagcaacattggtgccatgctgttggcggggtaaagtatatgcatattcggcggcagtgacgagcttcgtgaagtacactaatagagtaatggtctttggatgaatgagtcgatacctttagcctaatgggtggtaaaactagtgtgataagatcagcgaggaataaagtcaccaccattttttcctgtcttgtgagttggtgagttgatattgatacagccatcagccgtggttctactctctctctctctttctcgcggcaccatgtaaatagaaatatcagttcatttctgatggcgcgtgccacggtgccaaccagagattttattcttgtatgtgcgtgttgcatgagagatactacggcgtgtttactgatcactgagctttgcatgtcttctgaattacagcaaaacgcctaattggta

SEQ ID NO: 33540 - DNA, 1434 bp, Zea Mays
ctttttaatttttgttgatctaactcaaagaaaaatttgcagcccacgataggccggagcctaagagcagcgtgcttttaggattagttgagatttgagaacatgcaatatgctgtgacggtggatgttctgcaaactgtgttttctgtttttggcgctgttaaaaaaatcaccatgtttgagaagaatagtggaatgcagactctaatataatattcagcttgagaaggacctcaaggaacaacaagttgtgcaaggtgcagtggaaaacactttaggggctggttctatcaatttgctattagagaatccaataccaaagcaaattctccttccaacacaccaaatccatatgaacaaggcatctcgattattgggcgaacactatcgaaattcgatgaagataatctgattccatgtttcggatttggagatgcatcaacgcatgatcaagacgtctttgtttctctcctgacgagaaaccttgtaatggatctgaagaaacttttggacaatgcagggaacttgtaccacattttcgtttagctcggaagttgttatgccttgttcatccatttaattgcattgttcatatgtgtttacactaattcttaacaggatcaacaccctttgcaccaatgtgaagcaaagtggtggacaataccaagtcctgttgataattgcagatgggaagttgcaggacgccatggcagccttgccccgctcccccaacagcgcccgcctgcccctttccttgcgcgacgcgagatggatcggtgaatccatggcagcttggcagggtggtctatctcaaagatttttgaaagttgtttcttattatggtctcacgactctgccatataaactggtctgtaagcttgttggtgccaatctcagaaggtttgtgtgctgtcattaaaggaatatccaaattttaactttgttaaactttgttctctggtacaatgtccaggatgctctggaaccttacatgagaaagagaacagttgaacttcactagggtaagcaccatcaagattacgtggatggcttgaataagtagctggctaccagccctctgtatgtatatacaccctggacgatctgataaaagaagcccacaacaatgaaggtggtggcttacctgagggaggtgtgctatagcagattgaaaaggattttggcttgtttactaattttagggaagagtttattcgttcagccttacaactattggggtctggttgggtttggcttgcttgtaagtttctttctattttctttgaagtacagacaccaccggttcaaactaccgatttcctgattgctctttctaaagctaatattctgctggatatttgttgcagtgaagagaaataagagaaagctttcagtagttcatacacgaaacattatctacccacttgcttttgg

SEQ ID NO: 33541 - DNA, 4020 bp, Zea Mays
ggcccaactgcatccggccccggtggcccagcagcctgagccagcgcgcctgtgcatcttcttccagcgtgccgtcgcctgcatcaagcgcggcgcacgcccactcgtcctctcggctctcgtccagacgcccagtcgccctagccataggcccctagccctagcacagcagcacaacagcgccgccccccgcccccggtggcccggccccccgcccgttcacccgcgcaaccgcgccgcgcgacccgcgtccggcggccgcccatcgccagtgccgtgacacgtcactccgacgccgtcgccaccaaatctcctggcaacgcctcacgtcttctagttctaattccagcctcactgctgccatcacctccgcctgctgtgtgtcttccacctcgcgctgccaaagccgacaaaccctagcccaactctccctaccctcgcccatcccactcctttcgtccgattcgtggaggcgacggaggggctaaggcatgacgaccgatgggcagctcagggagtgggtctccgacaagctcatgagcctcttgggctactccaagagcgtcgtcgttcagtacgtcatcaggcttgcgaaggagtgctcttcacccggtgacctcgtgggcaagcttgttgagtttgggttcagctcgtctgcggagacccgcaccttcgcgtcggatgtctacgccaaggttccccgcagggccagcggcatcagtgaagtagtggcaacagattctggaaggaatgtccgtcgacgaacagaagaggaggatgaagaaggtggcatcggcagttctgatgaagagaaagaaatgattagagatcagcaggaaaaggctcagctagaaagaaacatgagagaaagagatgcagctaacacaaggaagttgatggagcgacaattatctaaggaagaacaagaggaacttactaggaaatctcaagcaatggacaacaatgacacatctgatctgagaaaattctcaaggcaagcgtacctgcaaaagcgacgagacaaaaaaattgaggaaattcgtgatgaaattctggaccaccagtacatttttcaggatctgaaactaacagaggcagaagaaaaggagttgagatacaagatgaagatatatgatcttgtcaaggaacatgttgagactcctgatgatgttggtgcgtacaaaatgcctgaagcttatgacatgggcgaaaatgtcaatcaagagaagagattcgctgtggccatgcaacggtacaaagatcctaaggccaatgataaaatgaacccttttgctgaacaggaagcatgggaagaacaccaaataggaaaatcgaaactgcaatttggatccaaagataagaagccgtcttcagatgagtatcagtatgtatttgaagatacgattgattttgttaaatcatcagtcatagaaggaacccagcctgaagatgattcagataaagaagacgttgaagcaaaagatattttgaaaagggagctccaggatgagcgaaagacacttccaattttcaaatttagggatgaactgcttaaggctgtagaagagtatcaggttatcgtcatagtgggtgagactgggtccggtaaaacaacacaaatacctcagttccttcatgagtctggttatactgcaaaaggaaaggttgcatgtactcaacctcgtcgagtagctgccatgagtgttgcagcaagagtatctcaagaaatgggtgttaaacttgggcatgaggttggttactctataagatttgaggattgcacttcagataaaacaattattaagtacatgactgatggaatgcttctaagggagttccttggtgaaccagatttggctagctatagtgttgtcatggttgacgaggctcatgagcgtaccctctccactgatatcttatttggtctagtgaaggatatttctcgttttcgaccagatctgaagttgctcatttctagtgccacccttgatgcagaaaaatttagtgactactttgattcagctcctattttcaagatacctgggaggcgatacccggttgaaattcattatacaaaagctccagaggctgattacatagatgcagcaattgtcactgttttacagatacatgttacccaatcccctggcgatatcctggtgtttctcacaggtcaggaggaaattgaaacagttgatgaaatccttaaacacagaacaaggggcttaggcaccaaaatctcagaattaattatatgtcctatttatgcaaatctgcctaccgagcttcaagctaagatatttgagccaacccctgagggtgcccgtaaggtggttctggccactaatatagcagagacttcattaaccattgatggtataaaatatgttattgatcctggcttttgtaagatcaaatcatacaatccccgcacaggaatggaatctctacttattaatcccatctcaaaagcttcggcaaaccagagggctggaagatctggacgcactggacccggaaaatgcttccgtctatacacgagttacaactacatgcacgacctagaagataatactgttccagagatccaacgaaccaatcttgcgaatgttgtgcttacactcaagagtcttggtattcatgacttggttaactttgacttcatggatccacccccatcagaagccctattaagggctctggaacaactttttgctctcagtgcactcaacagtcgtggggagttgaccaagactggaagaagaatggcagaatttccactggatcctatgttgtcgaagatgatagttgcttcagagaaatataagtgttctgatgagatcatctccattgcctccatgttgtcaattggcaattctatattttatcgtccgaaggacaaacaagttcatgcagataatgcaaggttgaatttccacactggcaatgttggggaccatatagcactactaaatgtgtataattcttggaaagaaacagactattcaactcaatggtgttatgaaaactatatacaggtgcgcagcatgaagagggcaagagatattcgggatcaactagatgggcttatggaaagagttgagattgagatttgctcaaacaccagtgatttagatgctattaaaaaagctataacatcaggtttcttccatcactctgcacggttgcagagggatggtacatataagactgtcaagaaccctcagaccgtgcatatccatcctagttcaggattagcggaggtacgtccgcggtgggtagtgtaccacgaattagttctcacgacgaaagagtttatgcgccaggtgacggaactgaagcctgaatggctggtagagatagcaccacattattaccaactaaaggatgtggaagactccggaacaaagaagttaccgaagggccaaggacgagctgcattgtagctatgatacatgaagtttcgatggatgtattgtgttggactcatcgtaggagcatcataggatgtatataactccttatatcacgaacaggatacaagatgtcacttttcattgccctgcttaggtttcagagtaagctgattgtgaatgtaaattgtgacacgaagacatgcatgtgaaccgctataattgtcacactggagggagcgccggcatgcaactttcgtgtcttccagccgctacgcttgacgatcgttcgcatcctgccgccgtcgcgactattatccaagaaaatgcatatgtgcctttcctcgccggcctcttggatatggatgtatgttgaacaaacgcctatcaagggaaggataaatgagggatgagtatgggattttgaaaaaaagaaatcctgaatctttctgtaaattgggtaagcaaattgagaaaaatggatgggttgggacggaatcgtgagtcttgaatctgaacaactcagggtctttggttgggaccggattatgggccacttgatccgaccaactcgtaaaaaaagtcaggcttgattgtccaaaaaaac

SEQ ID NO: 33542 - DNA, 1350 bp, Zea Mays
ctcgggcagcttctcccgtgcccctcgcgtgcgctctacgactgggcggccgccggcaccctacaccagttgcccaggtctctgtcttcgggaccttccccggcgacgagcatccaccaggtcattgctgagaaggccgagaagagcgacaccctggaaattcacagcaaagtcaggttctacggacgttctatgtgttagtgggccttaatgggcctttccaggcttcaagcaagcctcccgccagacacgttccagattccaggcttcaagcctcccgctagccagccgccagcctgctaccgccgtcggtcgtcctcagccgcccgccaggctgatgacgaggacaaacgatgcaagtggtggtgggaagcttccccggaagcgcttctatcgcgccagggcacacagcaacccgctcagcgactcgcacttcccagtcccaatatcgcctgaagaggtcgatctctcacagcactacccgcggtacttccctgctgacaagggcagcgacggtgaggaggctgcagcgccacaacagatccgcttcgccgatgtggggtgcggatttggcgggttgcttgtagggctctcgcctctcttcccagatacgctcatgattggcatggagctcagggacaaggtaacggagtatgtgaaggagaggattttagctctaagaggggcaaacccaggacagtatgataacatatccgttgtccgcacgaactcgatgaaatacattccaaattacttcagaaaggctcagctcaccaagatgttcttcctgttccccgatccccacttcaaggagaagaaccacaggaggagggttatcagcatgcagctgttagacgaatatgcttacgtgatggaagtgggaggaatcatatataccatcactgatgtcgaggagctcggagagtggatgcggtcgtgtctagagaaacacccgttattcgaaaccgttcctgaggaagagattaaggctgaccctgttttcaaactactgtctactgccaccgaagaaagccagaaggtggcaagaaatggaggacagactttctatgccatcttcaggcggatctccttacaagaagaataagtcgcttagagattataagctagatcgtgttacgtgtgtttgtcagttttatacattttttttttaaaaaaatttagcagtaggtgtacttggtactaaatattgcaatgttgctttgcaaggttctgcagacccagttattttgttcagctttaaaagagtttaccaagacgattgtgttgagtttaccaaaataatattccattgtatagagccatgttcctaatggcatagatgccaggatc

SEQ ID NO: 33543 - DNA, 675 bp, Zea Mays
acctctccacagttagctgaagctcaagaatatttttatcacaatcctgaattttcttgattaactcttcatttctcgactgaatttcagttagaactttcttggtcgtctcatgtgcctgtttctctgataataatattgtgtctctggcagtcgattctgctttaaacctttcaaaaccgcactgaaaagtcactatcacagtgtaatgatgatatcaagaaagaagttcggacacatcatctgaagaaaaagcatcagacctcttgatggtatcttccaattgatttcttatttcctgggactgctgtgactcatgtactaattcatcgattgttttctgggcattggccagttcttctttggtcgttttgttttgttttctttctactgccaacaaagagtctttctctgctgtgcattcttctagtctatgagtaaagaagaaacaaatcctcaagcaaagagcaaatcacaaatgcttgtaacaaatgaaacctaacctgttaagtgaatcctcaagcatattgatttttttagctgaatcctcaaaacttgtcaataagtctcggtttctccctcgtgcttcagttagcgcttttgtagtgcagtcaagattctgctttgtcttaagaagcaaggattcccttgctgttgcatgtttctcaagtctaa

SEQ ID NO: 33544 - DNA, 1903 bp, Zea Mays
aaaaaccatgtaaaaatatatctaaataaaatataaaataaaaggctcgacgtcgtcgtcacctctctcgccgtccacgagtcacggcgggcgggcggcggcggcggccgggggtcccggttgcacacggctcgccaccatgcctgaccccaccaccaaactcccctctccacgcccccgccggcgccgcaggctcttcagcctctgcctcggcacagcgctcctcgcgctcatcgtctccgcgctcgtccacgtcgtcgcccagccgccgggtcccgctcccgcctccgcgcgcttctccgtcatcatagacggaggcagcacgggcacccgggcccacgtcttcgcggcggggcccgacggccgcccggatctggcgcgctccaccgtgatgcgcgtctccccgggcctctcgtccttcgccgccgacccggcgcgggccggggagtccctgaagcctctgttagattttgcgagggataagattggcggcgccgttagggaggcggaggtgcggctcatggccaccgcagggctgcgcctgctcgaggagcgcgcccaggaggcgatcttagcgtcttgtagggacgttctacgagcctctgggttccggttcgaggacgcgtgggccaaggtgatcccaggctcggatgaaggtgtctatgcttgggttgcggcaaattatgctcttggaagacttggaggggatcctaacaaaaccgttggaataattgaacttgggggcgcttcagctcagcttacctttgtttctgatgaagtacttccacccaaactgtcatataattatacttttggtgaaacaacatacactctctataccaacagctttttaaactttggtcaaaatgcagctcaagactcattccatgaaatgctgaggtcaagaggctctttcaaaaatggtacacttgctgatccttgtgctcccagaggatattcacgcaatgaaggtgcttcaaggtcaacattagagaaccagtatgttaataatgggactggaaactttacagagtgcatatcttcttcacaacttttactgcaaaaaggaaaggattagtgccacatgtatctcatataaatgcagaaaagtgccagtatcaacaatgtcacctgggatctacttttgtacctgagctgcgtggatacttcttgggaactgaaaatttatattttacttcaaagttctttggacttaagaagtcttcatcactatctgatttcatgtttgctggagaacaattttgcaaccagcatttgtcgagtcttagaaaaaggcatcctaataggtcagatgaggatttttcacggtattgcttctcgatggcatacattgtggctctactgcatgacagtcttggtgtaccactggatgacaagaggattgagtattcaaaccaggttggagacattcaggttgaatgggctctaggagctttcatcacactgatgcaaaatacgagtttaaagccattacacaccaccgcagaatcaacccatagcaatagaccattgtttgctgtgctgggaatgtttcttttatgtggagtactctttgtatcaagatggaggaagcccaagacgaaaatcatatacgacttagagaaaggccgatacatcataacacgcatcagctgacgctaaatcttgtgcagaagaactatatttatacgacatgaatagatgctgtgttgtgcaacaatgtacgagttcaattctttgtgtttttacctttaggtagcagagctgggtgggtggagcaggaagatagcgcatttgtgcgtatagaagaatgatgtgtagaacaaattgccatgtgttaattgaattatttgatgaataattatagttgctttgttcatctaatgaggtcgatatttctcac

SEQ ID NO: 33545 - DNA, 4275 bp, Zea Mays
ctcatccccacaaccgcatcaatcaatcgctcgcgctagggtttctgcccgcccccatcctggggctccacggccctggctcgatttgctgtgagggtggttgctccgagctcttagccatccgtcgccgctgtagcccactgctgcgggggtgctcgcggctgccgctggtgtcggagactagggttttgggtctgccaggcggaggagggtgcattggttggcgtgcgcatggggatggtgcccaacgggctcctgcccagtgcgtccgccagggtgacgcggcgactggaccccgagcgctgggcggttgctgagggccgcacggcggagttgatcgcgcgcatccagcccaacgcgtactccgaggggcgaaggctggccgtgtaccactacgtgcagcggctcatcatgaactgcctctcctgccaggtttttacctttgggtcagtccctctcaagacttacttacctgatggtgacattgatgtcactgcttttagtaatagtgaagaactaaaggagatttgggcaaatcttgtccgggatgcattggagcgcgaagagaagaatgaaaatgctgaatttcatgtaaaggaagtccaatatattcaggcagaggtcaagattataaagtgtcttgtggaaaacattgttgttgacatctcatttaatcaagttggtggactatgcacactatgttttcttgaagagattgacaacttgatcagcgaaaatcatttattcaagaggagtatcatattaataaaggcatggtgtttctatgagagtcgtattcttggagctcaccatggtcttatatctacttacgcattggagacgcttgttctgtacatatttcatatattcaacaactctttcaccgggcctcttgaggtgttgtaccgcttcttagaatttttcagcaactttgattgggagaaattttgtttgagcttgtggggcccagttcctattagttcacttccagatatgactgcggaacccccacggattgacagtggtgaattgttgctgaacaagtccttcttggatacctgtagttctgcatatggagttgtgcctcacacccaggagaaccacagtcaaccatttatttcaaagcactttaatgttattgatcctttacgtacaaacaacaatcttggaagaagtgtcagtaaaggaaatttctttagaatacgcagtgcttttgcgtatggggcaaaaagacttggaaaattacttgaatgtccaaaagaagatttaattggtgaattaaaccagttcttcacaaatacatggataagacatgggagtggcagtcgtcctgatgtgcctaccccaagtatagttgatgtgcggcctctgaaggttgttccttctgtagtttcaagcagccagagaagtgtaacatcattcaagaaaaaggctgaaaatcctaagctccatgctactcaggataatcttcgtctgaatcaagataatctcactgaagatggtcacatttatactgacccttctcagccaattcacaaaagtgacatacattatcgtaatctaccaagagcagttaatccatctgtttctcatgttcagcaccaaaaaagttacacagcacaaggcagtgctaaggtctctgaacagcttgaaagaaataattcagctggattgatgcaaagtgaaagggataagagagtgccaaatggtctctttgtcaatgacagaaatgggcagaacaggtctagatttgcaagaacccgatcaagtcctgaactcacagactcttctgcagaaggatttcgtggcaggcggactaatgcagttggtatggaaaaatctttgggtgttgattacagcagcagaagaaacatcctggttccagaaatgtctagcaaccacagcactaagtcttcacaggatgaatcagtgtcttccttgaactgtttatctcaccctagtgcagcagcttcggactcaaatagtgtttcaagcagctatcgtgatgataatggttttgtaatgaatgaagaactcccttctgtttctgaatcgtcggatatgcaccatgacgaacaagttctggttaatttaatggaatccgtgaagttgcatggattcaatggacagattcaattgccaatgcaaataccttctcatatgtctgtagcgcatcccccactgttggctccaacatctttttcacaaaagcatttgaccggggttccaccagctaacttaattgggacaccatggttacccaatatgcagttcctccatggatttgttccacctcctatggcccattacatacacaatccaaattttgcaccaaacattgaggatggtactgagactgaaaagcctaatacatcagatgtgaatcatgatgctggcaaaacctggcatgagtatggtgttgggttttctggacagttcgatcctgaagcaagagatcctcacatctatgatattgatggcaaagaacatttgtctttgcctaatggtgtagcaggtgctcccttggaaaggcagatgaaatttacagttgagaataatggtgtagatgatgaaacctatactggcatgttccaaaatcatacaagtagagaagctgctgtagattactctaagaggagtggctatgtaaatgttccttcttcacatgccagttcatccaaaggcaaaactctggattcgagtccatgggatgaaatgactgcacatacaacaagaccaccaagagaaaaatggggaaaaagatctgcctttgcagcacctgccacgaccacacatgtcaagactgggtggcagatgggaaataccactgagcatctctcgaccgaagttaatgatggccccagaaatgggacagtggtaccaatcattactgaagcttctgagatagtaacagggtctgattctttttcaacacaatcaagaactagtcaagtaccaaatgattttgatccatcacaaattggcatgcctaatccagtgtttgcaccttttcttattggatccccacagcataggcaagctgatagctctggacttacttttgttccaacaggtccaccagttccttttgttgtgctcccgtttgtctcagggaatagcgatggttctggtccccagtttgagagaagcgaaggaattgatcagcttcctgccaatactgtaggtcatttcgttggctcacttcatgatgttcaccaacaagattccagtgctacctcaacagtatcatccagtactatgactgagccatctggtgatcacaagcctgacatcttgaatagtgattttgtcagtcattggcacaatttgcagtatgggcgactctgccagaatcctcgtcccatgggtcctgttttataccctgttccggtgccgccaatgtatttacatggccatgctacatgggatggtcctggaagaccagctgcaccaaatgttaactggacacaaatggtgggcggtcaacgagtatttcctgttatgcctgtacaacctgctacagaaagaaccggtgttcttcagcactatagtgaagatacaccaagataccgtggaggcacaggaacctacttgccaaatcctaaggttcattttagggaccgacactcaaattcaagaaactacagaggaggttataatggtgacaggggtgactatagtgataaggagggaagctgggtaaactcaaaacagcgaaatctgaaccgcggctatggacgtagtcagtcagagaggtccagcatgaggtctgatagacagactactgatgagagccagtctgatagacaaaggcgaacttatagaactgactcgtaccggcatgaggcaagttctcagtatcttgtgcagggccaaccttttggatccacaagttctatgcgcaaacaaggaaacacatcacatggggtttatacaccaccatctacgtcttcaaatggtcccagtgctttatctggccctccaggaccaccattttttatggtgtactcttatgaacaaggctcaaatcatggtgctactgctacctcatctgaaccaattgaatttggatctcttgggccacttcctgcagcagatggtgatgacataccaaggtcgacacgccaaataatggctaatgggttttatgggcaaagacgtggtccatataggggcggttcctctcattcgtctcctgatcaaccatcctcacctcagcctcgtcgactgatggattgctgaaaattcaaatatgttaaattctcatgcgttgat

SEQ ID NO: 33546 - DNA, 3789 bp, Zea Mays
ttcggaccctccgtagcacgtgagcatagcttcagctggccactaaaccctcgtcttccccttccaagcgaatcccattccctacctttcgccgccgcctacgcaccatcgctcgaaaccctagccccattccccgtctcgctcggaatcccagctacctccagcgccgccgcgactgcaggataggaggccatggacgacgtgtgcgaggggaaggacttctccttcccggagcaggaggagggggtgatcgagctgtgggcgaagctcgacgccttccacgagcagctccggcgcacggagggcggcgaggagttcgtattctacgacggtccccccttcgccacgggcctgccccattacggccacatactcgccggtaccatcaaggacgtggtcacccggcaccagtcgatgcgaggccgccacgtctcgcgacggttcggatgggactgtcacggactccccgtcgagttcgagatcgataaggcgctcggcatcaccaaccggcagcaggtgttcgacctcggcatcggcaagtacaacgagacgtgccgcagcatcgtcaccaagtacgtctccgagtgggaggccatggttacacgcacggggaggtggattgacttcaagaacgactacaaaaccatggacctcaacttcatggagagcgtctggtgggtgtttgcccagctatgggagaaggacctcgtctataggggtttcaaggtcatgccttacagcacaggatgcaaaactgcactgtcaaactttgaggcagcactggactataggactgttcctgacccagcggtgatggtatccttccctattgttggcgatgcggacaatgcagctcttgttgcatggactacaacaccctggacacttccaagtaacctagcgctgtgtgtcaatgccaatcttacatatgcaaaggttaaagacaaatcaaatggagcagtatatgttattgcagaatccaggcttgggcagttaccagttaaggccaaagcttcaggaaagaagcaggcaccttcaaagggaagcaatattgaagctgttcaggatggtttggacaaggaatcatatgagctgttgtcaaagattcctggggtatccttggttggcttaaaatatactcctctatttgactttttcattgaacttcaagggactgcctttagagtgattgcggataactatgtcacggatgatagtggaacgggtgttgttcattgtgctcctgcttttggtgaagacgaccatcgtgtttgccttgctgctgggatatttgagactgctggacttgttgttgctgttgatgacgacggatgttttattgaaaaaatatctgattttaaagggcgatatgtcaaagaagccgacaaggatatcatcaatgctgttaaggataaaggaagactcattagtaaagggagtattgagcactcttatccattttgttggcgatcgggcactcctcttatttatcgggctgttccaagctggtttgtcaaggttgagaagattaaagaccagttgctggaatgtaacaaggagacttactgggtgcctgactatgttaaggaaaaaagatttcacaactggcttgaaggtgctcgtgattgggctgttagcagaagtagattctggggtactccacttccactgtggataagtcaagatggtgaagaaattgttgttatggattctatagagaagcttgaaaaattatctggagtcaaggtcactgatcttcaccgacactatgttgatgatattacaattccctctaagagaggacctgagtttggggtgctcaaacgtgttgatgatgttttcgactgctggttcgagagtgggtcaatgccatatgcctacattcactatccatttgagaatcgggaactatttgaaaagaactttcctggcaattttgtggcagagggtttagatcaaacccgtggatggttctatactctgatggttctctcaacagcactgtttgggaagcctgcatttaagaatcttatatgcaatgggcttgtcttggctgaggatggtaagaaaatgagcaagagtaaaaagaactatcctccacccaaggatctcattgatgagtttggagcggatgctctgcgactatatttggtaaactccccagttgtacgtgcagagtctctacgattcaaacgtactggtgtctttgctgttgtgaaagatgtcttcctcccatggtataacgcatatagattttttgtccaaaatgcaaagagactggaagttgagggtcttgcctcattttctccgatggaacaagtggtacttctgaagtcatccaatgtgttggatcactggataaactctgcaactgaaagtctagttagctttgttcaccaggagatggatgcatatcggctttacacggttgtgccgtatttggtaaaatacattgactatcttactaacatatatgtgcgtttgaaccgcaaacggttcaaagggcgtactggagaagaagactgcagaatttctctttcaacactctaccatgttcttgtaacaacttgcgtggtgatggctccatttacaccattctttactgaagttctttatcaaaatttgcggaaggtgtcaagtaattctgaggagagcatccacttttgcaagttcccttccacaactggcgagggaaatggtggttgtgcatccagacaatgacttccttgaagacatcactggcaaactaaaggagtatgtcatggaggaaatcaatgttaagaatgtcactccatgtaatgaccccttgatgtatgcttctctgcgagccgagcctaatttcagcgtgctaggaaaaagacttggaaaagacatgggaaaagtatcaaatgtggtgaagaagatgactcaggagcagatcttagcatttgaaaaaagtggagaggtttcattcttcggccattgcttgaagctagatgatatcaaggttgtccgacaattcaagcgtcctgaaaatgtgtcagagaaggagattgatgctgcaggagatggtgatgttttagtcattttggatctacgaaccgaccagtcattgtttgaagctggagtggctcgagaggttgtgaacaggatccagaaattacgaaagactgctcagcttgaacctgctgatccagttgatgtgtattacgaatctgtgggcaatgacaaaaacactctggaagagatattgaagtcacaggatcagtatattagagacgcacttggctcaccaatcgttccaaaggaaatggcaccaacagatgtcgtagtacttggcgaggaatcgcacaacgtacatgacatgtcatttgtcatatgcatcgcaaggtccaccccgattatttcaccagatcttctttctcatgcctcaggcaacagcaatcatgtcgaggcgttgagagtatatcttctgtcaaaatctctatccagattgaagaaccagttccaaagtggaaatggcgtgattacggtcgactgcatcgaaggttatccactaatcaggttacagctaggaaagcatgtttttctaagtgcaggggatttttatctggctagtcgatcctaatttttgtgtgcagcatcccaattttgactgattcacccatcattttgccgcaatcggcttaaacagcttggttccatttatgcattcagattcacttgttaaagtgatcaggcacctatggttcttgctcaagctttaacaccgcaaaaccagtggaggaaaatacacattttcgacattac

SEQ ID NO: 33547 - DNA, 179 bp, Zea Mays
aacaggacactaattgacatggcgaggacaatgcttggagaatacaagacgcctgagcggttttggtcggaagctatgaatacagcttgccatgccataaaccggctctatctgcatcgcctcctcaagaagacatcatacgaactcctaaccggtaacaaacccaatgtttcctattt

SEQ ID NO: 33548 - DNA, 245 bp, Zea Mays
cggcgaccgagacgatgctggccacgacgaggggcgataccgcggcggaggaggagcgtcgacgagaaattgtccatacgcgaggcgattttagacacccgcagcacccggattgactactgagaccccaggcggtgctctatgacacttccacggagctaaattatcgtggaaccgcagttggactggcgccgatatcacccacccgcatggcgatgtctgcaatttgcgcggcgtggtctggg

SEQ ID NO: 33549 - DNA, 2421 bp, Zea Mays
tagtccctaactccctataaaccaaacaccccctaagtcttggtattgcgatttttttgcctttgcctaacataccagatccgatggagtatattctgttttacactgtttttgtctatattggccgagtaccattacaaaatcgtgattcttaaatgtaacacaccgcaacgattgttatacttatgtatctgatttgaggagagaggcggtgggggaggattaacattttctcaattgtctttatcttctcacgggactcacgccatatatgatagtggcctccctcctcccctcctctcttcccttgttcatctgcttttgtgctgtcgcctcctggaagctaaaatcgagccacatagttgctgctaaggtctatccacacagtcccaggagtgctgcttctttacctgttgtgatggggtgagtggtgtctgccatgttgggcatctccggcagcagcggcggtggaggaggcacagcggtggtggcatgagcaactctgatggtgtcgacgtgcgacacttgatcttgacactagcctgcttgcgctgctctggttttactcagcgctgctcgtgtttgcacttggggaggttgtggctgtgcatgaggtgcctcctacgggcggggaatggaggcgagcaacagcatctggatccgtcccactgctggaaggggatggatgagctgccggcacccagcttggactcgctgctggggggacaaataggatgtagaagcacagatcaggctgcgattcatattgcgagaaggaagaggtggtggtggcccccagcttccaatcaccaacacaggagttggagagagagggaggaagaactgaagtggatcggaaatacatttctaccccctctgtttcatattggaaaatgattgtttacatggctgtggtgtgaagtgtgaagtgtgaacgagcaaagatccatacttttgtaaagggtgcgtgaagctgagccaacttaccacacaactggagatcactcaagtgctgcaagcagttcacttgtttgcccatatcttgccctgcgtggttttctccatcctgttaatgtgccttctacttctaattctggtgctgaaagcacttcatttcatcggcactcaactggcttggaaggacatgtcactcctgatttgaacaatgctccagttttccatgctaccgagtcaagaaatcatgacagtgagcacagacatttgagtaatcttcctgtatcaggaactcctgaatattctatgactccatttgggataggagtaccaagatatgacagtggcagccaacagggattccgatcatatgcacatcatcatcccctaatccataggctgacccctcgcagcggaagcaatctggtggcaccattagggtcagttccagccgtcgtggcagagactagaggccatggccatggtgcaccgggccatatgtaccagcactcatctgtgcagggcagcccgttccctcctaccaccagaagggttaggcccagagccttgacgattacgtctttcatcgcagcgacttcctcagctgagattgcagggccccttggccacgggtttcccgctcctggagccgtgaacaggagcgtttctgatgccgagggcatcgaccgagcgtacacatggggccgggagggatatgatctgttcccttggacccctgctgaatggggcaccttcaatcccatgcagaaccatgcgcatggaagctttaccagaaggcctgctggggagcggatgccgcagagtcgccccgagaacggataccagccgcctgtgcccacttcacagaggatgccaccgttcttgtgatcagacgaggctgcctctccaattgctgtgtataaaattatttgattcggggtttggcagagaacaacgagcgaatatcgaccgcacggcagcatcgaaactggtcggctatgagacctgtgtgtgtgtgatgtttatgatgatgccgctcgtatttttagcgctttcggtccagcggcgctcaggtttcgtcgagcgctgtcgtttgtcctgactgatatggtgttgcgttgagaaggactgtttgagctaaactgcatctctggtcccgggattcgaaagcaccgcgtgcagctatggatttgttcgtcacatcacgttcgtgtatggctggccctggccgtttcatgaccgctcgattcctctgccagcgcagcagcgccgctattgtttttttttaaaaaacgtgctgcctcgcccactgccagtttcgcaccatgtttgttgtgacttttatccggctgatgttgccctctataatattctacaatattttgtctctatatattagagctgcagtagttcgaacagcagctgcgggtgtaagcaaccaaataggatgtcgaagattaacaccca

SEQ ID NO: 33550 - DNA, 1675 bp, Zea Mays
gggttcaccttcaaaaaaagtttgttctccatcaccaccccctaaaaaggcttcaccccctaggtcaagctacattccgtgctattcaaaggccccaaggatgacgcaatggcaatgactatctaccaatggacatcgtggagctatcttccgatcatttgatagagaataaacctttgctgctaaaggatgtcaagttctaaaacgtacacgggcttaccagtgcttatggacctttgtttgttcgggacactacctttgctaatggggaacaggtaagcggtaggctatatatcttgtttctcttttgaaataatgcaaaatactcttacatctttacataagctttaatgttgattgttgcagatttttttggtccagggttaattatattttattttgttaatataattagaaatgatcacaataagggagctacatttgagttatttgagttgtagggtgcgttcaggagactatagggtcgtgggtgtaagatatggtttagagaatgtgtctactggaacatcctttgtaccaattccctgtatacatctatctatcgttaaaacaccttctattggaacatattttcactatacatacacttatgagtaaggtatttagctcaaatttatctatacaatatccttttgtattcctaaatagcctgccgaaagaagaagatagccacaattatgcatgaaagctccgtttctacgattgtataccgtcacaacgtacgggtattggactagtttgtatagaaaagagagaagggaaaatctgaattttcttgcctctacatgtccatctccaacaaagcaacaactacaacccaaaaataatgtattatatatatatatttaaaactgctacttttagctacctctacagatctgctaaaaatgcttgaatgaaggcattattagtctataattttttagatagccaacatctgctaaatcctatgtattcgacattgtgtgtcctaatctccccttataaaaaataactgcatgactgcattctcaatgtaacactttttttttacagataaatttcaattactatacttatagaaaataaacaaggtccaacgttgtttgctttccatttcccttctactttgatattatgtgatttggtttattcatattactgtccatagcatatttgttgtggacacagttataaattcgttttctcgacactgcacaggcaaggggaaaatcttcttatagatctgttccgtcactgtgacaatcatttgggagagaaacaaaaaactccatctggaagtgcacgacagccactacagttgactaacgatgtaaccaagatgatgcaaaagcatcagctagaaacgccacagttccatcagacccgattttccgttttacagaatatgtcatttccatccttaagacaaacaagaactacaggctgcttccgtcttcacccaatcagggatgaggatgccaagttcaagctctgcaacaggaggtctgttcagtttgacgtcggcaacatggtcatggtgaccggcgggaggaacactgggcgtgtaggagtgatcaagaactgggagaagcacaagggcatcttcgaggaaaacatagaatggaattcaaatttggtggtcgtaaaagtgtggagacttgaattcaaataa

SEQ ID NO: 33551 - DNA, 2849 bp, Zea Mays
ctgagaaggacatgcctggtgcagtggtgagagttgcctcactaagtcacaggacatggaccttttgaagggctacatatcaaaaatacagcagttggagagtgcgctgatgcgtcaaaacttctccaatgcttgcagacatggcttacatgaccagcttgccatggaccaggacatttttctaaatgaattgggttctggatgtgaagtagaaacaactgatgcttcaaatgaagttgatgaagaagaaaaggagagggaacattcattcatgcaagaccaacttgataaagagctgcaggaactagataaacgacttcagcaaaaggagagatgaaacaatttgccaagagtgatacttctgttctcaagcaacattatgaaaagaagttaactgacttggagcaagaaaagaaagctcttcagaaagaaatagagaatcttcgccatgcattaaccaacatatcttcttctatggatgataatgctcaaaaagttaaagaaaactatcttcagaagctgaatgcacttgagtcccaggtccatgagctcaagaaaaagcaggaagctcaacaacagcttctaaggcagaaacagaggagtgatgaggcagcaaagcgcttacaagaagatattcagcgtataaaatctcagaaggtgttttctcctccaaatgtttctgaatgtgatttaaattttttttcctgacatatgttcctttcattcgatgtaggttcaacttcaacaaaagatcaagcaagagtctgaacagtttaggtcttggaaggctgcccgtgaaaaggaagtacttcagctcaagaaggaagggagacgaaatgaatatgagatgcacaagctcttggccttaaatcagaggcagaagatggtcttacagaggaaaactgaggaagcagctgctgctacaaaaagattgaaggagttgctggaagcaaagaagtcatcacgtgaaacatatggcagtgcaaatggttcggggatgcaggccttaatacgagctattgacgatgaactagaagtcactgtaagagcacacgaattacgctcatattacgagcgacaaatgcaagagagagcagcaatatccaaggaaatagcaaaactaaaggaggaatcaaagcacaagatcagtgattgtcctcaagctatgtcacctagtgctagaagttctaggatatcagcattagagaatatgttgtcctcctcatctagtgctatggtatctatggcttctcaactgtcagaagcagaggagcgggagcgtgtattcaatggtaaaggtagatggtaccatgtcaggtccctcccagaggcaaagaatataatgaattaccttttccagttagcatcatctgcaaggtctcaagtactggataaagaagtaatttgtaatgaaaaagaacacaccattactgaattgaaggaaaaggtggttgtgcttaatggtggaattaggcagttggaaacacaagtgagggatctaaggagccaaaatacacagcttttcactgcattgaacaatgcaaagaaatctgctaggtcgaatggcactggatttgctgggcgtaagagtgttcgatcttcccagcattttggttatagtaaggacaacttcaattgggtggatgatatggacatttcagacagtgagcactcggatgagttagagaatatgagtgatggatccgattcagactgggtacagtcgacgaggaaagccaaaaaacaccagagaagagtgtctagccattcaaatcctaacctggattgtcaaaatacacaaggcagtgcagaaccagagaagccctcagatgaaaagtgcattttgcccaaatacatttcatcagacggctgttcatgctcaaaatcctcctcatgcaagaccaacaaatgcgagtgcagagggtcaggtgcacaatgcggtgcaggctgtggttgtaaggattccaaatgttctaacagggattcttctactatagaaaaagccaatcagggagccatgcttcttcagaccgcgttttctgagaaggaagcccaagatgcaaagccaagaaagcctttgactaacattggtaataatgtggttaaccaaactgccgagacaaagaagcccaggaaaaaccggcgcaagtcggcaattcaactcgtcccaggacctctcctgccgtccgagccagtggccaccgaagctgcccctcgggacattgccaacattcccctcaagctaccgagagccatgtcctcggtgactcctgcggagagcaaccctcccctcacagaccgcaatgctgccaaacccgacgaatcagtgagcaccggcagcaagaatagcaccggagctgcagccacgagagcaccgtctcagctgagaaaaaacgcaaccaccgagaaggagaaccagttgcgataatccgattgctgacatgcagtatccgtgactccgtgtcgcttaagccttctgtttaacagtgggggaggctgcctcggcgtcctttggagaggcaggtagactctggaagggctggcgctctcgggttcctgtgggaaatggcgtgttctgtggaaagccttagctctgctttggctggaatgcgaccttcttgtataatggaaaagtaacatgctggattaagctatgtcagtctcgtaaatggtctccgttcattttgaacatactgaggaaatcaatctgcgcatctgtatgcttagactggtacactgcaggatgcacatttcctccacagttcgacagcataacagatgcaatcgtatatatcgttgcaaccaagtggtgttcttttgagattataatatatcttgaaaaagtcaaa

SEQ ID NO: 33552 - DNA, 5026 bp, Zea Mays
gggagaagaagtgaaatccggccgccatgccgaggcctcaaccttccgtgtgtctcctatctgaagaccccccactacctccactgactcccccttcttttaatgtcgttaaagttgctttgaattttcaattgactaatgcgcgtccgttcaacacaacgaacagaaatggccatcagctgacttgcacgtttgtgagacaggcttgaaatatgaaacacattgcttgtgtctactgaagtgtttactcttcatttttgattttatcactctagccctgaatgcatttgccatctattgatgtcatggtagaatgtttgaagaaatgcccttaaggtgttagatgaaatgtctatatggatgcattaggcaactgccctcaaaggattagataaaatgagtatatgaatggataggcacctctaacgcacatgtaccacatctttgccatgcctgtggtgttagttttgatgtacaagacaacaatatgaatttcaattttatcttattattctatcaacagatttattcagtgtcttcctttagaagcagtggttgtaaatgttcaaagtagcacttattattcatgttcattgagaaatcaacagtaccgatttctgatattttttatattgtttgttttttaatgctgttggtctgctgcaatagtacactgctacaataaattggttagtgttgctataaaatttgatgcacaatatatgttcaacatatttcatatcaaagtaccatcatcaattaggatcacttattttttccctgaaaagttaagcttacatacttcatcatcaatcctttgatttgaaaaattggtatgtgtggacttaccaaacgatgcagctctagcagtacgatcctattgcacggcactgcggcagtacacgactaccaaaggtccacatctttgttctttgcctgtgtgcatgtgctaaccacaaagatgacacaatacattaaagtgagcatcggggctctgagtccctcggaggatggactcaaagatggggaggcaatagctgcgctgcaaaaaaatggaatttatgcctgcagaaatatggctgcctcacaacactctcaagctcagacgaagttgccactaaaccctcaagtgaatgtgtgaaacaatcaattagtaaggagaaatatttgtaacttaatttcccaccaagaattatattttaaatttactttagaaggctttattcatagtacatttaaatttgagcatgctgttatgccaccatatcttctattttactgctaggctcagcaaggttgagcatgctattatgccatccataaaaaaattaacatgctgaatgttttttttccggttcaattgaaaattacaatggttgattctttttcctaattatgcattctatcataatctttctgcaatattcaaggctcgttgtttatccaagccttttacaacttcataagacacaatgcattcgggctgcaagcttttgttacaaggtcagtaagctaagtcgcaatgcattcaagttgcaatcttttgctacatgtcagtaagtttcactgttggctccataaacaattcatgctttaactagatgctatatatgtattttagtgtaaaaatgaattatcaaaatctatgcgcctagtagaaaattaaaaaaacgacctacattttgggacggaggaagtagctattaatgtccaaatcaagagtcaccagctacaaaacgaacaccactggtcaatgatgatggtgcggcaacgccgcgccccgttctttctagttatatatactatagcttcaacctctctagttgctcgcatgttgtctctcactcgtgtttaggtttaacacaaccatcaacctaaaccacactctcttctaacttttttttttaattcttggtgcctactgtatgttgttaacaacgatacagtcaccaactcaccataagataaaacttcacttaaaaactaaatctggtttcatattttttgaagctttgaaacaaaattttcacatctttctaagattaatccagatttcaggaatttaactacatgattatttttggaaaaaaacatctgtagtccgaaaaaacagtccatacagggccaaattctacagcccaattaacctccaaggaccgaggctccaaccaaaagggccccgacccagtgtcaatgtaaaacgcgaggatattttccccttcaccattcccttctcatcccctacctctcttggtttcgctggtaggcggcagcccgactaaaggaacgcccgccgtcgccgtcgccgtcgccgacttcacctgcgcccctctattggaacacctgcttgctgttttttcttctctgttcacctcgtctggccgggccggactgccgcagccttactcccagctgcccaggtttctgttggacccttcgacggcaacgagcatccaccataccagtggactcgagctattgcaatggagattgtgaacagtgtttccttcagctcaattggagtcggaagaattgtaataaacaagacagtgaaggtaggatgccaaacacaccggattggctggaagctaacaaggacatgttgcgagtactctcctggtgcttctagaaagaagcaagagaagtatgagcaacaaccacagaacgtcgatcttccagaattacacccaaaaaacaaaaagaaacccttccctgttccgattaaaaagatgctgcaagcttctcggcgagagaagaggcttgcacaaatgcatatagagaagcctcttgaacccccaaagaacggtttgcttgtgccagagcttgttccagttgcacatgaagtccttgataactggaaagtgctaatcagagggctctctcaacttctgaatgttgtttcagtttatggttgcagaaagtgtcctcaagtccatgttggtccagttggccaccagatccaagactgttacggttccggaagccagcgtcggaacagtcatcactcttgggctagaggataccagcaattgttgagctatgcattcaggctggtgttgacttaccacaatacccctcgaggcgacggactgctcctgtccggatgataggcaagaaggtgattgaccgcggtgagtttgttgatgagcccaagccacaacgttcagaacactgtgtatctctgcttgctgagctcgacacattcagcaaccaacaagtccagtcaccttcaccatcaaatatgaaagagcttgccaagaggacactgaaagcataccttaatgtccggcgaggcgtcgagcagctgatgagcaagtacactgtgaaagcatgtgggtactgctctgaggtccatgttggtccgtggggccacaatgtgaagctctgcggggctttcaagcaccagtggcgggatggcaagcatgggtggcaggacgcggtggttgatgaggtcatcccgcccaactacgtgtggcatgtccctgaccccagtggctctcctctcagatcctctctcaggagtttctatggcaaagctccagctgtcgtagagctgtgtgtgcaggctggggctgaaatacctgacgagtatcgggccatgatgaggactgacattgtcatcccggactctgtggaagctcggatggctgcataacaacaatgatctgagcttctacgactactatcctgcagttcttgtccagagtacagattccaaccaaatgtgccgctttctgggcatgctgtgatggtgggtctcttagccctgtggtaattgctcagggagcagcagatgcatagtttgtataatataattagcatagctaaatcatgatcgtttgggatttaaagctgagttgaagatctgatttaagtactattcgttgaaaggtttaacgcatgaacctaggacgcgcaatgacaagcctgatagcctgaaagctaaaaggaatggtctctgcaccatttataaggtccatcccatcttgtttacaggccgcagatgctttattcctgcctatgctagactgtgaggcacctagaatgctcaggagtcgccatactgatggccttccactttctccatcggtacaattgcgagctaatgctttggattaaactaatcacggtggtttgttcggggtatttgtgcgcctggctgtagttaatcatggactaaaagcctgtgctgtgcacctgtgcccgcccccagatcgacactttgggggtatggctacatgtatagtcctaccagatcgtcggcatattgtgttcccctttttgctgtatactagtactttgtaacatgcaagcggaggctacttattcagcgccgttccctaattgtgcttatgaaatgttttgagctgtatatggaacggatggtgatgaatgatccatgggcgaaagattcatccatgtgtgatcagctctgtgatgaatgatccatgagacctgattggctacaagaggtactaaactcttaggccacttatcgttaatagagggattacccaggtctcaaagctatagtgtcgttctcgtggtggagactgattatcacttcgtggcagtgaagcacccctacacaacttcttcaatagcccaactcttgatggacaacattgtcgcactccatcgtcttcttcctcactgtattgtcactgacagagacatcatatttctcagaactcttcaagctctacaaagtcgatctacaactgagtacaacctatcattctcaggcagatgggcaaaaaccaagaagtcaaccagtacagatgggcaaactgagagagtcaaactagtgtctggagatgttcctctgttgtgcagttcaggactccccgaatacatggaagtcttggttgtcatttgcagagctatggtacaactctgcttaccatgcatccattggatgccctccattcaaggccctatatggttttgagccatacagccttctactcctgctacagtgtctggcttagtggaaagtagagagctacatttacgatcaccgaaa

SEQ ID NO: 33553 - DNA, 1710 bp, Zea Mays
tcccttctcgaggacgaggacacacgcacacacggaagaagccactagctctccgcagtccgctctcgcctctcggccttctccttgtgccgccgaacaccctcacaagagtcggcctctcgatttctcagtccagcctcagcagtccccttccctccctccatcaggtgttgcctcccgcagatccaaatcggaattcggtccttcgtccccaaaccaccaatccggttgcattctttgggtttgctcacagcgcacacaaagccattttactgctgggaatggtggctggcactattagcgtctccggctcttgagtgatctccaagtcctttggaatgctacagggaagtgaagtgatgggggagtgcgaggacggcaaggagtacaggtgctgggaggagctgctgccggacgcgctgggcctcatcttccgcaacctgccgctgcaggaggtgctcaccgtcctgccgcgggtgtgcaagtcctgggggcgggtggtggccggcccctactgctggcaggagatcgacatcgaggagtggagccagcagcagggcaagccggagcagatcgcccgcatggtcgagctactcgtgggccgcagcgccggctcgtgccgccggatcagcgtctccggcctgccctgcgatccgcgcttctccttcatcggagacaacgcacgagctctccggaccttggagatccccaggagcgagatcagcgactccatggtggaatccgtggcgccgcggctgccgaacgtcactttcctcgacatcagcagctgcacgaagatgggggcccgcggcctggaggcgttcggcaagcactgcaagtccctggcggggctgcggcgggtgatgcacccgatcgacctggcggacagggcgtgccagcacgacgaggcgcacgccatcgcgtgcagcatgcccaggctgcggcacctggagatggggtacatgctggtggcgacggaggcggtggcggagatcctggggcggtgccgcgagctcaggttcctggacctgcgcggctgctgggcggtggacgacaagctcctgccgcgcgaccgccacccggggctgcgcgtcctgggaccccgcgtcgacgactgctacgagaacagctactgggaggagtgctccgacgactactcggacgactcctccatctactcgtgggagctcatggacgacgtcgacgacgactacgactacgccgccggcagcgacgacgacgacgacgaggccgtctgggacgacgacggccagggcctggagaacctggaggtcaggttctacggcggtggcttcggcgagaccttcgccggcttcgactggccgccgtcgccgtgacatgacacctgctgcctgcgcttgcgttgcttgcgtgggtgggtgagcctttgtgtgttgtccccaagctttggaagcttgctgtgctgctgtagtactgtgcctgcgacatcactcgatcttcctctacctcgcagatatgccatatgtgaagcgaactgctagtggtgcaatctaaaatgtagacgctggtgtttacatgaagcaatccccatcagcatgcaccggtgagattccaccggtgccaatccccatccatcctacctactactagtcatagagagcggggcagggtacccctgtctcctgatggcttctttaatgtcatgcgagcaaacatggcagtgcaagg

SEQ ID NO: 33554 - DNA, 3247 bp, Zea Mays
cccgtttaacggcggcacgacaagcaagcggtcacgtgagagctgatttttctcgcagcgggtagcggtagccctgtccctgacctgatcctgacccgtgcgggcgtgcggctcctcgcggacagctccagactccagagccgcctcttcgccctctcgccatcggcaggctacggtggctgcttccccgagcctgcagatcgggtggtagatctggttggcctagtcgctgtcggatgcagttgccgagctaggtcgcggctgcgcggcggcggtcggggtcttgcgtcgccagatctggataggaaaacgccgcgcacaagctgagctaaattctgttcgattcgagttcttataggggttcttgtggctgcgtgttttgaattttttcccactggttctggggtgccgagaaagggaatcgtggctgactcttgttgccgtcgtcgagccagatctggtcatgctgctaccgtggatgtcttattgcttgatctcctttgttttttaattccttcggttcaagaatagcatcattaccatgagcatacataccagagaaacggagacagattcggaaattttcatttattgctagcttgtagttttggggtcctataatatttttcttggttctcttaattaattgagctagtaaatcaacaaatctgccactacagccgtcacgggcaaacataaaaaaactgaacaacaccaaattgaggcgcctagtccacaaacctgaactgctgaacttaaatgtctggaagccacagtttctgatttctgatggtttgtttttatgctcatttactctttctttcttccaggtagaccaccttgtgttgattcctcgagtcttcacctggtgcttccgtttgcagcttcatttttaactaagtctgtaatttattggctgtttatctgagtgacactacactctctgttttttcttattagatgtcacaagccaaggaagtgaggtacactgcacggtctattacacctcctgctgatagaaatggcacttcaaggtcgcctcctccaaagagacgcagcccttcaaggtcacctccaccaaagagtgcttcacggtccccacgtccaaggagtccaaagagacgcagcacttcaaggtctcctcctaggagacgtggtagatcaaggtcaagggataggagtcggtccaggagcccagatgatagaaatccagggaataacctttatgtaactggattgtctactcgtgtaacggaagatgatcttgagaagttctttagtaaagaaggaaaggttaagaactgtcatgttgttcttgatcctaggacaaaagaatcccgtggctttgccttcgtgactatggatactcttgaaggtgcaagacgctccatcaagtatctgcaccgcactgtacttgaaggtcgcctggtcactgtagagaaggttagatgctgactgtactgattcattccattatgcatttttctattgtattttttgttgaatagtgctagttttgtcatgttatcgttgtatagtaatgtcaagtagtctaatactagcagtagtacagttaaaaatttaaagctactatacggtcatgcatgttttttgtcttatgcttgtccctccccttcccactttagccttgaaatcactgatgtcttagtaacataaatgcattaatcttgtgcactggaaattatattccattacattaaggggcttcaatgatgctatgctctgttcagtttaaaactctggtgaaggtccttgaggtgaggtatgttatgacttatgagtagaagattacaaatatgctctttccctatgatggaagagtatattctgtaacagacaagcctggaaaccccactcaggtgaaatgtgccagagtaaattgaaaggggatcatttatgatgtgttctgatgcaatcctaatgtggtgaatggggaaaacctcttctgtggctcttcaactggggtcttaactctcatctcgtgctgacttcctgaccttccagtttaacatggtgctgggctgcctctacgtcaacctggttggtccaggctgtgcagtctccaaccatggttgtctccaaaggatgtgcagctgacgtgatggtgcttatcaccacaccctcagagctcatcaccacttgccgtcttcacctcgctcaccgacaatgcatacatgctacatcaacacgacggctgtcgccatagagcgatcttggagtcttgttgtgcatcgcgtcaccaccatcgccaccgcaacttctaccacaaccgccatcgtcaacatcacgctcgtgatccaacaggctctacgatttgtctgcttcgactaagcttacatggtgcatgctgctgccatgtcacgacaccaaccaccaagtctgatgcgaacttcatcgaccagtatcttgatttgatggacatcacgagaggcataatctggcgcttccttggaccatggctacaccgaccacggaacaagtgcacaaaagtcatctttggtttagttggcatgcaacgctaaaagaactcgtgaaaggacccctactcctggaaaatactgtggtcgaagaggaggatctcaaaggagcccatcaccttaccgccctcgcagaagggagcgttcgcgctcaagggaacgcagaagggagcgttcgcgttcaagggatcgaagggagcggtctcgctcaagggatcgaagggagcggtctcgctcaagggaacgccgaagggagcggtctcgttcaagggaccgcagggagaggtctcgctcaagggaccgccggagggagcgctcacgctcaagggaccgcagaagggagcgctcacgctcaagggaccggaggggcagttcaccccatggcagaaggcatagagatcggtccaggtcacccaccagcaatgggaaccataaggcagactaggaagcgcttttatggacttgtcgttgattgcgtgaacaaaggaacttgtaacactacctataaactggtcagactgagacggttagcatggatttttagtagtgttgctgtattttgttgtttcatacaagtactctattctgttagctttcggatcgaaatgtcggatgatgatggttgttattgttctggaaatcgtagacatgtcctccagaatacctatgaaactatggcatactcgtgtgtttgcttaaggttgctgtggtatgttctgatcttaagattgacacgttgcacggtagat

SEQ ID NO: 33555 - DNA, 4418 bp, Zea Mays
ccttttcctcgcgtccaccactccacctccatccatcactggagctccccagaaaaaaaggcaccaggcaattcccgattagcatctcgaattcgcgatatgacctgcggcggcgtcagaccggatgcgggaagctagtgttccattccatctggatgctggtgtgtattggttttggttttgagttcagtacctctcccctcttctggattgcgtattccctcggttgatgtagaaaatgactggtacagatctgacacttggagcatatagggttatacgttctgggctttgaagtagataaggagctgactgtttatatcagttccagtgttgaaagtggcaactattaacgtgtgcataagcaaaatggatagggaacttgctagcgacatggagcttgattctgttgtcttccaagtatcctcgcctgacaacaggtatgaagcaattgcttgcagtaagggaaaaacagaactgatagcttctggtccttttgaccagttagttctgcacctggaagatgccaaaacattccaatcttgttcatcaagtggtacttttaaactgttattggctggggatggaaaagactcttcctggtttaccaaatccaccttgcagagatttttgcatatcataagttcatttgatacatcaaaatcggtcaatggagttttagacgagatgtcacagctggaggaaacaagaaagtttcatcaatcactttatgttaaggagcaacagaatgttattagtggcgctttaacaggaggtttatttggtactggtgccatagcacagcagggaaatgatgggccaaattcatcggatacgacaaagaatgaattgcttcgagcactggatttgagattaactgcactgaaggaagagatcttggtcgtattgaaccgagcagttggatccaatttatcggcaagagaaatatctgatttatctgcttttgttcagcgatttggaacatcagagttttgttggttgatgcggtgtacgttgttgatatcggattgtaagccctctgagctcccactacagcagaattctacaactgagaaagttgacaaggatgagaatgcacataaaccttgcatcagtcctcagactaatcttcagatgcccattgccaataatgtatctccagcaaagcttgcacaaattgagcgtgagagctcaacagaaagtgatgattcctctgaatccagtgatgaaggtgaggccattgttgaaaggagccgtcctcttgtaagatctgcttcacctagaagatctgcttctccaatgcggagggttcaaattgggagatcaggatcacgtcgttcaacagcaattgctatcaagagcctcagttacttccctcctagtcagaggattcctatggataaagatgatgaaagtagtaccttcaatggtgaaactgatcagccaccaaagaaatctgacactaacgttagaaggatgagtgttcaggatgcaattaacctttttgagagcaagcagaaggatcagaatccagattcacaaaataagaaagctggcttgtttgccactaagtctgtcttgagaaggtggagtgcaggaatgggtgattctttgaatgaaaactcagaaggaaaagtctcagattccacatctgaaagtaaatcaaacaacatagcttctgaaactgagaaggttgaagctgaaatgaaggctgaactaggtaacataccaaatttttttgttacacctgaggctgaagatttaactttccatgctaattctcatgagattagagtgtcagaaacggagagtgctgtttgtagtaatgtttgtgcagaacaagcaaagcctggtctggaggaaagcagtgatcgggcaatggcctccgctgagtggaatcgccagaaggaagccgagcttaatcagatgttattgaaaatgatggaagtcatgcctgggaaatttgcgggtgctaatgccaccgctacaggtctcagttccaccaatcagcaaaaagctgtatctcatggccagcatacagagaagcgagacacaaaagtcagaactgagaaaggcacaaggcgaccagcaaaggaaccaagcaccaagcccttgaaggaaacagctgggaagaataaaccagcaatgacctcgaaatctggctcttcaacagagagacgtatttcaccagttccacaaagggcgcggcgaaattcatcacctccagtcctaccgaaagaagtagcatcaaagacaccaccagtcaggaaaagctcaccgaaaccatcacctgcacctgcatctgtgcctactacacgtagttcatggtcaggtggttctttgactaaagcaactacaacacaaaaaactaaaaggtctcctgggatggcttcaacgtccacacaaactagccgaaggactccaacaacgccctcgtcgtctcagccagcttcaaaagcggaaagggccattcaatcagtgaagaacaagaaggaaaccattactgctaccaagccagctataaagggacaagaagagaagaagaccaaaacagcaacaaagacaagcagaataactaaagtttcaccttcagaagaaaaatcaggtgtaaaaacgaagcaaagcttgcaaaaggtttcaaataaaagcagtgttgtacctcttgagtccaaaaccttgaagaaaaccactggaattagtcagagcattaggtctggtatggtgaagaataaggtaccccaacctaatgacttctcaaaagataccggaagtgttaaccaagctgaagataaggagcaatctcctgtgacaaccgagccaactactaaggtactggaggctgatcttgctcaaccagcacatgatgttgatgaaaatttagaaatttcgctcgataatgacttgaatattgaaaaaacagagaaaccggcctcgagtttaactgcaacagaaatgggctccagtatccaagttgaaccctctacggatgagttagatgaggccatacaacctcctgacgatgacatgggcatctcatcatctgcgtgggtagaagtagagcgtcaagaactagaagtcactgtttcgagtgaaaatgtagttgttgaggatgtaacttctccaggaattgcaccattgccgtcatcaagcccaagagtgcgtcattcgttgtcacaaatgctgcaagcagatagcaatgaaccagaaattattgagtggggaaatgctgaaaacccacccgcaatagtttttcataaggattctccaaaaggattcaagaggcttctaaagtttgctcgaaaaaacaagggagacaacaatgctaacggctgggcaagcccctcggtagtttcagaaggagaagatgaactagaagaaccaagaggcactagtgatggtacaaattcaagcaggagaacttttgatggttcaaagactaatagcatcttatcagctcaatcaactaccggcagcttcaactctttgaactcggataagctacgggagagatcaggtgctgccacatcaacaagagcatcaaggtcgttcttctcactctcaaacttccggagcagcaggtcaaatgagtcgaagcttcgatagtgtctgccttgtttgtccagcagatacatgggtagttcatctccgctcccattcaggacgtctagacttaaaaatggtttgagatttgattgttcggacggagccagcttgctgtgtttcgctctagtcacctgacatttgatatatagatagcttctgcctatgagatgccatacttcgcttctgccgtcctgtacatttctatattttactgcattgggtgcgagctgattgagacgaccgatatgtttgcatggcttgcaagagatttgcttcgaccaaaagccctttgctgtcaatagtttgtaccgaaaattgtcatgagcaacaacattaggaatgatgtaagttgtcacatttttttttgacgagaggaggaccccatttctattattgtcataacagaaatacaaagcggttcagatagtttccacactacaacgcaaaataacaggaagaacccgcaaacagaagcgctgacgagccaatccgcttcggatggctcagaacagccgagtcccctaccaggcaacatgccaaccgacgagtttagagttttacatcacacaagtaccagaccatacggcggaggatggcaagggcataacagacgacagcaaaatagagcgagtttctgacaaagctaacaccagacgagcagtcacgtcatgactcaacgcccgtgtggctgcagcatcccttctatctcatcgcccgacccgaggatccgatttcctctagcacttgcaccacgaaccagcatcttggcgccctcttgcagaaggtcctggagctctttcttgctaagccctata

SEQ ID NO: 33556 - DNA, 1330 bp, Zea Mays
tgacattctactggttagacaactttacctagtgtctcctgcccttctttcatcaaaggtgttgacatgacgtgcctaggccagagttatggcccgtggggcgtctgatccgtgccgggccgccgtttggccgcgtgcatcgggttaattgaaatagcggtgacgatttatttgtaaaataatgacgcggtgccacggttgaaactggtaagtatagtaaagaattccgtttcttcgccctaaccttttcactgctccagcgaaggccgccgccctcagcaacggcatcagcgtcttcccctccctcgtctcgtcaatcccctcgcgccctctcctccggtcctccgcacacggcacaccgtccggtgaccctgcaatggaagggcgccgctcaaatgaagtatcatctgccgaagctgtcttggtgggagcattgtcgtctggtgtcaatgctcccacgtggtttgtgctcaagattacgtttttgctccttgcattgtgttttacggctatgcttgctctagcattttcgtcgaagaactttgtaatcgttgcacatgttcttctgctggtgactattggaaccgtgctatttgtgctgcttaacaggtttctggctgaagttgggctcgtgcctgttgaacagcagatgaaggagatgggcatccacaaaacagaagccacagatgaagacaagagaaattaatcagtgacaccttttttttttgatatggaaagcagtttaacattcaatggacagagtgacattatctctcatgatagaatcagcactcacttcagagacatgaagttcagacaccacaattttgcacagatgaccatacatctttgtacgtacttccaaatggaaacccaggtcgaaatctgtagtgaaaagggatgtagctgcaagcagagcacatcaagcctgctttccctcttccttgggcttgctcttttttttttacttggtgtagcagaagcatgagcaccagggaaactgaaacaagaactccattgccagagaaatcaccaatacttttgtttggagaagtgtgcccaagggatttgcatgcaatgtaacccttacatatacgacatggatgccgtttatcagtggacattaggatttatggtctttgtgcaatatatatggtcgtgtcagactatcgttcctttcatttattctttattaaccctcataaacctgattgtgagaagtcatgatggcttttgattctttgaaggtcgattgaaatgttggaaaagccttccggatggaaagcatatgttctttagctgccgatgggtaaccttttggtcgttcagg

SEQ ID NO: 33557 - DNA, 358 bp, Zea Mays
ccttccagtataaccgttaaggttaggacgtgcgaggaaggaaagagctccggcattcgggtctcgcgtcggtgagatcgcagaaaccgcactagtgggtaaagtgtacccctctgcgcagagttgaaatctattcgaatagtccgtgtccactggtatggatgagtctggtgtggtatgacaattagtgttttcataacctccgtaaacagggaaatacgtgtgtaagtgcatacggaaaaagaaaacaaggccacgggagcgggaagctcagtggtgattgagtattttgttactttttagtctttgggaaaaacctcacagcaactgcctttctctaagaaaatgaagagtgact

SEQ ID NO: 33558 - DNA, 2385 bp, Zea Mays
cacaccgtagcccccctcctctcttccccaaacacacaccacaaccataaccacgaactacctgaacggctgaacaattcccttcgtcccatcttcctctcgtctctcccaccccccgacccgaccgggcggcctcctccccgaaccctagcccctctacaaccaccgcgtcctgcctcctctgggcggctccgccccagatccagcacagcaggttaaaaagggggcgggcaggcgttggatggacgggccgaagcggtcgcagctgcgggtgcgcctccgcgtcacggcgcgccggcgtggtgccgatggcgacggcgccgggggcgctgccgggcctggggggcgtaagcgccggatggaggcccccgtccgcaactccgtcgccaagctgcagcgccgcgagatcgggggccgccagctcgccgcgcgcggcggcggccccgccgccgccgtgcccgagcgcttccggaacatgcagctccaggaggagttcgatacatatgatgaaaatgctcacctatttgtgaagctgcagtttcttaaaagaagatccaaaattattgagattgttgcagcaaaggatatcatatttgcccttgctaattctgggctttgtgctgcttttgaccgagtaacaaacaagcgcatagccttcttgaatttgagcccagatgaagtgattcggagcttgttttacaacaagaacaatgattctcttattactgtttcagtttatgcggctgacaaattcagcacattgaagtgcagaacaaccccgattgagtatattagaaggaatcagttagatgcagggtttcctctctttgaatcagagtctctgaaatggcctggatttgtggagtttgatgatgtgaatggaaaagtactcacatattcagcgcaggatggcatatataaggtatttgaattgaagaactactccttcctatattcaataccagatgaaaacgtgcaggagataaagatcaggacaccaagttatgttccattgaagatactatcaattgaagatggaaagcaactgaaatcttttaagcacttgttgcatcgcaacaagaaaattgatttcatcgagcagttcaatgagaagctccttgtcaagcaagagaatgaaaacttccagatatttgatgtgcggagttctgagctaattgaagtcagtgtctccaagtttatgaccccttcagcattcatttttctgtatgagaacaacctcttcttgacattccgaaacagaacagtcgctgtatgggacttcagaggagagcttgtgacttcatttgaagaccatttgctctggcataatgattgtagcaccaacaatatttacatcacgagtgaccaggatctcattatctcgtactgcaaatctgaggcagtggctgaggatggtacaggtgcagtactcaaaccctgaccatttcctcagtatttagtttgcactatctatatagatgcaactgctcccatatcccaattgggatttttcctttttactggcctcttcaactagcctctgatgtcaacatgctggatgtttgcaacattgaatataggctgatagatatcgggcaccattacaaggtcatgaatatgaccacataaaaaaagtgaactggcattatagaaatctttctttgattgtgctatcaggaaataatcttgacactggtgtcgtgcagttgttccagttggatccatcaacataagtgagattatgacaggcaggtgtatcgccaagattactgccaatgatccttccctaagtgtacccggacgcagaaatggttacagcaagcggtcctcggactggagcaccgttccagaagctctggaggacgtcactgcactgttttatgatgaggacaggaatgagatctacaccggcaacagccatgggctggtgcatgtgtggtctaactagatagtagcatgtacatacatcatttcgcccttttgatttgacttggttagctttactgcatgctgtataatccttggctcgggggctcacctagcttttctatttggcaatagaatgtgtttccttgagcaattgtgattgcatagtgttcttgtaaatatcttttgttcagctaccttgttcaagtaacatagaaataggcctgccaaatgtaactttgctggatactgccagccaagtttcgggcagcaagagagtgaagacctgcagttctgaccatcatgttattgttattttcaagtgtgttgtagtgttcgttttgtctgtaagctgctgaattatcgtatctgaagccttggatgaaccacctttaattatcagttaatctgtacctgattgacctcagtattcttggtccggagaccaccctcctggta

SEQ ID NO: 33559 - DNA, 2279 bp, Zea Mays
gcacaagcaaaggcgggggagagagctccgtgcagtcaccgtcgtgttcggaacgagcgagagagcgggagacgagtcgcggcgcctctgctgtgctgtcttcttctccccctctgctctgcttcggctcctcacgcggcctcgccgagacccgcagggggttcagacttcttggtgagagcgatatgagtgtcccaggtcaatgctcatcccagccacaatttatcaccagcgttgggaggagtaaccgctccaatggccccggcactcctcttatcgaaagcatagatgttgatcaaattgttattccagagaaaaacagttggaagaacttattctcatacatagggcctggatttctcgtctcaattgcatatattgatcctggaaactttgagacggatctacaggctggagcacagtacaaatatgagcttctttggatcatacttgttgcatcctgtgctgctcttattattcaatcacttgcagccaggctaggggttgtgacagggaaacatcttgcagagcattgcagggctgagtatcccaaggtcacaaattttgtcttatggattcttgcagaacttgctgttgttgcatgtgacattcctgaagtaattggaactgcttttgctctaaacatgctgttcagaatcccagtatggtgtggtgttctaataactggactcagcactctaatgctcttattgctgcagcaatatggggtccgtaagctagaatttctgattgcatttctggtgttcttaatagcaacatgtttcttagttgaacttgggtattctaaaccaaatgctccagaagttgttaggggcctttttgttcctgaacttaaaggaaatggagctacaggccttgctatctcattacttggtgctatggtgatgccgcacaatctttttctgcactcagcattagtattgtcaagaaaagtgccacggtctgttcatgggattaaggaggcctgcagattctatacgattgaaagtgcatttgcccttacagttgcttttctcatcaacatatctatcatatctgtcagtggttctgtctgtggttcaggtaatttaaacccagaagatcaagcaaattgcagtgatctggacctaaataaggcttcatttttgttaaagaatgtccttggaaactggagctcaaagttgtttgcagttgctttgttggcatctggtcagagttctacaattacggggacatatgctggacaatatgtcatgcaggggtttttagatcttcggatgaaaccctggatacgcaatcttgtcacgaggtccttggctatcctgccaagtttgatcgtgtcaattattggtggttcttcagcagctggccagttgattatcattgcatcgatgatactgtcatttgaactcccttttgctttagttccactccttaaattcaccagcagcaaaacaaagatggggcagcatacaaattcaatattcactgctgtgctgacatggatgatcggctcgtttattgttgtcatcaacacctactttctgataacaagctttgtgaaattgctcgtccagagcgggctgaccaccatttctcaagtattttccggtattttcgggtttttgggcatgctgatttacatagttgcgatcctatacctcgtctttaggaggaacaggaagtccacccagccattgctggagagcgatgctgagcttgcagtatcgggtagcagtgctgatgccggagcagaatgctcgctgggccatttgccccgtgaggacatctccagcatgcaacttccgcagcagcgttcagcttctgatctagattagataacagctgccaggaaaataaatgttttttttgttttttatatagtatagtaattacagaatagggtacgtcaggtattggcttctgttcatcctactgatgatgcttaaggaatgtatacaagaggacggatatctatgctgccaaacaaaaaaatggggcacaaaagaatttagtgcctgtttttgggaagtgatgtgaactgaatcctggaaggggcaaaaaaaaaaaatgttggaatccaattgttgaaaattcttcattctaaacatgaggccgttggtaaaaaatgtctacatgctgtaaacatactatattttgacattattatcacagttaatatatactggacatgctgttttatgtgttgtgcattccagtggctgcaggccttgctcagagctagtttggtgattagagaaatggagaagttctatgta

SEQ ID NO: 33560 - DNA, 1393 bp, Zea Mays
tgataccccgcgggtcacgtttccgcaaagggaaagcctcaaaaggcgacgcgcaagggccgaggagagaaaggaacctgaggaaggcacaccagtttcaagcaatccctaggccgtggcgacgtgctgggaaggattcaaatcaggggcgaagcctaggtgacggcgctgttagtcgcctctagtagctgcgcgacgcgggctggcttgtccgatcggtttgcctcggccatgtcgactaagaaagttctttgcaagttcttcatgcatggagcttgcttgaaaggagagtactgtgaattctcccacgactggagtgatcaagcaaataatgtttgcacattctaccaaaaaggtgcatgctcgtatggtagccgttgcagatatgaccatgtcaaagtttctcgtaaccccacagtgccaccaccacgcccaacgtcaagtacttcaagacgtgcatctacttctcttcaactttcaagttacaatcatccacctcatatggtgcaccaaacagattcaagcaaccaaagacatcagatatctgtggatgtgttggcacattctgccagtaagcctgcatggagaaatgattttcagcatgatattgtttcagatgatggaattgactggtcttctaatcaaaatttgataaaccagacatcattgaaacctgtggatctccctatttgttcttttgctgctgctggtaattgtccttatggggaagggtgccctcaaatgcatggagatctgtgtgcaacctgtggaaaactgtgcttgcatccttatcgtcctgatgagagggaggagcatatcaagttatgtgagaaaaatcacaaacgccttgtagctctgaaacgcagccaagaaatagaatgcagtgtatgtttggatcgtgtgctttcaaagcctactgctgctgaaaggaagtttggactcttatccgaatgtgatcatcctttctgtattgaatgcattagaaattggcgtagcaattctcctgcatctggtatggatgtgaactcagcattgagggcttgtccaatatgtcggaaactttcatactatgtcattccaagtgttctttggtacttctcaaaggaagagaaagaggagatcactgaaagctacaaatccaagctcaagtctattgattgcaagtacttcgactttgggactggctcatgccccttcggaacaagttgtttctataagcatgcctacagagatggccgcttggaagaggtaatactgcggcatcttgatgctgatgatggaagtacagtaattgcaaaaagtatcaggttatcagacttccttggtaggatggatctttagggaccagcagctgtattgatatcaaatatcagtttagcttgaggcatcttcg

SEQ ID NO: 33561 - DNA, 1906 bp, Zea Mays
aaatttccacggaatgaaatatcttctccgtcgccgggcctcccgtccgaatcggatattttttgcgcaccagttctgtcttctgtgggctatccgcctatcccccaaggccccaacccatcactttccacgccgccggccgctgcgctcccagtccggagagacatggactcggaacccgatgtcgagcttcggggccttgacatcgacgtagaacttgacccggaggaccttcagccgtcggtgcccctcaaaaaggtccccggcggcgacctcttcgaggcggcgcgggccggggattgcgaccgcctcgccctcctcctcgacgccggcgccaacgtcaacgcgcgtgaccgttgggactccgtcgcgctctattacgcctgcctggcgggacacgccgaggccgcgcggatgttgctcgaggccggcgccgtctgcgccgagcgcaccttcgacggcgaccgttgccactacgcggccctcaacctgcgcttacgctggctgctcaagtcgttcgaggccaggccgccaccgctcgcgccgctccccaccgcgctgcgggcgacgttccttgcctgccctgccaaccgcaccgctttcctcgagatgctccaggggagcgccggcgccgaatccgccgccctcgccgcggccgccggatttggcccaaaggatgatccatcaagtgcttgccttttccctccagatatcacattctatgtggacagaaagcctgttgaagctcatcgggtcatcctttgtgcccgatctcctttcttcgaaaagaagttcaagacagactggaaagacaggaaggaatttgcaagtgcgaggagttgcaaaaagttttggataaagaagttgtgcatcagaagtatgcggagtacaagtcagcaagagaactggatatggacagctcacagaaacgattcatcttacaagcgcaatccttgcctgaggaagatcgccttccatcagccttgcagcgtattctgcagacttgtctagcaaactcaagagaaggttactgtagtgaggaatcaaatgagatgataaggaactcagaggatgatgatcttgcagatctttatattaaagtaactgtggctttgaagctgctcagaatgttccgcttcttgaggagcatgacataagtgcagaagcatttgaaaagatgctcgaatacatgtatactgataagctagagcatttggaccctggccaggctgaagaactatttgatgttgcatcaaggtacctgctgtttccccttaagcgggttgtagctgatatgctgctgccatatctcgaacatgtttcgcctgcagaactgtgccactggttgatgatgtcagacatatacggtgtcatgaaaataagggagtatatcttggatatcattgcttgcaactttgagatgtttgcagccacccgggagttccgggccttgctcttgactcttccaccaccatccggagatgactcactacggacaacacgtcccagtgcacctgggactggaggcaacaccgaccaaggcaacattcttgatgatttgcgtgagaagtggctagaagcagagggtgccgagctcgacgagagggatgagagtgcagctctgttcgacaagcgactggagatgcttatgctagttgcagagaaagaagccgatgatgaagacgcttgagtttcggagagtacgtgtgctagggtagcattgtttttgcattcttcactgcgcagttgtttaggtttgtgagttacaagttcatcttttgttgtatgaacttcaaacagatcagttttgacccatcaagtatccagtgagcaagtatttatgaacgaattaaacgatgtaagtttcttgcatataatatgcgattttgatgtagggtctagatga

SEQ ID NO: 33562 - DNA, 2230 bp, Zea Mays
atccccaatcgaaacggctcgcagctcatctcaatccgatccgatggcccgcgccgccgctcgcctcctccccatcttcctcccatggcggcgtcctcccccgccctgcctcctccgccggggcttcctaaaccctagcagccccagaacctccgcgcgcgtcgacaccctcgttctccctggagacgagcgcttgcccttcccctcgcccccacgcctcccgaaccagctgcgtcctgactacgggagtggcggcggaggcggcgctccctcgaccatcgcggccatcgtcacctcactcggcggaggccctgcagcggtggggatcgtgcggatctccggccccgatgccgtcgccgtcgccgaccgcgttttccgcccagccgggaccaggagggcgtcgacgccgtggcaaccgcgcagccactttgttgagtacggactcgcgctcgacgcggacggcagcgttattgacgaggttttggtggtgccaatgctctccccgaggtcctacacgcgagaggatgttgtggagcttcagtgccatggcaacgatctctgcttgcgccgcgtgctcagggcttgcttggaagctggagccagacttgctgatcctggtgagttcacccttcgtgcattcctgaatgggaggttggacttggcccaagcggagaatgtgtctaggcttatttcagcaaagtcagcagctgcagcggactcagctttggctggcatccagggaggcttttctaccctagtaaagtcattgagatcaaggtgcattgagttgctaacagaaattgaggctcgtttagattttgaagatgagatgcctcctttggacccagtgatgcttgtcagcaaaattaattgtatgaggaaggaggttcaggatgctttggacacttccaattatgataaattgttacaatctggtctacagatagcaataattggccgtccaaatgttggaaagtccagcctccttaatgcttggagtaagcttgcagagtgaaagggctattgttactgaaatagccggaactacacgggatgtagtagaagcaaatgtctcaattaatggtgtacctgttactcttttggacactgctggtataagagaaactgatgatgttgtggaaaaaattggcgtgaaaagatccgaggctgctgcaatgggagctgatcttattgtaatggcaataagtgcagttgatggatggactgatgatgacactaaacttatggagcatgtttcggtaaatagggttctgcagttccgatggttcttgtaatcaacaaggtagattgtgcgccatttgttcctggagaacagttcaaacaattcagtggcctcttcagaaaacacgtacagacatgtgcagtcaccggtaaaggcatttctgatttggagagcgctgtaatagaggtcaggggtattgagcatgtgccttctgagggacgaaggtggaccgtaaatcagaggcaatttgaacagctgttgaggactaaagaagctttcgcacgtctagagtcatcaatcaacgagcagttaccaatggacttttggactgtggacttgagggaagctgcgcttgcccttgcaacaatcagcggggaggacatctccgaagaagttttgagtagcatattcagcaaattctgcatcgggaaatgatctcgcaagatgctgcatccagtagtttggagcagaagctttttccttgactgagaacaggaaccaacatgctgagtggcacttggttcgcggcatcagaatggtgaacaggcgtgcttgttctctgaggtgccacaaagaacacaagggaggtgaagccctgtccatcctagtgcacaccgtatagatgctaaggatggaaccatcgagttcctgtcttcgacgtcggatacgaatcctgtatactcgtggttgatatgagaaaattttattagacctaattgagaacgcaaacagtttcattcatccgtcttgctgtacgggacgcaacatacccgaattgtgaccaggagacattaaggtgccgtctggttcagacgttgtaacaggaatcgtaatgagatcccttaccggcggtaatgtaatggttattggctgatcccttaccggcggtaatgtaatggttattggctgtaattagattggatagtaccagatactacttgaaagagctcagtcaaataaaggtatcggtctaatccgtttgcgttg

SEQ ID NO: 33563 - DNA, 2217 bp, Zea Mays
ctgtcgagaggtgcctccttccgagcatcctaatcctgaataaaaggctcatctttgcacagagtcattggaggaagtttgatgtttcagcagtactgtgacctttattagatgtctttccgcagcattgtgcgtgatgtaagagatggctttgggagcttgtctcgaagagggtttgaggtgaagtttctgggccaccgccgaggcagatctcacggtgctgtccatgagctgcgtgatccagccccagtgatccagagcagttgctgggctaatttgccccctgaattgcttcgagatgtgattgagaggttggaggccagtgaagccacatggcctaacaggaagagtgtagtctcttgtgcagctgtttgtcggacctggagagaaatctgcaaagagatcgttaagaatccagagttctctggaaaaatcacttttcctgtgtccttaaagcagcctgggcctcgagatgtaaccatccaatgcttcatcaaaagggataaatctactcaaacctactacttgtatctgtgccttagcacagctgtgcttgttgaaagtggcaagttcctcctatgtgcgaaacggacctcccgcccaacctgtacagaatatacaatatttatgaattctgaaaatttatctaggtcaagcaaaatgtacattggaaagctgagtggtgagaactatctcactgagtcaccaggtcgtgagttcgaagcaacctcttcgcatttgcggggagaaggcttgccttggtttattccttccccagactccactcatgtgggagcttccggcactgggtctgtccctttttatgtatcactaatatatctatggcattgaacatctataggtcgaatctcctcggcacaaagtttgcaatatatgatacccagcccccatgcaatgcagcagaacccgggaaaacaagccgtcggttctactcccggaaggtgtcgccaaaggtctcctccagcacctacaacatagcgcaggtttcatatgagctgaatgtcttgggtactcggggccctaggcggatgaactgtgttatgcactccatccctacctcgtgccttgaggctggtggcactgttcccagccagctggacagcatccttgctcgctctactgatgagtcatttggcagcatttccttctccaagtcatctgttgtggaccggtctatgcgtttcagcagctcaagattctccgacatctcaatgagcagcagccgcaggattggagacacggcatcgggagacaatgatgagtgcaaggagaggccattgattctccggaacaaggccccaaggtggcacgagcagctgcagtgctggtgcctcaatttcaggggcagggtgacagtcgcatctgtgaagaacttccagctcgttgctgccacgcagcccgctgctggagcaccaaccccatcacaggctaccccagtgccgcccgagcacgagaaggtgatcctgcaatttgggaaggtggctaaggacatgttcaccatggactaccgttacccactgtcagccttccaggccttcgcgatctgcctgagcagcttcgacaccaagctggcctgcgaatgaagccaccagtcatggctcaaagtcaaggacgatctgtctgtttcacgaagacggtggccccaaattttgctgggccaccattctgttgtatgttgttgatgccttcttaacttacctaggaagctgcgtttagacattttgcacctgatctacagctgctgctgtgtttctgtcctgatcgcattgttttccatagctttgctctgtggagcggcaacttgatctgccctgcccttaactagccggcaggtttattaatttggttttccatactatggttgtattaactgagaagagactccgacactttcgttgtgcctacctaagttctgtctgcctttgccctctgggatatgcaaatgtgcatcttgtaaaatttctgaattgcttttgtggcaagtcatagtaataaaagaactagcttccattcgattgcctgtttgggtacgtgttcctccaagtgaccactggccactgcaagcggcaacgccggcgaggtttttttcttgtttaaagtgcatgttttttttttgaattattatgtgcatgcttgtgctcgtaaaggcaagtgcttgcgaccttgcgtgtttgtgttctacaaaagaaaaaaaaa

SEQ ID NO: 33564 - DNA, 1497 bp, Zea Mays
gtcgaacacaaatgagcagctgattcatgtgtaataatagcgctgtaggatcggaggagcatgtgcaaaaaacatggcaaacttttctataagattgcaaaactgtgttgtgcttgttgcagccatgccaatgacaatcgagcgtgatctccacatggccacagggaacggagaaactagctacacgaaaaactctaggattcaggagaaagttatgtttcagatcaagccagtccttgaggaggccactagagcagcatactcagctctcctccctcgaactatggtcgtggccgacttaggctgctcatcggggcctaacacactgcgcttcgtctccgaggtgattggcatcatagctcgccattgcaaagaacacgaccgacgacatgactacccacaacttcagttcttcctgaatgacctgccgggaaacgacttcaacaatctcttcctgctcatccagcagttcaataagtcgatggcaagaaaccacaagggtgaggcagctgaggcactgcctccgtgctatatctctggtttgtcaggctccttctacactaggatctttcctagcgaaagcgttcaccttttccactctttgttctccgttcactggcactctcaggcatcagaacaactgaaggacaccaaaaataaatgcctagatatctacatcacaaagaatatgccaccgtcgatggtgaagttgtttcaacagcagtttgagaaggacttctccctcttcctcaagctacgctacgaggaactcgtgtctggtggccaaatggttctaacatttattggaaggaagcatgaggatgtgttcactagagagcccaaccatcttcacggattgcttgcgcagtcactgaaatccctagttgatgagggtcttgtggagaaagaaaaacttgagtcattctatcttccgttctactcaccatcggttggtgaagtggaggcgattttgaagcaagttgggttgttcaacatgaatcatgttaaagtatttgagataaattgggatccctacgatgactcggaaagtgatgatgtgcataacagtatcgggagcggtgaaaatgttgctaagtgcctacgagcagttatggagtcgctggtcgcaagccaatttggagaacacatactcgacaagttattcaaagagttcgctcactgtattgccgaacaccttgagaatgaaaaaaccaagcatgttgttcttgtcctatcgatcgagaaagcaataattcatgtgtgaagtgtcttgtttctcactatctttccattattatcacatggtaatgtatgtttgttttgaatgtgcatgtttgtgtcactagtgtattgaatggcatggtgtttttgttgttttctttatcgcttctcctatattttagatgcatgaattttaaggtgatttcacgcaacactcttgcacaaggaattaatacaaataatttgctccttttatgatcttccattcatttttgt

SEQ ID NO: 33565 - DNA, 3024 bp, Zea Mays
ctggcctccgccgtggaccatcatcacccacgggaaacaggcgccgtgttaatggccgccacaacggtaaacgttacccttgccgaagagaagggaaaatagcagtagcgcccggatcccctctccttccctccagatcacaccactgccgcctccgcctgcaaatccatttctagactcaagctgttgctgcgagcgagctagggttggtgctcaggtctccagggtttcgcctccccgctcccggtgcccatcgccttggaccttggcctgccgggttagggttgggtcgcagctgcgggggccgtggggcggggatgcggccgatgcggcgatcgcgggcgatcgggaggctgtagcggcggcggggcagggtatctcttgggtggattctccggcgatggccgcagacgcactatccatcatcccgggcgccgtgcttcgcaacctctctgacaagctctacgagaagcggaagaacgccgcgcttgagattgagggaattgtgaagcagcttgcaacgtttggggagcatgagaagatatcagcggttatctcgctgctcaccaacgatttcacatattcgccacaggcgaaccatcgaaagggtgggttgattggccttgcagcagttactgttggactcaccagtgaggcagctcagcatctcgagcaaattgtacctcctgtgcttacttctttcctggaccaagatagtagagtgcgttactatgcttgtgaagcgctatacaacatagcaaaagtggtaagaggggatttcatcatctacttcaacaaaatttttgatgctttatgcaagctttctgcagattccgatgctaatgttcaaagtgccgctcaccttcttgataagcttgtcaaggatatcgtaactgagagtgatcagttcagcatagaagaattcataccgctcttgagagagcgcatgaatgtgttgaacccttatgtaagacaatttttggttgggtggataacagtgttagatagtgttcctgatattgacatgcttggttttcttcctgattttcttgacggtttgttcaatatgctgagtgattccagtcatgagataaggcagcaagctgatgcagcactttctgagtttcttcaggagataaagaactcaccaaatgtagattatggtcgtatggctgaaatactcgttcggagggcaggctctactgatgaattcactcggttgacatctatcacatggatcaacgagtttgtgaagcttggtggggaacaacttgttccctactatgcagatatattgggcgctgtcttaccatgcatatctgacgaggaggagaaaatccgagtggttgcacgcgaaacaaatgaggaactccgtgctataaaagctgatccagctgagggatttgatatcggagcaattctttcaatcgcaaaaagagaattgaacagtgaacatgaggccactcgaatcgaagcattgcattggttcttcactttgctggatcgatattgtgctgagttcttggcttacctgaacgatatttttgatccactcctaaatgcactttctgatccttcggacgcggttgtcctattagtattggaggttcatgcacgcatagctgaagaatctcaccacttccatcatcttgtatcctacctgatccgcaccttccacaacaaccattttgtactggagaaacgtggtgctttgatagtccgtcggctctgtgttcttctaggtgctgaaaaagtatatcgagagttctccactattcttgagagtgaagttgatcttgatttcgcatccgtcatggttcaggttttgaatttgattttgctcacatcaactgaacttggtgagctccgctctcctcttaagaagtcgttagtggattcttgtggcaaggacttgtttcagtctttatatgcttcatggcgccactctccgatggctacgataagtttatgtttacttgctcaggcatacaatcacgcaagctgtgttattcagtcactgggagaagaagacataaatgtgaattttttggttcaattagataaattgatccgtctcttagagactccagtatttgcttacttgcgtttacagcttctcgagcctggaaaacacacttggcttctgaaaactctttacggtctcctgatgcttttgcctcaggtcaaacttctaaccagactctgttgggagagattatacatcgtggggtttatatgtttacacagcaaagtgcggccttcaagatcttgaggactcgactgaagactgtgccattcagtgaaaatcttaagcgcacatcttcagcgaatccatactctcagattctgcaagtgacggaagatggcaatagaaaccaagatatgcagaactacagtgcaatcaatttcccattccttctccagcaatttgagaacatgcagctgcagcatcgtaaccatttgaaggatcaactgcaatcccgtaaatctgcttcgactttaacattatctcaggagatacaaagatacgaagaagcgcattcctcatcgctgtcagagattaacaggcccccttcaagaacatccaaaggcattttatgatgcatttgttcttgcgatgtatgatatatttgccggaagcatcaccacatatatgttggggctttggttagtctcctcgttttttttcaaaggaggttgcatagggtacatagtgtaatcttttctatttcgttcctagattttgtcaagagatggcaattatttgttggagaaagctcgttgccacattctagtcattcttttcttagtggtttcactgctcatctggtttctgtaatttttcaattgaaggccaaatgagcaaagtagtaattggagatagaaatatgttactactgtcctatctatcgatctccaataaattagcgttgcaatgtaaattcctgttggctcgtatgatatatttattatattatttatatgccttatctttacccccattttatattattacaatatcgc

SEQ ID NO: 33566 - DNA, 1244 bp, Zea Mays
ctgtcttctctcgctcatgtgcaccagacagaggcaacgaactgcctcacgaacgccacgccgccatttcccgcaagcaaagccatccaaaccgttcgctactgcctactactagtagctcgatcgtcgtcgtcatcttcgtcgtttcgctctcagttggcggttagctagcttgcatactagcatcaggtgccccttgccgagccgtacgtgtcgtcgtcgacgacgatggtggcggcgcccagcaagtgccggccgtcggcggcagcgctggtggtggcaccgccgggggcccctcggcgccagctgcggtgccggtgctgcgaggacacgctgggcgtcccgcgccgccggctgcagccgcagctgcacctgaagcagcaggcacctgcggcgacgaccgcccccgccgcggcgccgccgccgaggccccggcggatcgtgctggtgcggcacggcgagagcgagggcaacgtggacgaggctgcatacacgcgcgtcccggaccccaggatcgggctcaccgccaagggctggcgcgaggccgacgactgcggccgccgcctgcgcgacctcttctcctctggatcccgcgaccaggacgactggaaggtctacttctacgcgtcgccgtaccgccgcagcctggagaccctgcgcggcatcggccacgccttcgagccccaccgcatcgccggcgtccgcgaggagccccgcctccgcgagcaggacttcggcaacttccaggaccgggagcagatgcgggtggagaaggagatccggcaacgctacggccgcttcttctaccgcttccccaacggcgagtcggcggcggacgtgtacgaccgcatcaccggcttccgggagaccctgctctccgacatcgtcctcggccgcttccagcccccgggccaccgcagcaccagcggagacatgaacatcgtgctcgtctcccacggcctcaccctccgcgtcttcctcatgcgctggtacaagtggaccgtccgccagttcgagggcctcgagaacctcgccaacggcggcgagctcgtcatgcagactggagaaggcggcaggaccagatgtggcagaagacggccaggcccggcgagctcaaccaccgcttcatgacaaacggacagtccttctttgatccatttactgtaatctactagttcttgacgaccgaccacatgttatgtatgtgataagtgattaaatgtttttttttatggctgtacaca

SEQ ID NO: 33567 - DNA, 13363 bp, Zea Mays
atgctggtgctgtatctgctacgcaaatatttgggtgaatatgttgaagggctttctgttgaagctctcagaataagtgtatggaaaggtgacgttgttctaaaagacttaaaacttaaggctgaagccctgaattctctcgggtttccagtgacagtgaaagctgggtttgttggcaccataacattaaaggtcccatggaagtgccttggtaaagaaccagttattgtcctcattgatcgtctatttgttcttgctcatcctgctcctgatggacagactctcaaggaagaagatagacaaaaactttttgaagccaagcttcagcagattgaggctgcggaggcagctactcttgaagcaacaaataggaactcaagaggagggcctgcaccaggtggaaattcatggttatacaatttaatatctacaattattggtaatcttaaagtcaccatcagtaatgtacacataagatatgaagattctgtcagcaattctgggcacccatttgcgtctggtttcacgttatcaaaacttgcagccgttacagtggatgaggatggtaatgaaacatttgatgcaggtgtagccctagataagctacgaaagtctgttgaactgcataggctgggcatctaccatgactcagacagtaatccttggaagcttaataaaaattgggaagctctaaatcgtaccgaatggagtgagatatttcaagatggcattgaagatggctctcaaagttccatctgggcagtaaatcggaactacttggtctcgcctataaatggaacccttaaatataaacgacttgggaagaatgaaagaggggatccagataccccattggagaaagcctcacttgtcctcagtgatgtttctttaactgtaactgaggcacagtattatgatggcattaaactgttggaagcattttcgaggtttagaacacgtgttgatgtgtctcatttacggcctgttgtgcctgtaaaggaggatcgtcgtgcttggtggcgttatgctgtgctggctggtctgcgacaaaggaaactatgctattggttttcatgggagagaactagacgcctctgccagcttcgacgccgttatgttcaattgtatgccacccttttgcaacaagcagcaaaagttgacatttctgaaattcgagagatagagaaaattctagacatgaaggtcataatactttggaggttgctgggtcatgctaaggttgaaacagtgaaatcaaaggggacactatatagaaaaggggcctcaaagaaaagatggtggccttttgcatggaacacgactggtttaccttctgaggaagctacacacccagaatcacagttagatgaagaggaacaactgactaaagaagagtggcaggctattaataagctgttgagttaccaaccagatgaagatatgtcttttccccttgagaaggtttccccaaatgtgattcaatttatgatggatgtatccattggccaggctggtgcaaggatcatcaatattgatggaactgaggttttatgtggtagatttcatcagcttcaggttgtcactaagttgtatccgaagagcacatgttgtgatgtgacattgaaatattgtggtctatcatctccagaaggttctcttgctcagagtgtcgttagcgagggaaagagtcatgctcttgatgttagttttgtacgagcaccaattggtatggaccttgattggcagctcattgcgaagatatcaccatgccatgttacggttctgaaggagagttatgaacgatttatggagttcattaagcgaagcaacgctgttagtccaacagtaactatggaaacagcaactgctctacagctgaagctggagaaggtcacacgtagggctcaggagcagcttcagctggtgttagaagaacaaagcagatttggacttgatattgatctggatgcaccaaaagttaggattcctttgaatgctaatcaacctttgctgggcaatgagtactttgttcttgattttggccattttacattgcatacaagagatggtaagcatgatgaagaaagacagagtctgtattcaggcttttatattactgggagggatatggctgctttccttatttgtgatttagctcagaacatatactcaatacctgaaaatttagatcaagataccctcctaggtcatacctttgatgataatcagttctgttctcttcttgatcgctgtggaatgtcagtgataattgagcagatcaaagttccacatccgaattatccatcaactcgtgttgcttttcaagtacccaatctggacattcacttttcaccaaaaaggtactgcaagatagttgaactgcttggtgtgcttctccatatgaagggaaacaataatgaatattcaaataaccatgaaagtggtagcttggcgccttggtatcctgctgatctagctggcgatgctagaacattggtttggaggggcattggttattcgcaagctgaatggcatacttgctatgttgtattatctgggatgtatctatatattttggagtcagaattctccgcgaattaccaaaggtgttgtagcatggctagtcgccaagtatttgaagtgccaccaactagtgttggtggatctccttacagtattggtgtgtgttctagaggtggagacacgcataaggcactagaactgaccagcacactggtaattgaatttcgtaatgaaatcgagaaggctatgtggatgaaagcacttgtccaggcaacataccgagcttctgctcctcctgacgtgaacatattaggagatcctgttagccctcccccagaatcaagtacaccacggcttaatagcttgggattagtggatcttgttgtgaatggctctgttattgaaactaaactttcactgtatgggaagctggacagaaagagcagtgattcgcaagagcttctaatgctagagctccttgggaatggagggaaggttaatgttgttcaatcttctcgtggtcttagtgtgaaaacaaaattgcattcattgaaaataatggatgagctacaaggtcgtctttcaatgacttcaaagtatttagtgtgctctgtcatcaatgaaagtgttggagctacctcttccgatacacttgataagggcggcgacctaagcatctttcctgtggatgaggatcctttcatggatgcattaacagattttactccagatcaaaattctaatccagatgactgtcaaattcccaacttcatttctgatgcaaatgagtacaatgaaataggttcaaaagatggttcatgctttgatggggatgaacagaacgcaaaacctactgaaatattttatgaggcacaagatagtaatgtggcagattttgttgttctgacattcttgagcaggagtcctgattcttgtctttatgatggtatagattcacagatgagtattcgtatgtccgcactggaattctactgtaacagacccacacttgttgctctaattgagtttggatttgatcttagcacggttaattctgtgccgaaatgtagtcttgatgtggcacctgcaattgaaactgtgaaacccacagggaaggaagaaggtgctcctactattgtaaaaggattgttaggttatgggaaacgtcgaacaattttcaacatcaaaatggatgtggatagggtatcaatgtttctcaataaggaagatggttctcagcttgcaatgtttgtgcaagagaaatttctgtttgatttgaaggttcatccaagttctttttcaattgatggtatgctggggaatatgagattttgtgacatgtcccttggtccagaacatcgttggggttggctttgcgatatacggaagcctggtgtcgagtcactcataaagttcacattccagtcgtacagtatcgatgatgaagattttgaaggtcataattacagcttgactggtcagctttctgctgttcgtattgtctttctctaccgttttatccaagagtttacttcttactttatggagcttggcacccctcatactgaagaggcaattaagtttattgataaagttggaggttttgagtggttaattcagaaatatgaaatggatggagcttctgctataaagctggatctttcccttgagacacccataatcattgttcctaagaattctcagagcgaagattatatacagtttgatcttggtcaattgaaagtaaggaatgagtttagttggcatggaggtaaagagactgacccttctgctgtaaggcttgatgttctccatgcagaaataaatggaatcaacatggcggttggggtaaatggaactctgggaaagtgtatgattcgtgatggtcgcggcatcaatatagaggtgcgacgtagcctacgggatgtcttcaaaaaggtcccgatactgtctatgaaatttcagataggattgcttcatggtgtcatgtcagataaagaatacaatgtcgcgataagctgtatttcgacaaatctgtccgatacacctaaccttcccccaagttttcgtgaaaatatgaacaggacaaaggagtcaattcgtttacttgcagataaagtcaaccttagcaaccatttgttgctttcacgtaccgttgttgtcatgaccgtggaaattcagtatgcgttgcttgaacttcgcaatggcccagatgcagagtcacctctggcagagcttgctgtggaaggtctatgggtatcctatagaacaacttcaatgcttgaaatggatctatatttgtcaatattgaaattttcaatacatgatatccgtccagatacgaagtctgagatgcgtctgatgcttggatcttgttcagagactgctaatctgtgcgttgatgactcttcaactgatgcaggggtttcgaacctcacaatgctgatactggattatcgttcgcgttcttcttttcaatcatttgttataagaatacagcagcctcgtatacttgttgtcctggattttctgcttcctgttgttgagtattttgtgccttctttaggctcgataactggcagagaggaaagcttagacccgaagaatgatcctcttatgagggctgatgatattatacttactgagcatgttttcttgcaaaaagaggattttattcaactatctcctgtaaggcagctaatagttgatggttgtgatattgacgagttcatttatgatggctgtgggggcactgtatccttatgtgaggaatttgataagaaaggacaggtatactctgggattataatcataattggttgtggcaaaagacttcgattcaaaaatgtcaaaattgagaatggtgcactgcttagaagatgtgtatacttgaacatgggaagcagttactcaatttcttctgaagatgatgtagaggtttctgtgttagaaagttctttcacgaatgatgaagactgtttaaaccttgaagaacataaaaagagaaatctgcagaatgccattgatggtcccacaaaccaaatactgaactttacatttgaggctcaggttgtatctccagaatttacattctatgacagttcaaagttatcaatggatgattcgttgcacattgagaagcttcttcgggccaagatggatttcagtttcatgtatgcttcaaaagaaaaagatatatgggctcgatctgtcattaaagaccttacaattgaagctggttctggtcttcttgttcttgaacctgtagatgtttcatggaaatatacttcagtcaatgaaaagacaaacatagtgttggtgtcgacagatgtttgcatccatctttctctgagtgttgcttctcttatgcttaaactgcaaaaccaaactcttgcagcattgcagtttggtaatattagcccactaatttcttgcacaaactttaagcgaatttggagctcaccaaaaggtgacctacctggttacaacctaacgttctggcggccacaagctccctccaattatgtcatattgggtgattgtgtgtcctcaaggtctgtgccaccttctcaggttgtggttgctataagtaatacttatggtcgtgtacgaaaacctcttggatttaggctaattcatgtattacctggttctctggatctcattgattcctgtcaatcaactgaagaaaacgaatgttctatctggattcctgtaccaccacctggatatttagctctaggatgtgtggtaaatattggaaggttaccaccttcaaaccatgtagtgtattgccttcgttctgatcttgcgacttctgcgacattttcagattgtatacacactctctcacctgctgctggaataatctctgaatttagcatctggcgtgtggacaatgtgattgcttcattctgtgcacataattctatagagcaacccactaaaacagaagctcttaatttgcaccatgttctcctccggaatccaaattgctatattgttaaagatctaagtgcagattcatctatccagaatgaccaatcttctgatcaattaaatcaccgcaagagtctttctggatgggatgtacttcgcactttgtcaagaccaagtaactattgtatgtctactccccattttgaaaggatatggtgggataaaggaaacgataccaagaagccattttctatatggagaccgttacctcgttttggttttgcttcggttggtgactgtataactgaagggtttgaaccacccactcttggcattcttttcaagtgtgacacagttgtttctgagaagcctgtacagtttactaaagtgacacaaattgacagaaaaggccttgaggaaatattcttctggtatccagtgccacctcccggttacgcttctcttggatgtatcgtaacaaaaacagatgaaatgccaagcaaggattccatttgctgccctaaactgagtctagtgagccaagcgaatatgtcagaggatcctatctccatgtcttctagctcaaaaggtccttgctgctggagcatctggaaagttgaaaatcagggctgtactttcctggccagaccagatgtcaagaagccctcagctcaactggcataccgtattgctgaccatgcgaagccgaaggcacgtgaaaacattactgctgagctgaagctgggttgtttgtcggttggcattcttgacagctcttgtggaatggtcacaccactttttgacacaacaatcgctaatataaatcttgcaacacatggaagatttgagacattgaatgctgtattgatctgttcaattgctgcatccacattcaatagacacttggaggcatgggaaccctttgttgagccatttgatggaatattcaagtttgaaacatatgataccagtgaacaccctccttccaaagttggtaagaggattcgtgttgctgcaacaagtcctctaaatgctaacctgagctctgcaaatcttgagctgcttatagaaacgttagtttcatggagaagacagattgatcttgaaaataaatcgtcaacaaaaagcgagggtaccattgaaaacatgaaaaaagctgatgattcttcgtactctgcattgaatgaagatgatttccagagagtggtttttgagaataaattaggatgtgatgtttatcttaaaaaaaaaatggaagatagtgaaatcactattgagcttttacagcatgagagcaaagtttcgttgttgcttccgcctcccaggttttcagataaactaaatgtgttatccaattcaacagaatcaagatactatgttgttgtacagatctttgagtctaagggcttgcctatcatagatgacggcaatggtcacagctacttctgtgctttacgcttacttattggaagccatgcttctgatcagcacaaagtgttcccacagagtgccaggacgagatgtgtaaaacctgtggaaactactgagttactgacccactgtgccaagtggaatgaacattttatatttgaagttccagaacaggcatcagctaatttagagattgaagtaacaaatcttgcatcaaaagctgggaaaggtgaagtaattggttctctgtctatgcctattggacgaggagcaaccatgttgaaacgagctccttctatgaggatgattcagcatgtttctgatgtcaaacgggtgctaacatgtcctcttacaaagaagggtcagatacctaattttgaggacaggaaaaaaggtggtgttttagtactctcaagctgttatgtggaacgttctactcattcatatttccagaggttgaaagacagtataaacaatgtggagagcgacttctgtataggacttagcccagatggtccatgggaaagttttactgcagctttgccagtgaccgtccttccaaaatcgcttaataataaccgttttgcatttgaggtcactatgaggaatggaaagaaacatgcaaccttgagaggtcttgcagttattgccaatgatgctgacataaaacttgaagtgtctatatgtcctgtaaacatgcttgataactctatgttaaatactagattggcaagctccaccagtgttattgatgaagtatttgaaaatcagtggtaccgaccaattgcagggtggggacataacccttcaattggtcacagaaaagacttaaagcagtggagcacaaaggactgctcatactcatctaaggcattttttgagcctggccttccatctggttggaggtggacctcaccgtggaaaattgaaaggttgaattttgtagataatgatggatgggcatatgctgcagattttcaaaacttgaattggccatcatcatcctggagatcttctaaatcaccacacgacttcgtgagaagaaggcgttgggtacgttctagacagcagtcgcaagaacaaagtgcagaaattcctagaaaagtacttgctactgtcagtcctcattcatctactgcgttgccttggacatcgatgattagggatatggatttatgcttgcaagttcgcccatattctgaaaaatcagaggaatcatatagctggagccagatttgttcactaggttctgagagtatacctaaacagcagcactcttcactttctaggcaaagcaccgtaaagcagtcagtggtatcatcaaggaattctgttcttaagcttgctgaactcgagaaaaaagatgtgctctcatattgccatcctcctgttagcactgaaagatatttctggtttagtgttggaattgatgcttctgttgttcatacagatttgaatgtacctgtctatgactggagaatttctttcaattcaattcttagacttgaaaataaacttccctatgaagctgagtatgctatatgggagatttccactaaaagtaatatggttgaaaagcagcatggtattgtcccttcgggtggaagtgtatttatctattcagcagatatacggaaaccaatttatcttacattgtttctccaaaacggttggattctagaaaaggatgctgtattgataatggacttgttgtccttggaacatgtttcttcgttctggatggttcagaagcagagccagaggagactacgagttagtgttgagcatgacctaggtgctagtgatgctgcaccaaagacactgagattgtttgtcccttactggataaaaaaccactcgtcaattccattatgttatcgcatagtagaaggggaatccacagaaagcacagaagcagactcacttagcagaccagactcgctaagtagagtgtctaagtcttcaaaattttcccttaaatattcttcaaagtctcttgtcagaagaggaacaatgtcgcacagaaatatgcaagtactggaagatattgaagattgtagcacagactatgtgatgctatcaccacaagattacttgaaccgatctgctggtatgcgctctgagtcaagggataacaatttcagtccagctcgagttgcaatatctatggctgttggtggttgcacacagtacagcgtaggagtatcgctttttgagcttgagaacaaggagcatgttgatatcaaaacatttgcttctgatgggtcatattactggttctcagttcaattgaagatggcttcagataggacaaaggtggtaaatttactgccgagagcacttcttatcaatagaattggaagaactatttttctatctgaatatcatgatgagactgaagagcccttacaaccatatgaacctccaaaagtatttcaatggcgatcagaatttggaagtgaacttttaaagttgaggttggagggataccaatggagtacaccttttagtatcaatgctaatggagttatgtgtgtgctcatgaacagcacaacaggaaatgatcaggcttttgtcagggtaaatgtgagaagtggaacaaaaagttcacggcatgaagttgtatttcagcttgattgctggtccagcccatacagggtggagaatcgctccatgttcttgcctatacggtttcggcagtttggtggtgatgatcattcatggcgtaatctgcttccgaattcatcagcttccttctttttggaggacctgagcagaaggcatctattggaagttttggttgatggaactgaccctatgaactccatgacatatgacatcaatgtcgtaatggatcatcagccccttactaattcagatgcccttaagaaggccttacgtgtcactgtcttgaaggaggggaaattgaatgttattcaaattattgattggctgccagataatagaaatcgaggacagataactgaaaggatgttatcaccaatctttcagccatcagaggtcgactatgggcagtcatctcctgatctggatagtgaatttcatgttactttggaactaacggagcttggcatttctgtaattgaccatatgcctgaggaagttctttacctctcagtgcagcaactgttacttgcatactcatctggaattggctctggagtaaatcggctcaaaatgcggatgcattggattcaagttgataatcaattaccatttgttcctatgcctgtacttttctgtcctcaaaagattgaaaatcagtcagactatattttcaagttctctatgacagttcagaccaacaattctcttgatttttgtgtctatccttatgtcggtgtccaggttcctgagaattgtgtgttctttgttaacatccatgaaccaatcatttggcgcctccatgagatgattcaacacctaaaattcgataggatatatagcaatcaaccttcagctgtttcagtggaccccatactgaaaattgggcttctgaacatctccgagatccgatttagagtgtcaatggcaatgtccccaagccaaaggccaaggggagtatttgggttctggtcgtcgttgatgactgcattgggaaacatggagcatatgccggtccgtatagctcaaagataccgggaggaattgtgcatgcggcaaagtgcacttatgaactctgctatatctaacattcaaaaggatcttcttagccaacctcttcagctactttccggtgttgatattcttggtaatgcgagtagcgctctgagtaacatgagcaaggggatagctgcattgtctatggacaagaaattcattcagggccggatgagacaggatagcaaaggtgtggaagactttggggatgtcataagagatggaggtggtgctcttgcaaaaggcatcttcagaggtgtcacaggcatattgacaaagcccatcgagggtgcaaaatcttctggtgttgaaggttttgtgcaaggagttggaaagggtataattggcgcagctgcacaaccagttagcggagttcttgatcttttatcaaaaactactgaaggtgccaatgcggtaaaaatgaaaatatcatcagcgataatggctgaggagcagttgctgcgtaggcgtcttcctcgagctattggtgggaatagtttgctctatccttatgacggacacaaagctactggccaggctatcttgcatctagctgaatgtgctacattccttggtcaaattgatatttttaaaatccgaggaaagtttgcttctaccgatgcttatgaggatcattttttacttcctaaggggaagatttttttaatcactcacagaagagtactattgcttcagttaccaatgatgacccagcgtaagttcaatcctacgaaggatccttgttcagtaatatgggatgtattatgggatgatttggtaacagtggagatgacccatgggaaaaaagatcctccagattcctggccttctaagcttattttatacttgaaagctaaaccttcaaattcgaaggaaattgttcgtttggtcaagtgtaatcgaggttcagatcaagcatctatcatttactcggcaattgacaaagcttataaagcttacggtccaaactcgttgaaggaattcttgagatggaaggtaccaaggccatatgcccctcgcaatagtagtggccgaagtatccaagacttatcatttggttaaaaggtcaacacaaatgcacactttagtgttaaacacagtagaatcttaggatgaaggtattttaggttgacacttttggttaccaggcaaatgatatattctacatatacactataggtatcagaggataggtactttgccttcatgtaaatagatatattttaggaggcgccggtattcatgtaaatgtgaacatctctgttataaagaaaaaaaataataatgcaaattatgcaagattcattgctgctgtcttgttgcaatgtttaatgtgttctcttgcgattgtctaaagacccaaaccgttaacgtgtctttactactatggtttcatttcacagatctctatgatcataccttgctcattaaaagcatttactattcttgtgatggggagatccatgtccgagttttggccaaaccactacagatctggtttccttcggcatatacaatcacattcaatatggattttttgacggaccggttcttcgcgaagagtttatcacttcactactacaccgtgtctcttatagatgtatttatgatcggtttcaggattatgtcatgcagtttattaattgtttttcatttttagaaaactaaactagtgtctcagggttgtacatggcttaagtccctttgaatataataatagtatgcgacaatgcaaagttggtaagatgggagttcaattcatttggtgatgcaaccactactgttagac

SEQ ID NO: 33568 - DNA, 222 bp, Zea Mays
agttgggtttatgtttttcttcttacatgccccgcaacagatgaccactcagcctataaaaaccctcacacccgttcgccagaatccagcacattaacccacgacggcccaaaatttcttgtgctgcgcttcttcgctcgatttgaagtcctcgttggctatgtagatgtagctacatcgtcaacatgttcactgctgacaacagagtccattggaaaccgc

SEQ ID NO: 33569 - DNA, 1631 bp, Zea Mays
gtcgctgctcgcttcgcatcaaccgtatccgcttcttgggaaggctccatgcctcgccccgccgcaacaaactcctccgctccacacctctcaccaagaccgccccttccctgcccgcacacggcggcgccccaatctctccaccacgtgtgacggcgacggcgccccatccctctccagcgcgcgtagaggcggcgtccctccctctcccgtgcgtggcggtggccggatgcggtggaggcggagggtatcgccatcggcggtagcggcggcggcggaggaggcggcgccatgaggggggcgcgggcgggagtgggcgctggctgcggcggcaggagataatttccaggcttcagaactttgacaggagcagtgttgcatctgttgtcacagctgcagataaggtgtggacaatacatctacctgtcaacgcttactagagttactatttcgttcttgcagacttctttgagactatatgatgtgaaaagagaggtctctattacactgtttttatctgttgttttcttctagaggtacgaataatctaagattgtgtcgctgatgattttgtcaagaaagaagtctagaatcagacggcaggtcattgtgcaggactcaagtttccttattcttcatccaagatgttaattgaagtcattatcaacacaagttagctgtataatcaacctactctcttcgcatacaatcaacatctatgaaaaccaggaagcaacctataattttctcacatgtgtgtattttttaaagacaaaatagaatgcggcctataaattagttaaatttagaaagtgcctgttaaaagagccttttttctgcacaggtgtttaaccaaaatttgtctaaatcggtggaaataaagctgttattggtctactcaaccttattcatgatcatgttacaagtccattacttgtaagccaccataacaaacttgctgcagggaggtgcaacccatgttgacatagcatgtgacaaggacttagtaaagcttgccatggatgttaccaaccttccgaatatttttttgtggaagtggaagggttctagcagggattctcttcccttcagccgaaaatcaacaaggatctattcagggtggaactaactgacatcgaggtttgctcgagctccctcagcacatagctgaacaaggtcccgatgaccgctgttatctgcgtacactggtccaaatcatctgcactgaccagaagaggctcagctacgacacttgaggacgatgacagtgaactgaatatattttcacaattagtctagatttatggatgtgtgccttcattaatggtgacagtagtactcatgtggctccattgctcattgagatatggtggcatgttgaattgttgaccccccctacgttgtatcacatattcacatctactagcactggtagttatgaactaggacaacaactctttttatttttcgtattagccttctttgaaatgatcatgcgaatattgatattttcacattgtttttttttgcgattttagccttaattttcatataactagctcatatcgtcattgaatataagtctttaggttgttatgtttaggctgtctctagcatcctttgtatcccac

SEQ ID NO: 33570 - DNA, 1426 bp, Zea Mays
aaaccttttttcccctctgcacgctactctctcctttctcactaccccgcccgtcaaagcgagagcgccgtatcaccggtctatccatcccttcaccgctgcctcgacccgcgccgaaagatacctttcccccccttcctctcgcgccgccgttttggtgcgaccatggcggcggagggggaggccaagaacccgtccggcggtggcgaagggggtaacccccagcaccagcaggcagtgcaggctgcgccggcggagccgccaacggcacagggggaagcggtgcaggaggctggagcgcaggcgacgggacaagagccggagggggagaaggcgaatcgagatggggagggaagcgcgggggagaaggacgacggcgcgtgcagagatctggttctggttgaggatccggaggtgctcgccgtcgaggacccggaggaagcaaccgcagcactccaggaagaaatgaaagcgctcgtggcatccgtccctgacggtgctggggcagcattcacagccatgcagcttcaggagctagagcagcagtcccgggtttatcagtacatggctgcccgagtacctgtgcctactcacctcgtcttccccgtatggaagagtgtaaccggtgcatcctctgaaggcgcccagaagtaccctactttgttgggcttagcaacactctgcttggacttcgggaagaaccctgaaccagaaccagggaggtgccggcgaacggatggcaaaaaatggcgatgttggagaaacactattccaaacgagaagtactgcgaacgccacatgcatcgcggtcgcaagcgtcctgtacaggtcgttgaggaagccgagcctgactctgcttcaggctcaaaatctgctcccagcaaggccaccgaaggcgccaagaaggttgacgacaagagcccaggtagcaagaagcttgccgtggcggcggcagctgcagctgctgtgcagtctacgtaattgatgcagcattttagtagtcgcaggaagagcatggcggcgctggcaactagcgccttcttttcattgcatgtgatctttagctataacctcatttagcacactcccagtggtgtccgtgggaggaggaagccgcaagaacttcccccgtagggtgtcgactgaaaaaattcacttgtagctgtatagtttgatctctagctttgtcgtgcctccggccttcaggtaggcgatgcggcatgatgttataaatcctctcccagaactgacaatatcgcattgtaacccaagaagccggtgcaagaacctgtgaaactgcattgatgcgcaattatgtgattcatcagttgtataacaaagtggaagatgcataattttatgcctcgtggaggctgtgactatgttattctgatagtaatgagtacgccagagattggatgtcgag

SEQ ID NO: 33571 - DNA, 1913 bp, Zea Mays
ccggccgcgacgcggcccgcagccacggccttccgtaatgtcataactccccttctcgagtccatctccaacctcatccctcccaccccaataatacatccagccggcgccatcaggcccggcaacgcgcaagcggggctgaccatcgaaccctagtccccggccgagccgccctccgccgagccttgcggccgctctgcgtcatccctcttagtctccctccgttcgacacggcttggatccgagatggaatcaccgcccctcacagctgaagcaattgcttatacagagaaaaagatggacatggctttggaggatataattaaaatgtcaaagaaaaagaatcctggaggcaagaaacccccgaggcagccgataaaaaagcatccattccagaatggcaactctaataaagggaatggcaaggttcaaagttttatggagtctagatcaaccattagacaaggtgttcttgcacagagaaggtcaaatcttggtggaaatcagttccctgctacaaagcaggctgcgaagaaggctgctgttatgccaatgcacaagggggctatccgttggaacaagccaagtgcaagtaccttagtgcagaggaggcctgtaggtggtgcttttcagaatgccaaggtatggagtatggactttgtcaaatcttgaccttaatgctgagtaaataggacaaactggccgaaaaggtaaactgtttcctaatgtattgtatctgatgcataataatcaacttaagatgtaatgggtgatcttttggcctatcaatataatgacatcttggaaaaccattgctattgtaattgatattttgtgttctttcttgatatgttttaatgcatagacagcatagttttctcacataatccatcttttttctggtatcctcgtgtcacttcataatcatctgtagtagtttcagagccgtgatcagtgctatactcgagtccatttttatttttagaagttgcgtgatacatgaacttctatttgtttgattaatatattcgttgaattatcatgtcctgtagttttttttgtcgctgctgatcatacgcccgtaatctatttgtaggtcaaggagtccaaccaggcagcaccaaggacgatggatgcactctttgcacagatgaaggcgcaacgcttgaggacggtacctcaacagcaggcaaattcttccccctggagtcatttcaaccagcatcgacgtgttcagcagcagcagaggcgaggcagagggtatggtggccgtaatgttggcaaccaatgaatccaactagacatatctactgcatcggagccctttctcttcactggtcttttggaccttggaagaaaggacgccccttggaaaatcaaacttggctttgtttattggaggggtgacaatgggctctaacttggctttgtttattggaggggtgacatcgggctctaaattttacactaagatttaaggatctgattaagatcaggccctatttctattcatttttaaactaaaatttatttagtgtcctactattttgtgaagcgtttggatcgtgatccattaccacctcacctttggacgtggacaggatatgaagcgaagtttgtttgagttttctagttgtgtgcagtctgcttccgtttcagcatgtataatgacatggaaattatttggtcagagattatgatgtcttgtttcttggcttgattagcttcatccccaactaagagtaattcaccttacctagggatgacaacaggtcaggtttagatagggtagaataaatatccgtccgctataatatttgcgaagattatttatatctgtctatgactatactcgcggataacttgtaccggtatccgtagctattcgtttgattggttatctgtactatttc

SEQ ID NO: 33572 - DNA, 1180 bp, Zea Mays
ccgtttgaggttttacctgagggggcactggattggccgcgcgtggtccgacgaggccacgctgtcgcgtctggttggcgcgctcatcgcgttcaagccgctctactcggtattgaaactcgcctcccgcgaggtcatcatcaggacggcggagaagtcgaacatcccgtggagggagatgacgaaggaggtgctggagtcggatgtgtgtgaggtgttcgagagaatccaagacccaaacctcgtgtaccctgactactatctcaacccatttcatgcctacgatgaagggaatctatcatggctggtaattcactttttatttgttgttgtcagcttctcattgttttcttatgtactctgataatctgcagctcaacttttcgtaacaatcctaggttaccgttctttctctaaaatcttgagaatgtgacgccgttgaaaaaaaacagttgaatgatatcatattttgtgcacgctcatactgacaatttgatgttgaatgagctaggctgcagcagaggccgagcctgcaacaatgtcgatcacaaagagggcaatacgtgaggctacatcaatcgaagaggccaaccaaatcgtccgcggcaactgactgaatgtaattgaggagcatcatctgaagtacttggggagctcttaggtaaacgacatcctggacattggctgctctgttggagtaagcaccagatacctcgccgagaagttcccatcagctcaagctgttcgtttctgaatgatgcatgggctcgacctatcaccatactttcttgctgtggcggcacaaaaggaagaaaaactgtcacgaccaaagcctattcgctgggttcatgccaatggtgaagtgaccgggctgtcttcagattcatttgaccttgtctcccttgcttatgtgtgccatgagtgcccagcacgagcgataaccggattggtgaaggaagcattcagggtccttcgcccaggaggaacaatcgccttaacagacaattcggaactatccccagttttgttcactctgatgaagagtaccgagccttttcctggacgagtactacatgctggatttggaggagacgatgagaaaagtggggctttgttaacgtttgctccatcctgacagaccccagcatgttgtatttgaagagcaatttggcagtgggag

SEQ ID NO: 33573 - DNA, 3524 bp, Zea Mays
ttttcctttggcattccatcgcatctcaatcctgttaccgttgtggactcccactcccctgtctgtctgtcgcggtgtcgcctgacaccttcttcttcctcactcccccctcaacctcatccccatcccgccctcgcacttcccacccaccccaatccatccatccatccacccgtctgaaaaccaaacccacattcaccagcgagcaagcttcccctgccctcctccggccgcctcattctcgtttccatataaatctgtaactgcaaggacaacccaccacaggacacacgaggtgaaaggagatccgtgaggaggcgcctcccccatggctgagaaggagggcaacctcgaggccgtcctcaaggaggccgtcgacctggagaacatccccctcgaggaagtgttcgagaatctgagatgcagccgcgagggtctctccaccgagcaggcgcagcagcgcctcgaaatctttggcccaaacaagctcgaggagaaggaggagagcaaattcctcaagtttctgggtttcatgtggaacccactgtcctgggtcatggaggctgcagcaatcatggccattgctcttgccaatggaggggggaagccaccagattggcaggactttgtcggtatcataactctgcttgtcatcaactcaacaatcagttttatcgaggaaaacaatgctggtaatgctgcagcagccctcatggctcgcctcgcacctaaagccaaggttcttcgtgatggccgatggaccgaggaagacgcagccattcttgtaccaggagacattgttagtattaaactcggagatattatacctgcagatgcacgcctccttgagggggatcctttgaagatcgatcagtctgctctgaccggagagtcactgccggtcactaaaggtcccggtgatggtgtctattctggttcgacggtcaagcaaggtgaaatcgaagctgttgtgattgccacaggtgtccacactttcttcggaaaggctgctcaccttgttgactccacaaaccaagttggccatttccagaaggtcctgacggctatcgggaacttctgtatttgctcaattgctgtggggatgtttgttgagatcattgtcatgtatcctatccagcacagggcttaccgccctgggatcgacaacctcctcgtccttctcattggaggcatccccatagccatgccgaccgtcttatctgtaactatggctattgggtcccatcgtttgtctcaacagggggctatcacaaaaagaatgactgcaatcgaggagatggctggcatggatgttctttgcagcgataaaacaggaaccttgaccctgaataagcttactgtggataggaaccttgttgaggtttttgaaaggggcactactcaggaccaagtgattctcatggctgccagagcgtctcgcacagaaaaccaagatgctattgatactgctatagttgggatgctagctgatcctaaagaggcacgcgctggaatccaagaagttcacttcctgccattcaatcctactgacaaaagaacagcactgacatacattgatggtgatgggaaaatgtatcgtgttagtaagggtgcacctgagcagattctccacttggctcacaataagtcagatatagagaggagagtacatgctatgattgataaatttgcagagcgtggacttagatcacttgctgtagcatatcaggaagtgcctgaggggaggaaagaaagtcctggtggtccatggcacttcgttggtctcatgccactttttgaccctccaagacatgacagtgctgaaacaattagaagggcactcaaccttggtgttaatgttaagatgatcacagttggcaatcggaaaggaaacaggacgtcgtctaggaatgggtacaaatatgtacccctcttctgctttattaggacagaacaaggatgagtctattgctgctttaccagttgatgatctcattgagaaagccgatggttttgctggtgtattccctgaacataagtatgagatcgtgaaacgtctacaagcacggaagcatatctgtggaatgactggggatggagtaaatgatgctccagccctgaagaaagcggatatcggtattgctgttgccgatgcaactgatgcagccaggagtgcttcagatattgtcctcacagaacctggacttagtgtgatcattagtgctgtgcttactagtcgtgcaattttccagcgtatgaagaattacacgatctatgctgtctctatcaccattcgtattgtgcttggatttatgctccttgccctcatttggaaatttgatttccccccattcatggtcctaatcattgcaattctaaatgatggtaccataatgactatatccaaggatcgtgtaaagccatccccattacctgacagctggaagttggctgaaattttcacaactggagttgtccttggtggatatcaggcaatgatgactgtcatcttcttttgggctgcatacaagacaaactttttcccaaaaatatttcatgtggaaagccttgagaagacagctcaagatgatttccaaaagcttgcatctgctgtttacctgcaagttagcaccatcagccaggccctcatcttcgtgacaaggtcccggagctggtcatttgtcgagcgcccagggtttctattggtctttgctttcttggttgcgcagctggtgagctcttactcgctttccttgtgaagtatttttgcattcacagctaaaatctcctgtttaattgcagattgccacactgattgctgtgtacgccgactgggcgttcacttcgatcaaaggcattgggtggggctgggctggcattgtgtggctgtacaacatcatcttctacttccctctcgatatcatcaagttcctcatcagatatgctcttagtgggaaagcgtgggatcttgtcattgagcagaggattgcgttcacaaggaaaaaggactttggtagggaggagagggagctgaagtgggcacatgcacagaggaccctccatgggctacaggcacctgatgccaagatgttcccagagaaggctgggtacaatgagctgaaccagatggctgaagaggcgaagaggagggccgagattgcaaggctgcgggagcttcacacactcaaggggcatgtggagtctgttgtgaagctgaagggactcgacatcgagaccatccagcagtcctacacagtgtaactttgcctgcccttcccagaggaagtttcttgttctttttacccaccggcgtgtgaatttgatggtggctggcttctctttgttttatttatttatttaaccgagctgcaagcaccgacaagtagctgaaatgagacagacagacccctcgctgtaatccctgatttcttctgtcctctcctcacatggtatgccaaccagtttatgaactttgctcggctatataaataagtgcttgaagaggggagcagggttttgggcca

SEQ ID NO: 33574 - DNA, 7094 bp, Zea Mays
cctcgtcttcctcgctccgccaccgccacgctgaaaacccacgcgctaagcgcaccccgccaagtctaccagacgctctccggagcggcacgcgcgcgccaatggcggggccttgaggtgctcgtggggtgagggagggaggacggcgctggttagtgagggcgttaagcggcggctcggcgcggcgggcggggaggatgatacggcaccagatacggaacgagtatgggctggcggatccggaggtgtacgcggccccgggggaggaggatgacccggaggcgctcctcgagggcgtcgccatggccggcctcgtcggcgtgctccgccagctcggggatctcgccgagtttgcagctgaaatttttcatgaccttcacgaagaggctatggctactgcttctagaggacatggtttaatgctccggttgcagcagttggaggcagaatttccagcagttgaaaaggctattatatctcagacggagcactcaaattatccacatgatgatggagctgagtggcattctaatgttcaacttaaacagaatgtgatcacacaaggagatatgcctcgtttcattatggattcatatgaagaatgtcgtggtccgccacaattgttcacattggataaaagaaggccatgcgttggaggaaaggggcaactcttgaatcattactcactgcaaactcagagtctcaaattacccccaaggatcgaacttctagaaaagttccacctaggacaacaaagttgaaatccaggcaaccacggagtcctgatcataaaaccactagcagaatcttgagggagcatctgcaagaagtgattttatcgcagaaaaaaatcatctccagatattcggtgaggcattactatgtgaaatttggatcgcctgactcaagtgaaactgcacctccttttggagaaatggacagttttggcgcccttgttcaatcttctggtaaattggatctgacaaaagttgttccagtaaacgaatctgatgctgtggatactaaatctgaacccattgatggatcggcttatttggagctaggtgataaacggaatctggggaaacaacatgaaccttttcaacaaaatggcatggtccatagctcagaaaagctgccggattgtccatacttggatattggagaaagtaataacagatcacatttgacatgtgaagagaaaccccgattggctgaggttcctgctgatcagaaagatgttgatggccgcaggcctgatgacatcgtgagtgatcaagacaacttcattggtgcttctaatgacacggacatggaaaacaaagaaggtcttcaaatgaaaactgaatgtgatcccagtgccagtgttgaactggttgaattgaaccgtcacaacaaggaaggtgacaaagtattgtatgccgaacctccagaagtaggtcctgcaatagactcgtcattgggattggataatgcaagcagtggtgaagaaccaacctgtgtggacttgccactgtcaagtgattctgctcccacagtgtcagccaccaatggtccaaactctggttcacaatctggcagacaaatgaatggtgttgactggtccacagacgaagagtcttctaacgatgtggatctaattgacgtgagctcatcttctagtgtagtttctgaaaatggtgacgtacaaaacaatgattgtctcgttagttgtctacaacacgaggaagcgattcactctctgagtgatgatcatgctggtgctatccataattctgatgaacagtcaccgaatacgtctagcaactgggatgatatggctattggctgcaacaattacaccgagaaagtacatcatccagtggagcatgtccaggatgttgtactagatgatatttctatgatactgagcaaacctaatgatgtttcagaagacgaagataaaatcagttcagggaatgctgatgatttgtctctccaccctaccaaattgaaccaagaggaaatacaggagttgaagacagaatcggaagaaggcagatctctagaatcaggaagttcacctagcaaagcatcattgccaaataaggatcatgtgtcgatgaatgatgtagaagccgacactgttacaattcctaaagaaactgttgcagatactgcaccaacaggtttggatcctgatggcatcgacgagcgtcaagatggagttgcaccgaaatattcaagcatccacaatagtgtactgtatgaatcatatgatgacaagattgctgaagacacacactctttactagatgatggcctatcaactactttcgatgacgataagcatgttgcagaggatcatcaatttgttgttcttgaacaaaggacttgtccaactagcctcaacacatgcaaggatgattctatgcaaggatgtgccgtggccagggatttcactgatgctgaaaagcttccgggagtcgtttcaggtgtattagcttctcaactggagacagaatctcatgtaggagagacacttgcatccacgtcctatgcattcagtgatgatactgaagcactagagattggtgtccctctagcccctggtacttcctttctacctaacaccagtagttccttggtagaaaaacatgaattgactgaaacagaagaaattgcagaggttggtgaatttgtggttgcaaaagaatcaactactagcgtatttgcagttgatgtggtacctcccaaagagttcattgatgctaacatacatcctgaaaaggtagaggttctggctacaagtttgactgaagaagccactaggctggatttacaactacagtctccttccagggaagttttggaaacaacggaagctattcacagaaattttggggcagtagatgaatcaagagaagatatctctaagaagagtatgttgcagacagacaatagtcctcttattgtagagactacaagtgaaaaatgtagtgacagggatggtgatacacaatttctagtaaaatctgattatcaagaggaattactaaaagagggcagtcataatgctgaagatcgatctctctgcgatttgaacaaggatggtgcagtaaccttgaaaagtaatgcagttgagaaacaaccagtgaatgctggtcaagatttggcgtgggggatgcacgctcaagattctagtagtacaaacccgttcctggatcctgcctacttgatgagccacactcaaatttattcatcttccagtatgagtagccaaccatgtttccctgaagaagaggatttcctttcagagcttgtaatacaacatgacaatatgggagtaactgctgatgccctttgggaacctgcaactccacctgatgatgcgccattaccatcagaaattatgactgaagatgatttcagatccttctgccaagaatatcatgagatagatttttcatctgtcactaactgttctcacagtgaaccagcctcagattctaacaaaattccaaatgcttttctgatcagagagtcagattttccatgttataactctgccttgccagtgaagttagatcaggaagcctgtattcattctaagttctgttctgagtgtgtcgaatattcatgtgctgtggaaagacaaggcactacatcaatggttgtttctggtaaagaagatcgcgtgggcaaggacgagacaccaggagtagatttccatttaaattttctcgagttttccaatgataacagaagtcctgaattaaatatgctctccgttccagtggatttacggcaggaactgcatggcttgcctgaagttgattctcgtgatagttcccctttgctgcataaggagaagactagtgaagaatgctgcttttctttaagcaacaacgttgttgaagtgaaacaagagctggaaatccgtgctgaccttgttccacattcttctattaatgaaaaagtagatggattagatgaggctgtaccggtggaaccagaggcccatgcctgtgccttggatgaatatgacaaccaagatgtcccacacatttcaactagtgagaagaatgaaacccttactttgggcaaacctgttttagtccaggggccagaagtttgtgcctttggtggatttgaatgtgatcctccaatcattccatcaccttcagttgatgagactaaggacaatctagaagtcagaatgaatatgatcctccaatcattccatcattctttgaggacttcttttcaagcagaacagaagtcagaatgctacacctcaggtgaacatgattctcaaaccgttccatttcctttgcatgatgagaatatcaatgaactggatgatcctcctttgagcaatgctgacgaactggaccgggaatcaaaagcttgtgttccacatgaatgtgatgctcaaatcgctccatgttcaactgatgaggatatacatgaattggatcaccctcctttgagcagtcccgctttagtggatcttgaatcagaagaccatgtctcggatgaccgtgattccgaagtcaccccatgtttggttaaagataagattgatgaatctgtagatgctcaaccaaacctgcttcctggggagctagagcaggaaactcatgcaccccctgaattagactttcgagttgctccacaatcagcgaaagaatctgattgctcaactgaatttgattcccaggccgcaccatgttcttcaaatataccagtactagctaacacaacagtgtcgacttgtatttctgccatgcctagcagtgaggaaacgtatcagttgtctcctgttccaccacctactgtacaatttcaaaatgattcctacaaagatcctcaagctctactcgctgattcctacaaagatcctcaagcgccaccccctctccctcctctccagtggaggcttggaaagcctcggctaggacttctgagtagaaaaggctgtatgactgaacctgcaagggtaatagatcctgttttgcagatatcaagccaagagatggatattaggccaggtttgcttgatccaacggatagatctatagaaccagtatcctgtcaagaaatcaaagaagatagatgtgagagttctttgatagatcataatgatcaaaatgtggattttgatagattatcgaccagggttgcagtaactgatgttgcaaggactgaacacaggctatccttagagacttcagaggacattaagcaacaggggcatatttcttcatcggcaacaggagttggggaacacctggatgctgggttcacatcaacaatggcagatgaggaacatctggatgattctgggatgacacatggaacagctctatacttatcagaccctctgtttccattacctacatatgaactgcaggaccctcaaccagatactcgagaaaatagcgagcatcccagtcaaacacatggagctgcatctggggatgataagtcaatggatgctgttggcagcatggaaagcaccctaacaaaaggacatgtttctggaaataggtgctaccagcaacctcagcatggtgaatcgtcctcagagacttcagaccataaagagcatattacaaatgcatcagaggatggtgttaagcatcagtcaggtacaagtgaggcaccttcagacacagcaaagcattctgcaccaggcacgctgttgaaagggaatgtccaagagagtcaaattttacaggaacataatgtggggagttccgaggacgatcaaccaggaggcctgttgtacagcttagaaccagtggcacctcaaggggaaaacaaaaaccaggttaacaacccaggcctgttactggaatggcctggagatacaagtgagttggtcactggccttgaaaaaagttgctatgcgcatgctgagcagccacctgtgatgggatggactgttggacctcagatgcttcatcctaaatatggtattttagaagaagagagccaatttgagcctaatatcgccgacaatcatttaatcaggaagcctatttcgataaaaaacatcccaaggaatccactggttgatgctgttgctgctcatgatagaagctcgatgagaaaggtttcagagcttgcaccaccgactgacaagccgaagcctaacgagagaaacatgttgctagaacagataagaaacaagaccttcagcttgaaacctgttgctccagctcagcaaacagcaatgagatcccctgctagaaccagtactagaaacttgaaggttgccgctatcatagaaaaggcaaatgccatacgacaggcagtgggaagtgacgacgaagacgcagatagttggagtgatacataaatcccccaccgtttgccctaccctcttggtgcttctttccatggcagaaaggtaccgattcatcaagagcattggggacaggatggggatgcacaaccatgtcatcgtttttgtttgccctaccctcttggtgcttctttccatggcagaaaggtaccgattcatcaagagcattggggacaggatggggatgcacaaccatgtcatcgtttttgttagtaatataatgctagtcttgtgtatagtatacgcccataatccttttcattttttgtatgtgtattctttcgaccgattgtttgtatacctgcctctctctcccacagcagcaaaggctgttgcggttggcatgatcctaggatagcatgcatggtctatgtaaattaaacagtagtagttaagtaaagaattgttccatcttttctggaaaaaaaggtgagataatggcatcatcgattccacacagcaagcatagcagaccttgaattgcaaaaatatgaaaaccaatacacccgcttagacgaatttgttgatccatggcaggtcaaactaacaaactaactattggaggcaataactaaacttaacaccaagatttagtttcaacagtagccgccgcggcggaggcggccgacgagggtcgagcagatgaagccggttgcgcccgtctcccccgccatctcctcgcgtccttcccgtgagctgactagctgagctgggtctcgcgtcactccgagtgtgctgcggc

SEQ ID NO: 33575 - DNA, 3084 bp, Zea Mays
atggcaaatgccgcttgtgtgggcggaagctttttgggagtagaaaagggaaagcctgccactgtcagcaacctaggcgctcctgcagtcctgctgctggttcttgcctgtctcccgcttgttctccctagttccgacccgaagcagggaatgagcttcggcgatctcgacggcggcgggtccgcggccggcttgcagtacccgtacggcgccttcgcgtcatcgccggtcctctcgctcaccgtggtggacgccaggcgccgccgcggcggcggcgggaacgcgaaggacgcgtcggaggcggagaacgagggacagtcgatgatgagcggacacctcgacgtcgtcctgtctggcggcggcgatggcgaggacggcgaggccgcgaaccagcgcaagcccaagcgcaagaagccgtacaaccgccacacgccgcggcagatcgaacagctcgaagcgatgttcaaggaattccaccacccggacgagaagcagcgcgcgcagctgagcaggcagctgggcctggacccgcggcaggtcaagttctggttccagaaccggcgcacgcatttgaagaaccaactggagcggcaggagaacgcgaggctgaaacacgagaacgacaaactgcgcgtcgagaacctgtccatccgggaggccataagggacctggtgtgcagctgctgtggcggtccagcggtgctcggggagctgtcgcccgaagagcaccagctgcgcctcgagaatgcgaggctcagggacgagctcgctcgagtctgcaccgtcacttccaagttcattggcaagcccatgtctcacatggaactgctgctcgcgaaggagccgcatcctatgacaggctcgtcactggaacttgcagttgctgttggtgttggttccagcgtgccatcgagcaaaatgcctgtctcgacgatctccgagttggccggcagcacatccagctcaacgggaacagtgaccacgcccatggtgactgcatccttgccgatggttagcattgacaagtccaagttcgcccagcttgcagtgagtgcgatgaatgagcttgtcaagatggcgcggatgaatgaaccgctgtggattccaaccattccctcacctggctcaccaatcatggagactctaaactttaaagagtacttgaaggcattctcaccatgtgttggagtgaagcctactgggtttgtgtctgaggcctctagggaatccggcattgtcaccattgacagtagcgctgctcttatggaggtcttcatggatgagagacgatggtcagacatattctactgcattgttgccaaggcatcaatcgttgaggagatcttacctggtgttgcaggaagcagaaatggtgcattgctgcttatgcaggcagaactacaaatgctttcacctcttgtccctataagggaggttacatttctcaggttctgcaaacagcttgctgagggtgcatgggctgtagtggatgtttccattgatggactgcagacggatcagtgcctagctacaaacacgaaatgccggaggctgccttcaggttgcgtgttgcaagatacccccaatggctgcaaggtcacatgggttgagcatgcagaatatcctgaggcgtccgtgcaccagctctaccagcctcttatgcgctctggcctcgcccttggcgcagggcggtggcttgcaacactgcaacgccagtgtgagtgcttggccatcctcatgtcatcgcttgcagcgccagagcatgactcagcagcggtttctctggaaggaaaatggagcctgttgaagttggcacggaggatgatggagaacttctgcgcagggatgggcgcgtcatcttcccgcgaatggagtatgctggatggctttacaggtagcacggggaaagacgtgcgggtcatggtgcagaacagtgtggatgaacctggggtgccaccgggtgtggtgcttagcgtcgccacagcagtatggctacctgtgacccctgagcggctcttcaacttccttcgcgacgaggagctccgtgctgagtgggacatcctcagcaatggtggccctatgcagcaggtgctacgcatttccaagggccaactggacggcaactctgtcgctctgctgagagctgatcatacagactcccacctgaacagcatcttgattctacaagagacgtgcactgacagatctggcgcaatggtcgtgtacaccccggtggacttcccggcaatgcagcttgtgcttggtggaggggactcgaagaacgtggcgctcttaccatctggtttcgtcattctgcctgctgggtctaccgccagtgggctcgggcacaaggcacgcggatcgctgctcacagttgcattccagatcctcgtgaacagccagcccacagcaaagctgacggtggagtcagtggacaccgtgtacagcctcatctcctgtaccatcgagaagatcaaggcggcacttcactgtgacgtctgttaacttgggaacaggaagcttcaggcatggaggcaaggcaacagctggtgatcagcctgagtcaagaacgaaccgcgcaaaacagtagtgacctttgctaggtggtacgggtccatagggctggcccgtagcacacagcaatggcggtggttcgggtattgactcagcctccaattgttctgggttaaattttgcattttggacctaagccagggcaatgtcatggttggttttggtggttttagagtcatctatgctttttgttggctggctcgtggtttttggtatcaggtttgcttttgtaaccatagatgtaggagagccccccttgatgatacagtcaatatcagacaaatgcagcattgtatcgtgagattcagtctcagatcactgtggatttaccttgtatggaacagtagtaggagtagcggcagtttatgaaggatgtgtcatccaaaacaagctttcctgtttcgatagaggaaatcgatacagttaatgactgggtgtcacagtttcgtatgtttcggtgacttccaatgaaacaaccattctggcagggagaccagcgtatgatccaaa

SEQ ID NO: 33576 - DNA, 3068 bp, Zea Mays
cgaatggccagcttggactccgattaaacaattctgaaacacaaagtaggggcctcttcgcaaatcccaccagcaccaccgccttcgcctccgaccgcctcccagatccgctcgcccggccgccgtcgtcttcctggtccgcctctgcggcagtgagattcctcgccgccccgccctggattccgtcgagaggatcgtcgaggacttcgcgatggacctcgccatcaaccccttctcctccggcacccgccttcgggacatgatacgtgcgatacgcgcgtgcaagacggcagcggaggagcgtgccgtggtgcggcgggagtgcgcggcgatacgggccgccatcagcgagggcgaccaggactaccggcatcggaacatggccaagcttatgttcatccacatgctcggttaccccacacacttcgggcagatggagtgcctcaagcttattgctgcggcgggcttccccgagaagcgcatcggctatctaggactcatgcttctgctcgacgagcggcaggaggtcctcatgctcgtcaccaactctctcaagcagtatccgccctgtctgcgcttaccagttgtatctgttgatgctgttatgcgttatttctgatttccagagtattggttattacttaacgtgggcagagatcttaaccactcaaaccagttcattgttgggcttgcgctctgtgcccttggcaacatatgttctgctgaaatggcacgcgatctggctcctgaagtggagagactgttgcaaaatagggaccctaatacaaagaagaaggctgctttatgctctataaggattgtgcgaaaagttccagacttggcggaaaatttcatgagtgctgctgcatcattactgaaggaaaaacatcatggtgttctgatatctgccgttcagctttgcatggaactatgtaaagccagccatgaagcattggagtacttgaggaagaattgccttgaaggactggtccgaatactgagagatgtctccaacagttcatatgctcctgaatacgacatcggtggcatcacagatccattcttacatatccgagtgcttaaactcatgcgaatactgggtcaaggagatgcagattgcagcgagtatatcaatgatattcttgctcaggtttcaacaaaaactgagtcaaataagaatgctggaaatgctattttatatgaatgcgtggagacaataatgggcattgaagctacaagtggtttacgtgtgttggcaattaatattttgggtcgttttttgtccaaccgtgataacaacataagatatgttgccctaaacatgcttatgaaggccattgccgtggacacacaagcggtgcagaggcacagggcaacaattttagagtgcgtcaaggatgcagatgtctctattcgtaaaagagccctagaacttgtttatctacttgtcaatgatacaaatgtaaagccattgactaaggaacttgttgattaccttgaagtgagtgatcaagatttcaaggaagacctcactgctaaaatatgctcaatagttgaaaagctggtaattatgtaaaggatgatgtatggcatgctcttatagttctaatgagtaatgcatctgaacttcaaggatattcaatcaggtcattatataaggcattgcaagcatctggtgaacaggaaagtttagttagggtggccatttggtgcattggtgaatatggagaaatgctggtcaacaatcttagtatgttagacatggaggaaccgatcacggtaactgaatctgatgctgtggatgccgtagagattgctcttcagcgttactcggcggatgttactaccagggctatgtgtcttgtctctcttttgaagctttcttcccggtttccaccaacatcagagagaataaaagaaatagttgcgcaaaataaagggaatactgtgcttgaattgcagcaaagatctattgaattcagttccattatacaaagacatcagtcgataaagtgagtggcagattctgcaattattgaggatcattttgtattccatagtttgtcaaagtgaggataatgctggtgtatgcgcagatcatctttgcttgaacgtatgcctgcattggatgaagcaaattatttggtgaagagagctgcttctacacaggctgcagtttcatctgtaaattctgctcctgcagtcacttctggaggcccacttaagcttccaaatggcgtagcaaagccaccaccagctcctttagctgatttgcttgatttgggttctgatgatgctccagtgactacttcggcccctactacatcacctaatgattttctacaggatctgttgggcatcggtttgactgattcgtctcctataggtggagctccgtctacaagcactgacattctgatggatcttctatctattggttcatctcctgtacaaaatggcccaccaacgtcaaactttagccttcctggcatagagactaaacctccccctgttacacctcaagttgtggatcttcttgatggtttgtcctcaagcacatctcttcctgatgagaatgcagcttacccgacaatcacagcattccagagtgcaaccttgaggatcacattcagtttcaaaaagcaacctggaaaacctcaggagactacaattaatgcttctttcacaaatttagcaactactgcattaacagatttcgtcttccaggcagccgtgccaaagttcatccagttgcgtttggacccagctagcagcagcactcttcctgccagtggaaatgtgtcagtcacacaaagcctcagtgtcactaacaaccaacatgggcagaaaccacttgcaatgcgtatccggatgtcttacaaagtgaatggtgaagacaggctggagcaagggcaaatcagcaactttccttctgggttgtagtgccacctgtgtctatggggttggggttgctctttcagcgtgctacaggttcagacatatttggaataccagactcccccaattcttgccaaaaaataggcagttatcaaatattttcatatggt

SEQ ID NO: 33577 - DNA, 1597 bp, Zea Mays
aagaagaagaaatgccccgcgacccacgtcccctccggccctccctctatctttcgctcgctctcggcgacagctgggtgaccgtcgtcgccgccgcccttctccaggtgcccaggtcttcgcaggtccctttgccgcctcttcgccgccgacgagcaccagccaggaagaaaagaagctgaaccatggggaagagaaagtcagctgctaagccacctcctaagaagcggatggacaagcttgacactgtattttcctgcccatttgcaaccacgggagtagttttgagtgccgaattgacatgaagaatctgattggcgaagcatcttgtagaatctgtcaggaaaacttcagcacaactattaatggtatgccaaacctatgtataaaattgtactggttgctcctaatttcacttctatgaactgtactaatttgcatcgaagaaagtttggtcccaaacaactcgtgaactcgttttcttattattgggctgatggacaaggcaacgtgaaatttttcatggtacctgggaacagaacatagcctacaaactgcagaaccattcccatttcatcttgtagtcttgtcttgctaataatggactttgtgggttgtctgttccctgtgtaattcatttgaccatgatagttcttgatcatgtgatatcatagaatgtgtcaaaaacttcatcacatcaaaattaaaactggatagaacactatacataggtaatagtagaattaaatgttaagaagtatttctttatgtttattttaattactaattgttttacgtgatgtcttttcttgcagcactcactgagcctattgatatatatagtgaatggattgatgagtgtgaacgtgttaacactgttgaaggcgacgatgatgcgtgagcttgccccatgcggatgaaactgttacctacaatcgtaatgtaatgtgctggtattctcgaatgccatagcccatagtcagccatggcttggaataacgtagtggctgactgatatgccagtaggcaccttatctagtacttacagaactacaaaaagtttgtactatacatgtatggacaaccttataagtggctatgtgtgtacctatcctaacgctcatcccagatggtgtatcggcgtttttctgtgagattgttttcaagcaagggttgttcattcattgggtcttctcaggacaaagagaattatgctacagtcaaccagatggccgctgttgcgccgacaatacaggggtcatccagttcattttaagggctttgtagagcaaatgcaaccagaatataatttgcagctaaagatattcataggtagaattgttttcagttcattcaacgctgaaagcagtttcggtttggaggctgagctttggatcattggatggcacttggcagctttggcacctggagtaccgctcattagtttttcatcaagtcgtttatttcttgtgcacattgctggagtggagactcggagatcgagatcaagactgtacgcatcataaaccgatcagtgtattcttagtgtattcttcgtagtagaaaataagcagcagcaggtatagctgctttacgc

SEQ ID NO: 33578 - DNA, 1883 bp, Zea Mays
gccgtggtatcgctgttcagacttagataggtggattggatatttgttcattgaatttgatgtactaatggagtctaagggtggcaagaagtctagcagtagtcgttccatgatgtatgaagctccccttggctacagcattgaggacgttcgacctgccggaggcgcgaagaagttccagtctgctgcttactccaactgcgcaaagaagccatcctgatatcccttttggcttcctcgttctagtagtttaggatttcttttctgacacttcgattcttaccaatccccctggcctgctgctttcctgacaatcgaccagttccccagtcttgctccctgcagtcctccctcctccatctccagcgttgtgttctgactcacctgcaccaatggctgttctttctgctgctggtgctcccccggcctcagctatcgggtttgagggctatgagaagcgccttgagatcacattctctgaggcacctgtctttgtggacccccatggcagcggtttgcgtgccctctccaggtcccagattgactctgttctggatcttgcacggtgcacgatcgtgtccgagctctccaacaaggattttgactcctatgttctctccgagtcaagcttgttcatctatcctctgaagattgtcatcaagacctgtggcactaccaagctcctgctcacaattccaaggatcctagagcttgctgaagagctgtctatgcctcttgctgctgtgaagtactcccgcgggacgttcatctttcctggcgcacagccagccccccaccggagcttctccgaggaagttgctgtacttaaccgatactttgggggcctgaagtctggtggcaatgcttatgtgattggagatgcagcaagaccaggacagaagtggcacatctactacgccactgagtacccagagcaaccaatggtcaaccttgagatgtgcatgactggtctggacacgaagaaagcttcagtcttcttcaagactaatgctgatggcaacacaacatgtgccaaggaaatgacgaagctctctggtatctctgaaattatccctgagatggagatctgtgattttgacttcgaaccctgcggctactccatgaatgcaatccatggctctgcgttctccacgatccatgtgacgcctgaggatgggttcagctacgccagttatgaggttatgggcttggatgccactgccctgtcttacggtgaccttgtcaagagggtccttgggtgcttcggcccctcggaattttctgtcgccgtgaccatcttcggcgggcggggccaagctgggacatggggaaaggaacttggtgcggaggcttatgactgcaacaacatggtcgagcaggagctgcctggaggtgggatcctcatctaccagagcttctgtgctgctgaagacgccgttgctagctcgcccaaatccgttcttcgctgctttgatggcgagaatgcagcaccttttgcgaaggactgcaagctggctaatcttgtctgcttggaggaagttggatgctatcgaggagaaggatggagtgcttgatgagtaagacgggtttctggtgtcgatttgcttctgagtttttttctttttatatcgttgcgatctcgtggttgtcgtttggttagcagccaagccaggctattagtacgaagaatgtcgtctataaacatgtgttcctacgttgccacatgctgagtcaatctgtatacagctagctctaggtggtcagctgcgtctaccacaatgagcatacatgtatggataaatcttctgtgaaagcattcgatgaataagggttgttttcgtgattcgttttctgaagtctgaaatgttattatttattctctt

SEQ ID NO: 33579 - DNA, 2180 bp, Zea Mays
ccctaacactgtagctgatataggggctacagtgcgcccccttccccttcaccgacgtcctcctcctcctcctcctctcccttccctattctttctctcacacgctaaatggatgggcacgctacgccgtattcctcccccgcagccgcttccttcgcccacacgcccccgcgctcggaatactccgaggagggtgctcgaggcgaaccaagggcgatggttcatctcgctttcgtctcgctgcgtgcgctctctgtcactccccctctctctcctcatcagatccggccacttcctgctcgcctcgccaccggtcccgcgccccggaaccctagagctctccccgcggcagggccgccggagtccccgggcgcgtggagaaaatggaggcggcgctagaggcggcgtgtcaaggacaccaaggagcgtctggccggggtcaagcggctgcacgaggcgcttgacgccgcggcgcggcgcgcggcggccgaggtcaccacgctggtggacacctgcatggatctgacgcgggatgccaacttccgcatcgcccagggcggcctccaggcgctctccgtcgccgccgtcgtcgccgacgaccacttcaagatccacctcaacgccctcgtccccgccgccgtcgagcgcctcgacgacggcaagcaacccgtccgcgacgccgcgcgacagctcctcatcacgctcatggaggtttcttcaccaacaatcatagttgaaagagctggtagttatgcatggactcataagatttggagggtgagggacgagtttgtacgtacggtggcatctgcagttgggctatttgcttctacggagatttccttgcaacgagttttgctttcacctgtcctgcaactaatgaatgattcgaaccaaagtgttcgagatgctgctatctcttgtattgaggttagttgattccatattcgatactgtatagacctgtttcagccgacatttttcttttttcccttacacccatgatgactggtatgatctctatttctattgatcttgttcaatttcccattagttccatcccacatttacaagctggagagactgaatcattttgtatgacaacattcattgtagctccaagcccctttgcttctagttgaattgttttagtcccttgtgctcagattcatcttttctttcatctaaactattcagtgttcacagttattggctgggacacacacctgctatctaggcagcataaagtttttctagtaagccttcatttgtttttcactacaggagatgtacaagcacatgggatcacaatttcatgaagagttgcagcgccataatctgccttcatatatgctaaaagaaataaattcaaggttggataaaatagaaccaaaggttcgatcatctgatacagcaatgcagtataaggctgtagagtctagaggcaatgctgggatgtagcctgttggtagtgggacaccttcaggttctgttattgatctggaaaatgaggaatcaggttcaaaaggtaaaaggccattaggatgggactccatgaaagcatcaaggaagaaggcaatgtccagttcctcccagtctactgactaccttttaagaattcatgacattcaaatagcaagactgaagcaaagtgaagaaaaatcaggtaagaaacaacagaatattgagttcttgaaggaagttgaactgaaaaagttggaggtccaaaccaaggaactagaaatgcagcaaaccaaaatgatgattgaagaaaggatccgaaaggacgcagagctgaaggaactcctagctatggaatgttttaccagaggatgtgagacctgtatacatcgcgaggagaaaaggtttaatcgagtttttcatcaacaatcctgtctgaagagtactattgtatttcataatttgttgcgaacctagtgtcggcgtaacgtggtccggtgtgttcggacatatgtcatttcgagatttttgaacatttgcttaattgtttgagaacagtagcttggtttttgaactcgtgtcgtgtactagaagattgcgaaatttttattattaaaaaacatataattccaactatttatgactaacgtatttatattaattacgaagtttgctaattaattgtatactaagtgacggtcgcgcactgttcatagagc

SEQ ID NO: 33580 - DNA, 1821 bp, Zea Mays
gagaaattccggggagacgggagcggcgaggttggcgcgcgccgatacggcggcggaattccggcgaccggctcaacgatccatagctttctttttgtaatctgctccgccagccgaagcaccgggcgttgtcgctcaacctaaccatggcgtcaacctcctctccccaccggaagttgctccactccctggtgtactgggcggtgcagcgctgccggatgtcggagttgccgtgccggctcacggtctccctcaagcgccccgccgaacccgccagctccccgccgctgcgcgtctccgtttcggacacgggggtggggagcaaactggaggagttcctggagctcgacgccctggcgcgtgagattcccgtagagagatgggatggcacactcttagtcacaactactggaatcaatgatgaagccatttatcgttatcaaattaatcttcaagaagagacatcaagtgcaagatttagcaagttggctaccgcatacaaaaatcatgcacgattcagtggaactgaagtctgcctttgtctctcaaatgatgctgatgttgatgattttgtattatggttggtttgtttcttcaaaaagatacaagtgctaagagcagcaaatttagcatgtgagctctttgttgagcaaacaggcaacactggttccagaaatgtctgtctaccacaagattctgatgatgtgcatcattctgttacggcatcaagtattgaccagctagtttctggtcttaaagactactcactctcccatgtaaattcttgcgacaagtgtggcatgtgcttatttgatagagatcttctaaagattggaactggagcagcaaaccatgtagaaagaagaaaagctaaccgactacatgttgaagtagtcatagtgattgcacatattgcatctgattcagattgttgtatggcaaattgctcgtccacgcaggttttgtactttgaagattttgtaccttgtcagatattgcagtcctcttttgatgtgttgatgagcacagactggcaaagctatggtttcaagttaaaaggaggtttgatgggtgatgacggaaacgctgttctcgagtgggataacatggcatttgctcgtattgatatttccattcatacttaccacgaatgtgctatgcaagaacggcagggatctccacaggatagataccttttgaggaaggcactcaaatctgctctaactcacttgaaagcagatcatgcaggagattttcttagttgccatggccagagggttcgtgaatacgttcctgaccttgcggaatcaatcgctgggctgatcttgtcatccaccgatgaagagttccaaggcgaatgctttgcgcttcttgggctaggctccgaacaagacgtctctggaggagctgttcagtcgtcgatctgcgagaagatgatccgcatcatagagataaatgacaccaaggataattcagaggacaacgtgccttatctgttcgaatgcgagaagctggatgaagatagcgagctggacgaaggaggtggagatgaagacatggcttccgatttctagcgttgttttcacccgtctaccgtctcgtagagttgtagtgtagttagagatggcaatgggtgtcgaaaacccgaatacttatgtaggtggatatgagatgatttttatattggtggatatgttaatgaacaacaatccctgcccgttggataaacggtacgatacacgcaccgtatatccgtgagtaaaatatatctgtaccatacaactattattatctaataaaattaaaataaaaccctttttc

SEQ ID NO: 33581 - DNA, 1607 bp, Zea Mays
accaaactagaaaaacaattgcgtggagaaaaggaagggccatgaaaagcacggctcaggaaaaacaacggcggacagcccgcctccaccgccgtggcgccgttcaccccgccccgcgttctctctccctcggcgacggctcgacgaccgccgcgccgccctacgctccagcctccatgtgcttcgcggggcccttcgccgtcgactaacacaccaccaccaccatgtacgaccgccccatctcttcccttcctgctctacgaagcctagcaccaaaccctaactgtttgttttattcggatttgttccaaactacaaatgtggtgtatgtagtattgtgtccactaactttgctctctttttttttccctttttctttttgcaaaaaaacatcgggtgtacatgtgttcacccgtgccgtttactgggtcggcagtcggccggcacctggcccaagggttgagcatggagatcacgaacgagatgcttaagagactgccgagactacaatggcagaatttgttctatggactttcacagcaaggctaccaactatctcgtgacagctagcgatgatgaatcaatccgtttatacgatacccaagatgcagtgtgtttgaatactattaatagcaaaaaatatggggttggacttgtgtgcttcactgataacccatctattgtcttatattcatcgaacaatggctgggatgaatctctgcgtctgctctcaatgaatgataaccggtttattagatattataaaggtcaccttgatagggttgtctgcatcgcactttgctctggaaaagaaaactttctctcatgttcgcttgatcgtaccattctcttatgggaccatcgggctgaaaaaccgcagggcttactgcgcgcgcaaaggaggcctacagtttcgtacgacgcccagggcatggtatttgctgtcgcctatggtggccgcataaagatgtttgatattcggaaattcggaatggtagttgtgattgaacgctggcgtgggttggttacttggtttggcctttatctgacttgttatgtgcgtaggggccttttgcgaccttctctgtcggcactgatgattcggaagcccatgtcgtacagttcagcggtgatggcaggcggattctgttaaccactaaagctgggcgtgttcatgtgctagattcttttgaaggcaacagcattgcatcgtttcgcgcgaagccaatattaaccaattcgacactggaggcatcgttctgtcccgagggaaaccatatcgtatctggttgcatgctgggaaagcacagatgtgaaaccgccgcgggtaaggtggtctccaggatccttgatgttcgtgacaggaacgtcggagctgtcctgctgggtgccggatttgtccaagctggagtccttcaccatcagccacaccaacaccaggtccagctcgtccctgtaggcttggaccgatttgcatgccgtgtggccggttgacgcgaaggaggaacaagaaagcatagcggagcatcttgtaccaattgagtttgtgatctgttcctgatggcccggtaagctactattgcaacgattgtggtctgcggcaacgg

SEQ ID NO: 33582 - DNA, 1540 bp, Zea Mays
gcccctatatttcacaccgtcaagtgtctctaccagaacaagcccacacttgttctcctttttcaaaaaggaggcgaaatcacaattgcacttccatccagtgacacaaacacaatagcctctttttatttttatattcagagagtgtttctaggattgtacccattttatttgtttttcatgaattttggatgcacattgtttgctctatattaagataaccatgctggtattcctttgtgcaaggtggagcctttcttggatgtcaccaacatttattactatctcaagggccatgataggcagaagaagcttccaaaggagaccaagagtttggcaactatttgtgaggagctgcttggtatccttttgtccaaggaactccagtgtagtgattggtcatgccgccccttaagtgaagggcaaatacaatatgctgcgtcggatgcctactacttgctagacatatttgatttgttccaaaaaaggatcacaatggaaggaaaatgttcatctacaacagaacttacttcagacaggcattgctcatcagtggtgatagaatgctcttcttctggatatggcatttgctcgggtagttgtttgatgtccatagtaaccaagtacagtgagaagataatattgacagaatctgatgcaaaaccgcgtacctccagacgaaaagaaaaactgaagattcctgccaatgccaaacgcaaagataatgtggattgcagtagtgaatggcagggtccccctccatgggatccttccattggtggggatgggtacccaaagttcttgtgtgatgtgatgattgagggcctagctaagcacttgcgatgtgttggaatagatgctgcaattccatcttcaaagaaacctgaaccaagggatctattaaatcaaacatacaaggaaggaagaatattattaacacgggatgccaagctcttgaaatatcaatatttagctggtaaccaggtatacagagtgaaaagcctgctcaaacatgatcaactagctgaggtcattaatatcttccaattaaagatttctgaggaccaacttatgtcgagattattcccacgtgcttgttcaaccgaaatctggagttctggaagtgcaccgattgcaaccaactctactgggaggggactcagtaccacaatgcagtccaaaggttcttgtcagtgtgcaacattagtgactaagcagcacgtacggccttggtactcatttgtaaaattgtaaggtactgagataccatcacctccgaaagatcgaaaataatctgatctttggcatccactcgtgcacgatgaggcatgccatccatttttagtggtttgctgttcgtcactgagatgctgttgtaaggaaaatagaccttgacttatttgattaatggactttgctccatgcacatccaagaggaaaggttctagatacgtagagttataggccaagtgctatgactgttgccctgcccccgaaaaggattcatgctatctattattaaactaaaccttacgttcct

SEQ ID NO: 33583 - DNA, 2675 bp, Zea Mays
ttttatctcttttatgtgtttccccgtttcgttgttttcggttctcctttgcctttgtttcccttttctgttctttgggggttgagctctgaggttttcatacggggtttcatctctagcctaccccaacgtgcttgggacaaaaaaggctttgttgttgttgttgttgttgttgttgttgtataaatagaatgtatattccgtctccaaagtccaaagcagttgttcctcgccgtctcggggtctcggcctctcctcggtctctcctcccagatcgggccatccaggtgctaccgctcttcgccccctccacttcaccgccgccgcgtagatccgtctccgcctcctggaagcgctaccagtggaccaacgccgagccggcggagttagcggcgttagggttgcggttgggaattgattgcgggggacgcagcggtggcgcctggcatggcgggggcgcccggggtcgggccgggtgcggggggtgggggcggcgccgctgcggggctcaagacttacttcaagacgcccgaggggaggtacaagctgcagtacgagaaggcgcactccgcggtgctgcactacagccacggcggcaagaccgtctcgcaggtacggatgggaactgggaagtgcgcttctgccagggggatctacgcggattgctgcggtggatggatgcttttgttgacagtggcatacctcaaggagaagcctgctagccagggctctcagccatcaacaccaagcgccagcagtgggatgcggtctgcagcagcaaggctgctgggcactgggaatgggagcaaggcacttagctttggtggcggtaatggtgcaagccgagctgttgctggaagcagccgtgtaggaggcggccttggtacacctacaggccttggtggatcacaggggggcacaaattatgatggcaagggtacatatattgtattcaatgctgctgatacactattcatcagtgatctcaattcccaggagaaggatccactaaagtccatccatttcagcaactcaaacccactgtgccatgcattcgacccagaggccaaagagggacacgacctgatcattgggatgggatcaggggatgtctattcaatgtcgctgaggcaacagttacaagatcctggaagaaaacccgtggcagctctacattacaataagggtgataaagatgtctcacccaatggaagtcgttgcacttctgtcgcatggggtgccagagcgtgaaggcattttcgtttgttagccatttctgatggaaatttgtacgtgtatgataaaaacaaggatgggaacacagactgtacgtttccagctgtcaaggatcagtctcagtttatggttgcacatgcaaagtcgagtaagagcaacccagtcgctaggtggcatatatgtcaaggttcgatcaatgcaatttccttttcaccagatggcgcatacttggcgactgttgggagagatggttatttgagagtattcgatttttcaaaggaacaactaatatttggtggaagaagttattatggtgcactgttgtgttgcacttggagctcagatggaaaatatctattaacaggtggtgaagatgatcttgtgcaggtatggggcatggatgatagaaagatagttgcttggggtgaaggacataattcatgggtcagtggagttgcttttgattcatattggtccccaccaagttctgatggaaatggagaaaatgtatatcgctttggttctgttgggcaggacacccaactacttctgtgggacctggcactggatgagattgttgtcccactacggcatccttcaagtgcctcacctacgtttagcagcgggagcccttccacacactgggacaatgcatgccctccaacaggtgttcttcaaccttctcctagaatgcgagatgtcccaaaactatcgcccctagttgcccaccgagtacatgccgatcccctatctggtatggtgttcaccagtgaatctatcctcaccatctgccgcgagggcctcatcaaaatctgggttcgaccagagcagagcgaaaacaatcagcaatcgaattcttcagaatttgctttaggccctgcttcgaaggatagggcgatcacatcttccaataaagcaagtagctccagctttaagaagctgccgcctgttcttgtcacatgatgaatcaacgggatggttcttgtggatatttctgcttcacgtggcattagtggtggatatgaatcttactccatggttgatggggatgaaactctcatatggagtctgcagactgcaagtaatgagggtgagcatttgatggttgatgttcccaggaagcagggccagcgttgccagtttttttggcacgaaagagtaaatgggagctcttgtacagacacatacttaatgataaaattgtaaaaactcactgtccgtttcataatattcaatagccaccgaaagatgattggacgaccatgttatcgattttagctggtgggttgatagtatccttaaactttggtacttcggagacttgtaattatggaccataatatctgaggaatgcttcagtcttacctggtgtaagttgtgttactatttccttctgccttttgtcaattattagatctagtttggcaactccatttttc

SEQ ID NO: 33584 - DNA, 397 bp, Zea Mays
agaatattgctccccttcgttcacctcgcgtacgcgacaactaggctgaccgccgccgccctacgctcaactgcccacctgccctggtcttcgactcttcgtcgtgcgctttgccggcggcgagcacccatcacaccaggtatgtccgccaggtacgctaattatcgagatgcgatggccagggtctaggttgacccctagtggtgcaaaggatggcctacttcgagaggcgatgtcggcggaccaatctagaagattgatgatctctacataaacacaagattacattgattcaactctgatctggtgtatgaaatattgattgatactcatttatattatttttttattatattattattaaatatatatgtctgtgtatttctctttcaaatta

SEQ ID NO: 33585 - DNA, 626 bp, Zea Mays
agcagggccaatcagtgccccatggtggcgcacttcctgctggacagggaggtgcaacccctgccatgcatccgtccttcgcgcatccatgggctggcactgtccggctgtggccatatgaccagtccgggcgcccaccaccgccgccagcgttcaacgcccttccacaatacaacagcttcggcagcacacccagtgcctatggaggcttctacggtgctcctccccctccgtatggcatgccctacgggggagctgcaccccctggtttccaggcgcccgcaccagcataccaagcgacgccctggaaccccactcacggtggtgcatggcatcaggacgcccttgcacactccttcaacactatgacgctcaatccaccgaacgctacttccgagtggtatgccgactccggtgcaggatcacacatgacctcggacgctggatttgcaaaccaggaacgtgatcgccaggtgcaatagctccggtgacctctacccgttccatgcaccctacaccagcacctctgcattactcgctgtacccacctccctgtggcatcgtcgtctcggtcaccttgggcatcaagccttgtccaaactcattacctccagtgtcatttcctg

SEQ ID NO: 33586 - DNA, 1305 bp, Zea Mays
aaaaaaaggttgataaatcccatcgtattacaaaagcagtttgcatccctgttttgaacatgtgcattccattccttggtggtgcatgtcacttcgatgctgcttttggacctcactttgccagtgcagtgcaatccctcacctgccatgcctactcctagatttgctcaaagatcacatctctcatctcatctgttgattgctttcatgtaatctaggttatcctctaaccttagttgtacctgaaggataaccaaggcgcagtggtaaaccaaggaccagaaagcactgccagtgtgccatctgaaactcctggtcattctcttttactaccattgaaagatcgatctaagagggaggggggactcaaaaggcaaaggacaaaggcaaggctgcaggctttgctttgattctaccctgacccccagcaaaacattaggcccttcaaaagcacatcagaacctgctgcagcaacaagaaactgtgaagaaagcacacagcctgtccacagcatattattgtgcagactgcagcgcagagagaggtggctttgcacttggctagttgcatgcaccactccatgaccatgagaagctcataggactaggaggctggtggcggtagtgcaaaaaagaaactggaggtagtataggattatgagcaggccagcttggtctgcgagggaggcattggcggcctcagccgtggccgccgtcctgcttggaggccttgtgctgatgtctttggtggtggggagggacgcgaggacgccatcgccagctagcgcggctgcgcctgcggtgggtggtagaaggatggtgatcggagccacggaggagctgaagggtggtgatgatcctttgagcagcagcaagaggagggtgcccaatggaccggatccaatccacaacaggggagctggagagtctggaagctcaccaggccgagcgtaggcagcagcggtgcacgccggccgccccccaaagaatggaagtttcccaaacacttggcgctggatccctcttctcatctgtggtggtggtggcctggtgtgtgtgtgtgtgtgggggggggggggggcgggtctggcgccgggacgtcacgttctaagcactgctatttgtgatggtttcggcacgaattaaagacactggcttttccgaaaacaaaaggccacgtactctactgatgacggcacaaacgaaagacagcactgtcaagcttccctctcacgaaagacgtacgccggattaaagtttgagcagagagagagagatgtgcaagagctcctttgttaatttcact

SEQ ID NO: 33587 - DNA, 248 bp, Zea Mays
gagatccacaagcttttggcggtcggattcataaaggaggtgttccatcccgagtggttgactaatcttgtattagttaggaaaaaggagggaaatggaggatatgtgtagactacaccggtttgaataaagcatgtccgaaagttccttaccctcttctctgaattgatcaaattgtagactctactacaggatgtgaaaccatgcccttcagactgcgatatgcaggggccacatatcagcgttgc

SEQ ID NO: 33588 - DNA, 3104 bp, Zea Mays
gaaagcctgcaaccaaacaggccccctcgattagcgaaaaaaagcccagcgaaaactaaaaccctcgcatctttcctttcctccccaactgcggccgcctccacccgctccaccgccgatggccgagcctgagcctctgccgcaggtgtcgtctgaacctaccactccgccgcaggaaggcagcggaaggactaagacaaagaacaagaagaatcgttccaagaagcaaccgaagcgagccggcgctgacaccgacgggttatcctcaggcgccagcaccatggttgaggaccctttcttcgtcctcgccggcggaaaggaaggagggtttctggatttggaggagatcgatgaggcagacttcggcatcttcggaggcgtcttggatgacgtaggacagagcgtcgaggaagctgggaaggatcatgggaagaagaagaagaaaacaaagaagcggaagcgtgggggtgatggcgagggcttcagtggcgacgctgcgttggtagttgagaatgaccaggtggatgtcgagaaagtggagaaaaaggtcgaggatggggagaaaggggataagaaggggaagagaaagatgaacatgaagaagaggaaggtgaaggataatgagatgaacagggagagtgatgaggatgttgctagtgacaaagcagaagacatgcaagatgacactgagaatatggaacaaaatgaggacgatgagctgattttgggcgaagatgatgtctctgcatggagggagcttaggctgcaccctctgcttctcaaggcgatgcgcagacttggattcaaagagccaacacctatacaaaagtcttgctttcctgctgcagctcatcgaggcaaggatgttatcggtgctgcagagacaggttccggaaagacacttgcttttggcctcccagttttgcaacgtctccttgaagagcgagaaaaggccacaagattgcagcaggaagatgaaaaaatggaggaacgttcttgtggaagccctcttcgtgctcttattctgacacccactagggagctcgccaaacaggtatgcgatcatctaaaagatgtggccaagttcttaggaatccatgttgttccaattgttggtggtctatcaatggaaaaacaagagagacttttgaaaaaaaagcctgaaattgttgttggaactcctggaagattgtgggaacacatgtcgatgaacaatcaacacctagttgaggctgatagaatgatcgaacgaggccatttccgtgaattacaatctatcattgagatgcttccactgaccaatggttctgatgaacaagctgcaagaacaatgccaaactgtgagactgtaccaattttgcaaataaagaagcggcaaacctttgtgttctcagccacacttgcactctcatctaattttcggaagaagttgaagcgtggcctatctacttcgaaggcatcgacgcctgatgatgtcagctctattgaagcattgtcaaaacaagctggaatgaaatctaatgctgaaatagttgatttgacaaaggcttcaatcttgcctgagaagcttgaagaatcttttattgagtgcagtgaagaggataaggatgcctatctgtattatatattgagtgttcatggtcaaggtcgcacaataatattttgtacatcaatcgccgcattacgtcacatttcttccatactgcgcattcttggaattaatgtattgacaaaccatgctcaaatgcaacaaagagctcgcatgaaggctgtggatcgcttccgtgaaagtgaaaattccattttggtcgcaactgatggttttgcaaggggtatggattttgatgatgtgcgaacagttatccattatcagttgccacattcaactgatgtctatatccacagaagtggaaggacagcacgcaagtcattggctggctgcagcattgcgttaatctctcctactgacaagtccaggttttattctctttgcaaatctttgtcaaaggagaatctccagcagtttcctgtagatcatacttacatgtctggagtgatgaacagactctcacttgctcggcagattgacaagattgcccgtaaaacttcacaggaaaatgctaacaaatcctggcttcaaaggaatgctgaatctatgggattgattttggatactagtgacagtgaagaagaccatgtgcagggacacaagaaacgaaaggctacttctgcacatctccaaaagcttcaacaggagttgagtgatctcttgcaatgcccattgcagcctaagactttctctcgccgctatttggctggggctggtgtctcacccttacttcagaagcaactagaagagttggccaagagaaatgcaagcaacaatagcagcaagagtaagaataaaggatctgggtttgttgttattggtcaggatcgtgtcgagcccttgcaagcacttcaaaattctgggcaagaggtctgtgtgaacatagacaaagaaagggaaaagcgaagagtcgctgagaactggaggcggaagaagcatgaagaaaagaaacgtacacaagagcagaagcgaaaggataagagaaaagctaaagagatggcttgatgacacatgagatagctaggggccttcaaggggtttacggaagctctttaagctcgcgtcaatcctttcagaaaggaaaggaatgcattcatcaatgttttgctgtaatacaatgcgtgcgctaagttagcgcttgcctttaacagattggaggtggtagtttgattttgttttgcggctgaagaaaataaacttagaatgcacgagcactggctctggatgagaaaagaaattaagcagatagctcacgtataacctcattggatctgtaatatgtacgcctatcagatttaaggtacaaattaattttattagggatgggaatcgactgacctggcctatctttggacttggacctggcccattgccttaaggccaattttaggagtgatggagattatgatcttgctggctatcatgggtttggcctagatatttttctgctataatgcatggacatgaatcctatcaatatttctataaagtattg

SEQ ID NO: 33589 - DNA, 1937 bp, Zea Mays
gccgacgtcgatgtgtgtggtgcatcccttgtcgtttcagaagaagatgacgagaacagatgcaatgcatgtgccctgtagcggtgttgctacggtgcaagtagacatggggtgcggcggcacattgtctaagctcagcctgtcgggcctcaatgacggcaatgacaacccatgggtctaatgggtatgaaaccatatccacctaatccatatggtattccttttcacggactggattgggtaatgagtgagtggactgggtggtttagaaacccatgcacaggctagcgattatgtgccactgttattttaagcttacatcatgagacttgaccaaacgggtctgtattgccggtggcaatcggctgctgattgaatctcctagtgaacctaaatggtcaccgaaaggagaactgttttttgttactgacagagggagtggattttggaatatttataaatgggttgaacaaaccaatgaaattgttccagtgtattcactagatgctgaatttacgagaccattgtgggtttttggcatcagctcgtatgattttcttggaaacagcgaccacattgttttcagttatagacagcaaggaaagtcacatcttggtgtgcttgattgtgattcaggttctatttcattgcttgacatccctttctctgatttatctgatgtggttgctgcagatgattacttctatattgaaggtgcttccgcgagtattccacggtcgattgctaaggtgacattaaatgaaagcaaaaccaaagtagtcaatttctcaatagcctggtcgtcctcaccagacctcgtacaatatagacctttcttcagcacaccagaacttgttgagttccctacatccaagtctggccagaaagcttatgcctatttctacccaccatcaaatcccaattttcaaggtttgcctgatgaaaagcctcctttgcttgtcaaaacacatggaggaccaactgctgaaacacgtgcaattctggacctcagtgtccagtattggacaagtagagggtgggcatatgtcgatgtcaactatggaggaagcactggttatggaagagagtatcgggagagactattgaacaaatggggtattgttgatgttgatgattgctgcggctgtgcgagattcctggtggagagtgggaaagtagatgggcagcgcctttgtattactggtagatcagcaggtggatacactactttagcttcacttgcattcagagacacgttcaaggctggagcttctctctatggtgttggggacttgactctgttgagagcggagacgcacaaatttgagtctcattatatggacaatcttgtaggaaatgaaagagcttactacgagagatcaccaatcaactttgtcaaccagtttacttgtccagtcattttgtttcaagggttggaggataaggttgtgccaccagatcaggcacgcaaaatatacagtgccttgaaagagaaaggtttgcctgttgctttggttgaatatgaaggagagcagcatgggttccgtaaggcggagaacatcaagttcaccttggagcagcagatgttgttctttgcaagattagttgggaagtttgaggtggcagatgatataactccaatcaagattgagaacttcgattgatctcttggagagtggtgtccggttcgaagttttgttcacgtaacccgattatatgttcagtacattagccgttgcagtaccttttaggaatacgacttcatcttatttttgagggttgatggaaatctcttttttgcgctgtaacgatgaagtcaccttgttttctgttcggttctagaatgaaatagaacggaatgacactatcctttatttggttgatgagtgaaaatagataatttcataactataatacattcatacaaccatatatat

SEQ ID NO: 33590 - DNA, 1201 bp, Zea Mays
ttgctgcaaactcaaataatggtgatattattcttctgcacacataaaaaggagagacccaccggtggaggctcccacatgagtggggtctagagaatggataaaccgagaatacatgcctggagggaatatatatgactttcttcacaagcaaaataacttcttggacctccataaaattctaagatttgctatcgatatctcaaaaggaatggattatctgcaccagaataacattatacacagagatttgaagtctgcaaatcttctgctaggccatgaccaagttgttaagatcgcagactttggtgtggcgcgacatggaagtcagcaggggcagatgactgctgaaactggaacctaccgatggatggcaccagagataattaatcataagccgtatgaccacaaagcggatgtattcagctttgccattgttctttgggagctggcaacttcaatggtcccatatgacaacatgacacccttgcaagctgcattaggagtaagacagggattgcgcttggacattccgggcagcgtgcacccaagattgaccaagctgattcgacagtgctggaacgaagatcctgatgcgcgtctgacttttgcagagattactaaagaactccaagatagtctacaccatatcgaggcacccaagggagccagccgtcgatctagagcaaagatgcagaagaaataagagggcaaggtttcctacttttttttgggtgtgttacactagttgcagtatgagtgtttaaggtgtatgtcgcggttataaatattttaaggccaaggaagtgttaaaaaccgaccttagctcagttggtagagcggaggactgtagtggattgcagatgaaatccttaggtcgctggttcgaatccggcaggtcggagttgtttttaaaataacatttttttgctcaacaatgttaggctactcgcctactcacctgtcgctactctgtactcactacggttaaagtcgtgctctttttcttaacatttttacaaatgtcattttgcacaaaaaaaggaaaaaggggatgcatatgtggtcacattattatttgcataaaagccatgcagatcaatattcaggaacagaaaggccaaacgcctgcgaaagttgttgtgagagaccgttgcttaataaaaggcaaaacagaatgtaactatcccgtgaacaaaaa

SEQ ID NO: 33591 - DNA, 3295 bp, Zea Mays
gacccagtgaagcggagaagccacaggacaggacggcagggaaaagctacttgagcctgagcgctgcgcagaattccgtccggcacgaggtggacgagaggagggataaggaacagaagccttcgagctcacgctgatccgcctcccgcattgccttgaagcctctcgattcgggcggacccgagctgccccgcgcggagggctcgatctgggcccagatcggccagcatttcactcccgtgcttgcaagtgcgcgtgcgcggtgaggcactgaggcatggggaaggtggaagacgagtacgagtcccatgcagccaaccggcggggtgaggtgatagattggctcgctgagttgctgccggagttcgacttgccgctggattcctcagacgaggagctgcgggagtacctcattgatggcacggcactatgttacattgcagagaaactaatgcccggcattcaggaggaaatgtggggtggtaatgcatgggatcagaggtcgaacgtgaagaagttcctctattttgttgcggagatggggctgccaggcttcagtgtcaaggatctggaggaggggtctgtgtcttctgtggtggagtgtctcttggctctaaaggataatgtgactacaggattgggtcaaaacgttacaaacaatgctgctaaaacaccccttagaaggaaacttgaacttgaatctgatgggcctataatttcagttatgacaccagggagaagacctggggaggaaagatggaaaggccactgggatcctaagtctcaacaaagaagtattcttcattctggacaaaaggtccatgatgctttccaacttaagcgaggttcctacactgatcttcctgctgccaaagtttcagagatgatgcatccaagaagtctagatagttgttaatggcattctagatgagagcattgagaggaaaagaggagaaataccacatcgtgctgtttacttgctaaggaatgttgttcaagagattgagcaccgcattgctattcaagcggatcacataagaaatcaaaatagcatcatcaagactcgggaagacaagtatcgttcaaaaattaaagcactcgagacattagtaaatggcacaaatgaagaaaatgagatgacagtagatcgacttgagctagttgaggtagaaaaatcaaaacttgatgagaaaagaaaactaggtgaacaagacatggttcggctgatgcaagaaaaggagaatgcagaaaatactattgcttcccttcagcaagaaatacaggtcttgagtaggatgcatgaacagtaccacgagagaaaggaaacagaagccaggcagatggaggaacacttggctatgagacttaaggaggctgagtttcttttaatgcaatcagaaaagaaagttgaagaaattgaatctgtttcccaactgaaatctcaactttggaccaggaaggcaaacattttccagagttttatggataatcaaaaattgtccattaaggacataaggatatcatctcagtccattaagcaggaaatgtttgcccttcaaatgaaatggatagatgaaatatctagcattggacgtgagttgaaaggcttggtagatgctgctgacaattaccataaggttcttgctgaaaatcagaagctatttaatgaggtacaggaactaaaaggcaatatcagggtttattgtcgtgtcagaccatttcttcctggtcaagatggaaaaacaaccattattgattatattggtgaaaatggtgagattctcatcacaaatcccttcaagcaagggaaggatgtgtgtcgaatgttcaagtttaataaagtgtttaatacacatgcttctcaagctgaggtattctctgatatccaacctctgatcagatcagttcttgatgggtttaatgtgtgcatttttgcctatggtcaaactggatccggaaagacttacacaatgagtgggccaggcacatcaaaagaagattggggtgttaactatcgagctttaaatgacttgttcgacatctctctaagtagaaggaatgctttctcatatgaggtgggagtgcagatggttgagatttataacgagcaagtgcgggatcttctctcaaatgatattgcacaaaaaagacttggaatttggagtacatctcagcctaatggacttgttgtccctgatgcaagtttacatccagtcaaatcaacactagatgtgctacagttgatggaaattggacaaacaaatagagcagttggatcaacagctctgaatgaaaggagcagtcgatctcacagcattctgactgtgcatgttagaggggtggatctgaagaatggatctacttccagaggatgtctacatctaattgatcttgctgggagtgaaagaaaaaatgcccatgttccttatcgaaacagcaagctgactcaagttctacagagctctttaggtgggcaagcaaagacactgatgtttgttcaaattaatccggatactggatcatattcagaaacaataagcactttgaagtttgctgaaagggtttctggagttgagttaggtgctgcaagaagtaacaaagagggtaaagatataaaagagctgctagaacaggtttcatctctgaaagacacaatatcacggaaagatatggaaatcgatcaactcctgaagaacaaagccaaatctccaggttcatcaatagatagaaatgacagtcgccaacagatccggcgactatcagggactggatcaagtgaagccgaatgtgaagataacatgtctgatgatggctgctcagtagcaggaaccgagtattcagtaggtggtgcttcagaggcgacagcagaacggatgcagaaggccccatcaaggatagccaggctattccacacaaagaatggacagcctgcaaactccaaaccaaaaccaagggagtctgctctgaaaccaccaggtcgcacgacatctacaggaggaagccaggcgacaggaggatctttagtgaaaccccctaagaggcggtagagaaataaagattccatcatctaggatttgccatgttgatgggggtatgtgacgatgtcactgtaacgggttcacttgtcatcaccatgatgagcagccgactgtaggctggatgttgtatgagctggacgccatgaggttggtttctcagccctgctgaccatcacgttagttatcgactatgttactgaccatcatcaactttttatctatactatacttaaagcaccagtttcaacggtcgtccc

SEQ ID NO: 33592 - DNA, 1703 bp, Zea Mays
ccggagcctgcaacgcgctccctgtggagagagaaaagaagctctgccacccgtccacacattcctgtgatagatcgcattcatgcagctggctactgaatgcgcgttgtgctgcgtaggacacgtatggcgagctagcctacagataagcctggggaatggtttcatatgcatccggctcgcgcaggtttctggcatcgagcagtctgcgagatctcgattcgtctggaagacatcgctactaccccagccacagtacccattgggtatttatctgctcccttgctgaagctggaatgtgcagctcgatcggttagcgctacgagtcctcgctgaatccagccaaatgatccccttgagcttgccagttagagcacggtgagtcagcaaagattaaaatagcctccgcacctaatataatgctggccttccgtcagaagtaacagctagctaagagaagcacaagaaaaatctggtagcttgagttctgactcgaactcagagatggcttatgcaagccccgggactgatgatacgtcgacagatctagatactgacgagaagaatcacatgttggagctagggcagcttgtgtcccttacagcttctgattccggcaacaaagcaaaggacaagctactaggtcaaaaggcactgcgccgtctggcccagaaccgtgaagctgctaggaaaagccgtctaagaaagaaggcatacgttgagcaacttgagaatagcaggctgaaacttagccagctggagcaggaactccagcgtgctcgccaacagggcatcttcattcctactccgggagacgaccagcagccaaactctactagtgaaaaaggtgctttggcgtttgacaaggactacgctggatgggaagacgagcacaggaagcagataagcgagctgagggccgcgctcagcgcacacgccggtgacgacgagctccggcgcatcgtggacggcgtcatggcgcatcaccacgaagcgttcaggctcaagtgcgtggcagccagggccgacgccttccacgtgctgtcggggatgtggaagacccccgtggagaggtgctttatgtggctgggcggatttcgaccgtcagagattctaaagtacagttcctcgcaagccatctggaccccctcaccgagcggcagctcgcgagcgtacacggcctgcagcagtcctcgcagcaagccgaagagggcatctcgcagcgggtgcaagcgctgcagcagtcggtcgcggagaccctcgcgtcgtcagggtccccgtgcctgcctgtgcctgcaggtcgtgctcctccgcctggcgacgacgccgctccagactgctcggggacgatggcggcggcggttgcgaagcttgtcgctcttgaaagcttggtgcatgaggctgacggtctgcggaggcagactcttgagcagatgcagcgcgtgctgaccacccgccagtccgcgcgggcgctgcttgtgatcagtgactacctttcccggctacgcgctctgagttctctctggatcgcacgaccacgggaatgaattcagctcggcttatgtatctttgtttgacccggccgtggagaaaaataagaatcgaagatgcctccgctccttccatcatcactgcatgtaattgtaatctgaacatcattataaacagccgtaaccgttggccatcatcagggttaaagacgc

SEQ ID NO: 33593 - DNA, 1796 bp, Zea Mays
ggacgaagcagccgccgcaggcccgctcccgcccgcgcctgacggcacatccgccccggccgcctccgaccccgcccccgcccccggccccgcccgccgtgcccacctcgcggtccggctggccttgcctcctcctcctcgcttctctcagcctcaggccaacacgcagcccagggccgccgtcgccacggaggtgaggtggaaggagcgtagggcctccgcgcttggctcgctgcagcgagccgcggtcaggcgcaactgcacacgggaggacgccggcgtggcgtgggaggaggagttcgagagcgtcgtcaccctcgcggcgatgtcggagcgagagggcgccgcgttccacccatgggagctcgccttctgcgtcatcagcatgaggatattaacaaaggcccaaagaacaaaccatcaattctgggaactgtttctctcaatctagcagattatgcattgacggctggagagacaattgagataattcttccgttgtctatacctggtggtgcacctgaacgagcctcatcccttcatctcactctgagtatggttgaattaagagcttttcaagaaacatctgatgcatcacagcgatctgctgcaaccttgccattgtccccatcacctagtgattctcttcctggaggaaaatatgaggttttggttattaaagcagggttgaggaaggtaaaaattctcacagatctggtgtcgacacgaaggcctaagaagacttgccagggaggtggcgaagataagttctgtgttaacagtgatagtgttgaatatccatgcgatactgagtctcttgatgacgatctagatgacagagttgaggaagatgaatttggagattcaactatcaggaagtctttcagttatgggtatctgcaatctgtcaactatgttggtggcctagtttatgcccatgcaaagattgatggggagcatgaggactggatatattatagtaaccgaaaaactgatgtcggtttccatgtagagaaagtattgccatcaaccacagagaatggttgctaactgctaagcgcagtatacttccttggagaaagaggaaactgagtttacggtcgttgaaggctaaaggtgaacctctcttgaaaaaggcatatgggggaagagggaggtgatgatattgactaggatcgacgcttgctaacatcatctgatgaatctgtttcagagggatcaagaggatatggattagcaaatactatggtgtcagaatttggtgatgacaattttgtcattgaaaattgggagttgaaggagataattagttgtgatggtcgtatgaagctttcatcccagatgttctttgcatcaatagaccagagaagtgagcgagcagctggggagactgcatgtacatcacttgtagctattattgcagactggttccaagcaaatcagaatattatgcctatccagtcacagtttgacagccttatccgtgaaggatcactagagtggagaaacctttgtgagaacgagacatatagaaagcgttttcctgataagcactttgatcttgaaactgtccttcataccaaaattcacccgctgacagtttcccccagcaatcttttatttgatctgtcttattatgactatggatgagacttttgtgatataattgatgagactatggatttaaatattgttatgtgattatgtgtgagatgttttatgtgaaaatatgttgtgctatatagttgttgatatatttgttatgttgtggaatgtggtgtaaaataaaaataaac

SEQ ID NO: 33594 - DNA, 4492 bp, Zea Mays
atggataacatgctaggcgacttgtacaagccagatgacggcgacgacttctacagcaaaaaataccgcgacgagctagagaatgtgtcattccaactattagaagaaattacagatggtttctctgagagtcgagagctcggccgaggatcctttggagtggtttacaggggattgactaaaaatggtgattacgttgctgtgaagaagcttcatgctaatgtcactgatcttaaccataagcagtttcaaaatgagttatataaccttgcaaaacttaagcatgaaaacattgtacggatttatggctattgctatgaaattaagaaaacatttatggagcacgatagaagaaaaattcttgtcgaagagccgcgtatagcgctctgccttgagtatttacacaatggaagccttcaagatcatatttcggatgagttttctggtcttgactgggacacacgctacaggattatggaaggggtctgtcgtggtttatatcatatccataggaatctaaagaaacctctttatcatttggacctaaaacctgccaacatattactaagtaaaaccatgcaaccaaagcttgcagattttgggttatctaggatctttcggaatgaagaactaacacgaacgactaaaagtcctctaggaactcttgggtaccagccaccagaatacattgaaagaggtgaagtctcagaaaaattcgacatattcagcttaggtgtcgtaatgatacacctggtttcgggacgtggaggcttcgaaagatatgcatgcatgcatagtgaagaatttatcaatcaggtaaaaacaaactggaggaaaagatttaagcaattacagaggaattccttacgtaaagtcaaagtgtactgccacgaggtagagacatgcactcggatagcactgaattgtgtggagaaagacacacagaaaaggcctgatatagatatggtcatcaataatctaaaggaccgtaagacccatagattcaagtattctcaagcatacaaaaaaggcctcacattgttcaccatgcacgatctcgtgcatgatttggcaagattactaacggctggtgaaattctggatgcttccaatattgggactatggatgcgaggcatgttgcccgcgagcctgcaactaggtcattatttcatgggtacatgcatgctaagtcaaactttcgtagcttcatacgtaccaattcaaatatatacacataccggcgacggcgagagccagaaggtagcggacagcaatacaaatatgcattgctcactaattgtcacaagcccctagaggtattgacggattcgcccaatatgataagggcactgcattttcgggattgtcatggctcgaaaggactaaaagattatgcatttttgcctgcaaagttgtccctaaaagttctggatttaagtgggtgcaacatagcctacctgccagcttctatcggtgaattggctgtattgaggtatctcaatgctccagagattaaaaatgaaatgctcccagactctctgagcaaactgtcaaaattaatatacctcaacctaagtgggtccaatatttcagcactgcctgattcaattggtgatatcgaaggtctaatgcatcttgatatatcaaattgtgtgcttttgtgtgagctcccagaatcatttgtggacctaaaaaatctggtatatctagatttatcacattgccagatcaaaattacagcaagagtttttagtggtctcaccaatatccagcatttgaatttatcaaaaagtcttattcatggaggtgacgggttggaggggctgcaggaagccgttggtggtctcaccgaacttcggtatttaaatctatcagggtgctttgaaaatctgaggccagatgaggtattaagttttgttgaccgtatttgtaggcttacaaatctggtgcacttggatttgtctttcaatttgggtcttgtcagtgtgcctgaaagtattggcagcctcaggaagctgcacaccctggatctcttgtgctgccgaaacctagtgacgcttccaaaatgtatgttcaacatggatagcatgaagatgttaaatgttacctgctgtcctcatctagatcagtctacgctcccccgatacaggtattttaccttgccgtactttgaggtccatgctgatgatggcgaatctaccagcaatattggtttgcttcggtatgtgaatcctactcatgagttgtacataagtgggcttgataacacaatatctgcagaagaggttgacagtataaacctaagccaaaaacaggggatccagtcgttgagtctttcatggactagagatgctcagagatctgtggaggacatggaagtcctgggaaagctagtgccacctgatactttaaaatgctttgagctaagaggttatgatagtatgagctttccaacatgggttatgggcatcacgctctatcttcctcgccttaccaaggttgtattgtgggagctgcgtaaatgcaatagtctaccaccactgggccagttaccaacactacaaaagctagttataggaggaatggacagcactttgacagttgatgagggtttctgctgcgccggcccgggagcctttcctctattacaggaacttcaactatgccaaatggagaacctggaagtgtggaacacaacatactcctgtggccagagcaatgaggatgtgcaggaattcatgttcccaaaccttagggaactgttaattcgtgattgccccaagttgagactgaaaccatgcccacctaaaactgtgggatggaagatagagaacagcgacaatgtactgtcgtcatgggatgaggagggagagatcgaccttgcagcattgttcccatcaaggaaagagtttaagaaactttgggaagggaaaacaaaagtgccagcagcttgtagcgcacaatttgaaaaatgcagaaaacctggagcttcctacaatgcttgtcctgaacgcgtggaggtgaaatcgagcaagctgcctttgggaaaatggaggctgttccggcacctccttcccacctatgatttaaggatctcgtgctgcacttatgcgacaagcggctcgtcacaagagatcatccaaggcctcgccttcatcgaatcattatgcctagaagacgatgctcagtctgagcttccgaattggttgggtgagctcacttctcttgaaacgttggagatatcgaagtacccagggctagaggcaccactggatggcatgaagcaactcgcccacctccggaagctgtcgctgataaattgtagaagcatgtcagcactaccgcaatggttgggagaactcatctctctcaaagaactgatcatctcagagtggccaaacctgagcgattttccggagagtatgcagctcctcacctccctcaagatgctacgtttggagcggtgtcccagaattactgcccttccaggatggctgggcgacctcgcttctctcaaaatactagtcatcagcaattgcaagggcatcgtgtctctgccagacagcatacagaagatcaccaggcttgtacgagtataaattgggggagcctgaaacatgctatctgctttgcaactcatttacagggtgcactctctgtaggtgctgcagtagcctggaagtgatgacagacatatatggaggctttcttctactggtgtttgcacagccaagtcagcttatgggggtttcttcattggagccacggtttttggtccttcggatctaatctggaaatcgtgggccccaaagaaatgtcgttttttcccctatggctggttgctcttgacaaatgttggagtgccgaccgtctagccagacggggtttacaggcagcaccctatgtgttgtttgttttgtgaccaagatgaggaaaccatcaaccatcttctggtttcttgctccttctctcggcaattttggttcgtgctgttacaaatggtgggtcttcaacgcctatctccacagccagacacgtccttcttcctagaatggtggtcaggttctgctgcagtggtggatgagcaatttcagcagggtttctactacatcatcctgcttggtgcttggctcctttggaagcaccgtaaccgatgtgtcttcgatgggattgggatcaaacccgatgtgcagcatgtgttgtccttagccacagaggaaatgagactttgggggctagctggtgcgaagggaattaggatgttgacttgttggcgagtaatcctctagcttgatccaggtcatgtttctttgttctggtcgagatttgtgagtgtgttgtttttctattctttttcttttttctttgtaatctgttttggggttctcagttctctatcccttttcatcttcttaatacaaagatacacagttgtcctgcgtgtttgaaaaaaaaatacttttaaacatagttaatgaactagtacatcaa

SEQ ID NO: 33595 - DNA, 1386 bp, Zea Mays
  misc_feature (1385)..(1386): n is a, c, g, or t
cacagccgcagcagtcaggtattcacgcgcgccgaggctgccgttccccatcgcgacccttgcaccgggtccacgctgaccctcttcacgggggcggcgaaagatctcagccgcgacgggttcgagcgccggcgagcgctcgcccacctgggcctataaactggccccggctcctcttctcgcgtcgcagagcccagcctcgggatgacgtggcgtatcgcgacaccgccacagctcactcaaccgcgcgggtctccaacgaaccccttgtagaagcttccaaaccctagcgcaggaggaagaggagcgtggaggagctccaggaatggcgaaggcgaggaagcagaagggtgacggtagcggtacgggcggaggcgccaccgttctccaccagaaactctgcctctccatcgacatggagaaccagctgatctacgggtacactgagataaaagctcttctagctgaaaacgacacatttgctctacatgctgacaatatgacgatcaggagcattctggtggatggtgaaactgttgagttcgactattcccctcattggaaaaatgaaactgatcaacctaattggtcttcaatatcatgtttgaacactgttgctgatgctgcatgttcaacatatacttcgtctctaaatcgagaagctacaccaaatcttattgtgtcatctgagagatcaatcaagtcaatgattgagcagcagttagatgaaaacagtgaaaaatatgaagaaaatagtggaaggcttgaaaaacatggtggaaagaccatccaaacttcctatgatcaaattgttaatggctgcaatggttctgcagtggaagagggaatagaaaattctgcagtggaagaagggaaaaaaaaggaaaaggaaaaagagaaggaagagaaaaatggaaatgagaagagcaaggaaaatggaaatgagactgaaaatgaaaagtaatcagataaggcgggcacactgttggtttccttgtgttgatactgccacacaacgctgtccatttgacttagaatttacagtcagcacagatttcatcgctgtcagcaacggtgacttgctttaccaggtcttaagtaaggaagatccttcaaaaaaaacctatgtgtataaattgaacactccagttagtgcacagtggatatccttggttgttggtccacttgaaattctccttgacagaaatgacataaatgtgtcacacatctgtttatctcctgccttgtcaaagcttcagaacactattgcatttttccacgatgcatacagctgttatgaagactatcttgctgcaccgtttcccttaggtttatacaagcagatttttcttccatctgaaatgacagtattaccggcaagcttnn

SEQ ID NO: 33596 - DNA, 1026 bp, Zea Mays
gtactactttacactttccaaggttgccatttgcatgcaatggcatgtttgcagtttcatgaaatcgacaagatcatggagcacaacatcagtgtcatcgttcctcatcagaacctcagcaacctctgcgggcgtaaccgtcacctccttgatcagtttctcaatctctggatacgtgtcatggtactcgatggagtggtagttgttggcaaggatttggaaagactctggggtgcaataccccatgtggatgtgcatgtccatccttccaggccgcagcagtgccgggtcaagccgctccttgtaattggttgtgaagacgatgatcctttcttccccacttgttgaccacagcccatcaacaaagttgagcagtccagacagcgttacctgttcagaaaatccaaattatttgtcaagataactgaggaagtggtggaatcgagaagatagtactcaccttgccttcccccttgttttgttctgtagaatctgactcatcatgtccctcggcctcctgccgttgtttgagttcgatggtgcagtcaatatcttcaatgactagaatggatcggttgtccatgttaacaagaagcctcctgaggtctgagttggatgtgaccgcagttagctcgagatcatatatgtcaaacctgagatggttggccatggctgcgattaggcttgacttcccagtcccaggtggaccatacagaaggtcatcgatgatggactgcttcagcttcttgtccatggcaagcgtgtcgaatgtagatgggtggtggagttcaatcggggaccaattgccgtactcagtcatgtgtatcatgagggttctctcctgggctttaatggccttggctgtggccaaaatgaacgggagacaaggcaccacttgaactccgtgccttgataaacatcgagcatctcgtcgccctcatccatgctgaccatcatcttgtcgtcctcgtccatgctgctgacgcgcaggcgctgctggatgtcggtgttcatgcgcgtggcgag

SEQ ID NO: 33597 - DNA, 968 bp, Zea Mays
ccacccgcaccccggcctcctcgccgcaccacagagcccatagtcagtggaaacctgcctcctgggtttgattcaagtacatgccgcagcgtgtatgtttgcaatatccatcttcaagtgacggacgcagtactgcaggaagtcttccaaagcattggtccagtagaagggtgcaagctcatcagaaaagaaaagtcatcctttggtttcattgactaccatgatcgcagatatgctgcactagcaattttatctctcaatggcagacaactgtatggtcagccgattaaagtcaattgggcatatacaagtactccgagggagggcacatcaggtcattttaatatttttgttggggatctttgcccggaagtcactgatgctactttgtttgcatttttctctggttactctacttgctcagatgctagtgttatgtgggaccagaaaacaggacgatccagaggatttggttttgtttctttcaggaaccagcaggatgctcaaagtgagataaatgacttgaatggtgtgttctctagttccatgtttctaacttatgttccattttgaagtcccgagtgtttcaaaaagtgctagcagctagacgtgcctagcaacctaggtggtgctcaggcgttgcttgacatttgtactttctatggacagtatgccatgttgaataaagtattttttggcatgacatatcagaacaaaaaacattttaccatgctcccttgtgtaatatgactgtagtttatgttcctccatctctaatttgctatgttcatgcatacatcagacctgtaacacccttgtccaggaaaaaaagcctagacaaaatggctaggtgcttggtgagacagtgcagcactgcctaggttgaatgacagtttttcccctcagtatgtatgatatggtataacgcataacaataaattctgccaggctcttatgttcaactttta

SEQ ID NO: 33598 - DNA, 3144 bp, Zea Mays
gtatgatctggcgaaatatttatagtcgtccccttctaacctccagatctggccactcccacatgccccagtctcctaaaccctacacatctctctcggccacggtaattgccatcgccatggccgggaggcgcccggcaccggtggccatcctccttctcctcgccgcggcattcgcccccatctcctccgccgttcgcccagtctccgacgcgcacagatccgctgccgtggagcttttcgccccctccgctgacggatccttcggcgatttggagagtacgtatgaggcggtgaggactttccagatactcgggctggagaactataagagtctgtctgggaaggcgtgcaagtttgccgcggagaacctggcttcccccggttccaccacgaaagatctgttccatgctgtccggatcagtggcgcgcttggatgcgctgttgatgccggcgtgtacgatggtgttgtggcgaggctcaaggcagtgattcaggatactaattccctgttggaattatactatcctgtgggaggtttgcttggcatcaaggaacaaggccataatgttgttctgtctgatgcagaaggtacattccatgccactaaggcacttagccaaagtgacgggagatggcgttatgacactgacagtgctgagtctagcacatttgctgctggtattgcactagaagcattagcaggtattgtttcactggcagatgcagcggttgacccatccatgatgggagtggttaaaaatgacgtcgtgaagctgtttgacaccatcaagagctacaatgatgggaccttctactttgatgaaaagcatgttgatgctactgaatacaagggccctataatcacatctgcttcagtggtgcggggtgtcacctcttttgcagctgttgtttctggaaaattgaatatccctgccgagaaaatacttggcctggcaaaattcttccttggtattgggctcccaggtagcgcaaaggattgctttaatcagattgagtctttgtcattcttggagaacaatagggtcttcgttccgttgatactatcactttcttccaaagtattttcattgacttcgaaagatcagctcaaggtgataattacattcatatcttgtattctgtagctaaagggataacattcagtgtgaaaatgacatatggggcctgggaccataatctactgacatcagatgttttttttctgattactacacttctctggtatttccgagcaatttgcccaatgctagatttagtatgcagtgagtaaaactgtacagtatgtcgatgcactgttgctactcttttgagtttgttatatattcaacaaagtgttagttagccccaattctgttgtcctcattacatgatcttttcaggttgaagttacatcagtttttggatctgctgcaccttcactcaaagtgaatcttgtgcaagtgttgggatctgactctaaagtcatcaccagtgagaacaaggaacttcaatacgaccttgacaacaatgtccattacttggacattgctccattgaaaattgatgttgggaaatactcgatagtttttgagatttcacttcaggaaccagagcaggagactgtttatgctactggagggagaaacactgaaagtgtaattgtcacaggactgatcaaagttgacaaggcagaaataggaatctctgacaatgatgctggggccgtggagtctgtccaaaagttagatcttctgaaagatacaaaagtgtctctttctgcaaaccatctgcagaaactgtgtttatcttttcaactaaccacaccgcttgggcacacatttaaacctcaccaggtgttcttgaaattgaggcatgagagtaaggttgaacacttattcgtggtacctggctctgcaaggcagttcaaaattgttcttgtgagtatctctacactggaattggcttcgttagttctttggatgctcataattcattgtggcaatgtagccaatactctagaccaggcactgaactatcttgagaagttgcacctatataccaacaaagtttttgaacctggaaggtaatatttaggcaatgaagcctgtattcgagtttttactctatagtcatgcttatgggaagcagcactgcgggtatgtaggtggcaactgacaaattgaggtttaaaacatcacccagttgcattttggtaaagataggtttcgttcaatatggtatattgatggagtggttgaaattttctgaagcgtttaaagacattgatttctgacatggttccttatattgtgctactttaacttcttgtaggacttcctaggtttggtggagaaattttactacctttctggaagatatgaccttgagcttaccgttggtgatgctgtaatggaaaattcatttctacgacctcttggccatttggagttggacctgccagatgccccagaaaaagccccacgtcctcctgcacaagctgttgacccattctcaaaatttgggccaaaggcagagatatcacatatattccgcgcaccagagaagaggccacccaaggagctctcgctagcgttcacgggtctcacgcttctgccgtttattggattcttgatagggctcgttcgtcttggagtgaacttgaagaacttcccgtccttgccaggaccggccgcatttgcctcacttttccatgctgggataggagcagtcctgatgctctacgttctcttctggatcaagttggaccttttcacaactctcaagtacctcggcttcctcggcatcttccttgtgtttgtgggccatagggctctatcctacctttcctcggtgtcgacaaaacagaagacggcatgagtggacagagttttttccgaccatccatttcttgagggggggccattgcaggcccttgggtgtcttatgagggagggctcggtttatttcagttggctttgcagaatactgataactagaaaaagtagtaggacctcaccttcgtgtattatgatgatgcacatacaattttctgagtagaatggatgttgaatcatagaactaatgaataatatgaacactcgccttcgccccaagtgctagtttggaaacttaggatgtgtt

SEQ ID NO: 33599 - DNA, 2016 bp, Zea Mays
gtcaacacaagtacacaccacaaacacccatctcctccgcctctgctcccttctgctcacccgcacgatggcgccggaggcgcgaggtgaggcggcgctggtgtacagagacgcattggcgccagtggaggaaagggtgcgagacctgctgggccgcatgacgctgcgtgagaaggcagcgcagatggcccagatcgagcgcaccgtcgcgacgccgcgagccctcacggagctcggggctggcagcgttctcaacgccgggggaagcacgccctgcgagcaagcctcccccgccgactgggccgccatggtcgacggcttccagcgccttgcgatctcctcccgcctcggcgtccccatcctctacggcactgacgccatccacggacacaacaacgtctacggcgccaccgttttcccccacaacgtcggtctcggcgcctgcagggacggagagctcgcgcgtaggatcggcgaggcgacggcgctcgaggttcgcgccactggcatccactggacctttgcgccgtgcgtcgccgtctgtcgggatcctaggtggggcagatgctacgaaagctacagcgaggacccagagatcgtgcgctcgttgaccaccatcgtcagcggtttgcaggggcagccgccagcagaccatcctcatggttaccccttcctcgcttcgcctaggggatggtggcacggacaagggggtcaatgaggggaacgccatttgctcctatgaggatttggaagcaatccatatgacaccttacccggattgtatagctcaaggggtggcaacagtaatggcgtcctactctaagtggaatggggagccattgcattcaagtcgctacttgttaacagatgttctgaagggcaagttaggctttaagattgggagggcattgacaggatctgtgagccacaaaagcctcgagggtctgattatcgctattgcattgcacaatcagtaaatgcaggaatggacatgattatgatacctcacaggtttgagaaatttttggatgatattgtgttcttggtggaggcgggggagataccaatgtctcggattgatgatgctgttgaacgaattctgagggttaagtttatttctggagtgtttgagcatccattttcagaccaatctctactggacatagttggttgtaaggaacatcggttactagcgcgtgaggctgttcgcaagtctttggtacttctgaaaaatggcaaggatcagaataagccattccttccattggccaaagatgcaaaaagaatactggttgcaggaacacatgctgatgatattggatatcaatgtggtggctggacgatagcatggcatggagacagtggaaaaataactcttggtacgagcatattggaggccatacaagaattagtgggagtgcaaactgaagttgtgtatgagaaatgcccaaccgaagctatgattgaaactggggggttttcctatgcggtggtggttgttggagaggttccatatgccgaatgggacaggagatagaactgaccttagtattccgtttaatggctctgaccttatcatccgtgttgcaagtaaaatccctaccctagtgattgttatatctggaaggccattaattattgagtcacaagttttggaaaagatagaagctctagtcgctgcctggctgcctggaagtgagggcatgggaattaccgattgcctctttggagatcatgattttgtgggcacattgcctgtgacatggtgtaagtctgttgatcaattgcctatagatgctggagactctaactatgacccgctattccctgttggatatgggctaaaaatgtttcgaagcgataatgattcaacataactttattatttattgggtacatttgaatctttgtgatgttaaatactctgtatttattggctattggaacttaaaatgaaataatatattgttgtagtatgcattgtactgttttgaatacattattcttcccttagat

SEQ ID NO: 33600 - DNA, 362 bp, Zea Mays
tggtgagttcttgcacactggtttccccacaacttgttgagctatgatcatgtgtgagctcacccttgctgtctcacaccccccacaggagaagaacaggtggttcaagaggagccacacaacgaggagtttgatttgatctaggtggcgtctcccagttggctttatggcgccaaggatgatccttagttcgttttgtatttaccttttattttgtaagacttccgctatgtaataaatactctaattatattgtgacatttatctctatacactctgttattatacatgttgtctatttggcgcatgtatgagatgcacccggctttgtcccttaaatccgagtgtgacagcccatttgc

SEQ ID NO: 33601 - DNA, 3150 bp, Zea Mays
cccgtttaacggcggcacgacaagcaagcggtcacgtgagagctgatttttctcgcagcgggtagcggtagccctgtccctgacctgatcctgacccgtgcgggcgtgcggctcctcgcggacagctccagactccagagccgcctcttcgccctctcgccatcggcaggctacggtggctgcttccccgagcctgcagatcgggtggtagatctggttggcctagtcgctgtcggatgcagttgccgagctaggtcgcggctgcgcggcggcggtcggggtcttgcgtcgccagatctggataggaaaacgccgcgcacaagctgagctaaattctgttcgattcgagttcttataggggttcttgtggctgcgtgttttgaattttttcccactggttctggggtgccgagaaagggaatcgtggctgactcttgttgccgtcgtcgagccagatctggtcatgctgctaccgtggatgtcttattgcttgatctcctttgttttttaattccttcggttcaagaatagcatcattaccatgagcatacataccagagaaacggagacagattcggaaattttcatttattgctagcttgtagttttggggtcctataatatttttcttggttctcttaattaattgagctagtaaatcaacaaatctgccactacagccgtcacgggcaaacataaaaaaactgaacaacaccaaattgaggcgcctagtccacaaacctgaactgctgaacttaaatgtctggaagccacagtttctgatttctgatggtttgtttttatgctcatttactctttctttcttccaggtagaccaccttgtgttgattcctcgagtcttcacctggtgcttccgtttgcagcttcatttttaactaagatgtcacaagccaaggaagtgaggtacactgcacggtctattacacctcctgctgatagaaatggcacttcaaggtcgcctcctccaaagagacgcagcccttcaaggtcacctccaccaaagagtgcttcacggtccccacgtccaaggagtccaaagagacgcagcacttcaaggtctcctcctaggagacgtggtagatcaaggtcaagggataggagtcggtccaggagcccagatgatagaaatccagggaataacctttatgtaactggattgtctactcgtgtaacggaagatgatcttgagaagttctttagtaaagaaggaaaggttaagaactgtcatgttgttcttgatcctaggacaaaagaatcccgtggctttgccttcgtgactatggatactcttgaaggtgcaagacgctccatcaagtatctgcaccgcactgtacttgaaggtcgcctggtcactgtagagaaggttagatgctgactgtactgattcattccattatgcatttttctattgtattttttgttgaatagtgctagttttgtcatgttatcgttgtatagtaatgtcaagtagtctaatactagcagtagtacagttaaaaatttaaagctactatacggtcatgcatgttttttgtcttatgcttgtccctccccttcccactttagccttgaaatcactgatgtcttagtaacataaatgcattaatcttgtgcactggaaattatattccattacattaaggggcttcaatgatgctatgctctgttcagtttaaaactctggtgaaggtccttgaggtgaggtatgttatgacttatgagtagaagattacaaatatgctctttccctatgatggaagagtatattctgtaacagacaagcctggaaaccccactcaggtgaaatgtgccagagtaaattgaaaggggatcatttatgatgtgttctgatgcaatcctaatgtggtgaatggggaaaacctcttctgtggctcttcaactggggtcttaactctcatctcgtgctgacttcctgaccttccagtttaacatggtgctgggctgcctctacgtcaacctggttggtccaggctgtgcagtctccaaccatggttgtctccaaaggatgtgcagctgacgtgatggtgcttatcaccacaccctcagagctcatcaccacttgccgtcttcacctcgctcaccgacaatgcatacatgctacatcaacacgacggctgtcgccatagagcgatcttggagtcttgttgtgcatcgcgtcaccaccatcgccaccgcaacttctaccacaaccgccatcgtcaacatcacgctcgtgatccaacaggctctacgatttgtctgcttcgactaagcttacatggtgcatgctgctgccatgtcacgacaccaaccaccaagtctgatgcgaacttcatcgaccagtatcttgatttgatggacatcacgagaggcataatctggcgcttccttggaccatggctacaccgaccacggaacaagctaaaagaactcgtgaaaggacccctactcctggaaaatactgtggtcgaagaggaggatctcaaaggagcccatcaccttaccgccctcgcagaagggagcgttcgcgctcaagggaacgcagaagggagcgttcgcgttcaagggatcgaagggagcggtctcgctcaagggatcgaagggagcggtctcgctcaagggaacgccgaagggagcggtctcgttcaagggaccgcagggagaggtctcgctcaagggaccgccggagggagcgctcacgctcaagggaccgcagaagggagcgctcacgctcaagggaccggaggggcagttcaccccatggcagaaggcatagagatcggtccaggtcacccaccagcaatgggaaccataaggcagactaggaagcgcttttatggacttgtcgttgattgcgtgaacaaaggaacttgtaacactacctataaactggtcagactgagacggttagcatggatttttagtagtgttgctgtattttgttgtttcatacaagtactctattctgttagctttcggatcgaaatgtcggatgatgatggttgttattgttctggaaatcgtagacatgtcctccagaatacctatgaaactatggcatactcgtgtgtttgcttaaggttgctgtggtatgttctgatcttaagattgacacgttgcacggtagat

SEQ ID NO: 33602 - DNA, 3801 bp, Zea Mays
cgcgatgcgctcgcacgtgccaccgccccccggcccgcgataccgtgcctccgctcgacgcctgcccccgatccctgcgattccagcgccgtcgccgcgcgcgatgcccgtgcacgcacccccaccccaatccccgcctcagcgccgctcccccgcccccacccccgtcctcgccgccccgctccacgctcgcgtggcgtcgtcatcgctgcgctctgcgcccgctccgcccccacccccacacgcgcacacacacctcaccccgcgtcgtcatccacagcccctgcatcgccaccatggactcggggttgaactggtagcccgagggcgcgggaggtgccgccggcggcggaggatgaggcaggcagggcgagggcggcgacgccggaagctcctggaaatggctgcgcgcgcggtggtggtgagaccgctggtccgtgccgggaagcgagaggctgagcaaggtgagcgggtcctcctcctgcggacggctcatggcagtctgccggctcgaacccgccggagcgcgccacggggcggtaaatctggccggacccggagccggcgccgtggctgctgaggtcgctacggtgtatggttggaccccgaccacgaccccgataggctgtcgggcgagaggctcatcatcagcttgcccgggcgcgcctcggtctcggtggcgtcagtgggaaccggcgaaccggacacgacggcccaccgcctccctctgcttcctcccgtcgaagccctccacctctgacacggcgaccgaccactcctccgactccgactttgccaccacgaacagcaacgaggacactgccatcctcggcatgacgggcgacggggcattcgcaatctccttcgccgatcgcttcaccgccagcgccagcgcagcattgttcgtagagaagaggatggttcatggtagcaaaagtatggcggtaccagaacaagggattccccctaatgttgttgaggatggggaacccttcaggcacaccagtgtgggcacttacagaggagcagatgttctttagaggcatgttgtgttgtactcttccacccactctctgccagtctctacacaggttgtggtggaaaacactcgtgtgggatctagctggctcttgtgcaattggtatgccacagctgctcttctcaccgtgtgaggacgagcacagtaaaagctaagcatttcttgattcatcctcccagcttcgttaattactatcaatgatgttgctgcatatttctttggcatcttctttgggaaaacaccgctgatcaagctctctccaaagaaaacgtgggaaggctttatagttaactatcttctgaagcatttccctatgtttagctactcctgctgaaaatgtactaaccacaccttccatggtggagtgcagggcctccctgttggggcacgagatcgcccacccgtcgtctacaccagattatttctatcataccatcagatagtggatggacaaccaagcgtgcaccgtttcatcatttctgattctttcttagatgactaagataagtgtgaggtctgtactcatattctttccttttcttttcaatgcaggtatgatcttatacgagtggagattggcaacaaagatataaagcttgaatacttagtggaggcatttacaacttcaaatgagtaacattccttgatctgaaatgtgtacaataatcctgatgaactactaaaacacttgccttaatctgaaatgagtacaataaaacatatataaggaaactcaaataagtaaagtcttgcttgtccctcacaccataacatgactgatgaactactaaaacacctgcgaggtctgtcagcgtagcctcctcgacaccttctgcttctgctaactccggtgcaaggtagatccttgctatacttgacaaactaaaggaggaaagggagcaacaagaaggaaaatatggggaggaagatgtggatggttcatgtatatcagaagaagaagatggtgactgggatgtagatgagccagatgaggaggacatcatttacgtaaaatagcccattgtcttctaggaacttggtcatcattcatccagaacacagcaggtgtgcttctactgatcgaaaatacatcttccaaataactatgaggacttaaccaagcaccattcaatcttcatttgcttctatagtttgggttgcgttctgcatacataatattgcctatcaaggtagatttgccagagcagacttcgatcttcttaatctacctgacagtttcttaccatcatttgattttattgatggacatgttaagcctgttctagggagaaagattaactggatgaagacagggatcgttgagagtgatctggttctaacagttagtccacattatgttaaggaactcacttatggcccagataaaggtgttgagttggatggtgtccttcgcacaaagcctcttgaaattggaattgtaaatggcatggatgtttatgaatgggatccttcaacagataagtacaccagcgtgaaatatgatgcaacaacggtaaggtctattatcgcatcgctcgttcttacctcatatagagatttctctacagaatgaaataatttgtcaggtaactgaagcaaaggctctcaataaagagaggttgcaagctgaagttggattgcctgtggactcgagcatccctgttatagtttttgtcgggcgtcttgaagaacagaaagggtctgacatactcattgcagccattccagagttcgtgggcgagaatgttcagataatcgttcttgtatgtttcaatttagaagtgatttctattctttcgcatgacacagttcacaatctgatagttgctgagagaaaaaaaattgttcttcagggcacgggaaagaagaaaatggaggaggaattaatgcagctggaagtgaaatatccaaacattgctagaggcatagcgaaattcaatgttccattggcacatatgatgtttgctgggtctgacttcattattgtcccaaattcccatctgttcatcacctggaggacttgttgacacggttgaggaggggtgtcaccggattccacatgggttctttcaatgtcgagtgtgaaactgtagacctagctgacgtgacggcagtagcgtcaaccatcacacgggcctagaacagtacggcaccccggcgttccaagaaatggttcagaactgcatggcgcaaaacctatcctggaaggggcctgcgaagaagtgggaggaggtgcttctgggccttggagtcgaggggagtcaagctggcatcgacgacgcagaggagatcgctccacttgccaaggaaaacgtagctactccatgacgcttggtgcctcggaaacacgcgttggtgataggaagcatcttctaggatcctcctggccttgtggctggagtgagttgttcagtcagacacagtttcgcctctacaacatcttcctcctcctggtggtggtccgaactccgaagcaaattccagtgataaaggatgaactaagaggtccatgtttctattgctagaccttttgcctcctaaatagacgatgtactgcgcttgtaacaagaacctcactttcgtgtcaagtaatatcaacaggtttcataatggtagtgaactgcactggaaaaacctgtaaacaatgcaaacaggattcaaaactaaaacaaatctgctattaaaagctgttattcaaaattgaaaaaaacaaaacctgttaattcagtattataactcagcaaacataaataaaaaaaaca

SEQ ID NO: 33603 - DNA, 1780 bp, Zea Mays
cgtagtactgtcagtcatatcatagcaccccgctcagatttccacaacccaaatctacccacctcctcagacctcactccactcaccgttgccaaaagctcccacccacctctcatgggcagggttcatgtcacggcagccggccgcccgcccgcccgcgttcggcggcgcgcatgcagcatacaccgccccaggcccgatcgatggaggggaggggagcgcccgcgagaaccctaaaaagcctccgctcaacctctatgctggatgggatcagctggacggaggcctggagcgtccagcactccagcctgccacacgcctgggctggggcccacctccccgctataaagcggagccgccgggttaccgttgaagtctgaggagacctgatccacaagcaccgccgccgtgtgccagagatgagatgccatggaagagcaagaagacgcatggaattgtgacgccaaggagagcgaggcacaggagcacggtgacacggtcggccggcagatctgcagtggctgccgccgtctccgcacgatatctcgatcggatactgttgagatagctagccggccgccgttccattcatggtgcttgtactcgtccgatcgaattcctggccgcacacgccatttctttgacttttgtgctgccgctcgatcggtctaataaattaaggggctcgggcgatatgcattcctgaatttattttttttccttgcgcaaattaagtttatatatcggcgtttgatgttcataaagacggcataatttcactgaatagtgtgaaacaaattatagttccggaggttttgttgaattattgggctttgcaggatttatattgttttatacttcgattacctgggacaatgtaagctttattttttttctgtctttattatatgggcaagtaaaaagtcaagtcggctgtaaataatagcattgaaggtttcaaggtacgcgcaagcatggtccctggtgaaagttgtaggttggttaagaaataaatattttctggtatatgtagccaaagtttgcgttgggggtttctaaatttgaattcaacctacgaacttttcaccagcaggagtgttgatttttcacacacaagtattctataaaaaagaaaggccaagctagttgctgccagttcttttttactggacaaacgttgaactttcaactttttcctatgttgcaatattgcatgctttctttacaattagtaaagtctgatgttgcttttaaactgctcacttacaggcaaaagaatttttgttagttttccagttccaacatggcgctacaatggttaatggcagtgcatataaattttcaagtatataaagtcttaatccagcataggaataatcagggtaatacatatactctctttccattagcatgtaaaccacacttgcacatcaaagcttcctttttattttaaaaatatatgtaatgaagctagcgcaacatctgtttcatcatatatactcagggtgatacatatactctcttaatccattcccacttctgtttcatcatgtatgttagctcaatctgatcttatatctaataatatatctatgtagctatgcacctgcacatcaaagcgtccttttatttttaaaatatatgtaatgaagctagcgcaaggtggttatgtagaggtgtaaaaactccagccaaggcattattgcactaataagggggtgtttgggaacaaagtttttctgcagttttggaagaatactgcagtattctcaaatactgc

SEQ ID NO: 33604 - DNA, 4174 bp, Zea Mays
ctagccttcgggactcgccatctcccagccgcacgctcttctcgcccacgcacacacgattccttctcgcgctctcgagattcttcccacacgcacacggaagattcccgcctcctcccctctgtcgccgctgctgccaacgctagcaccgatgccacctcttggttcccaggttgtgtcttgcctctttccatccaccgtcatcgccgctacctatggcttccccgtcgggtcgtctcttgcctcattctgttccccgccgctgctctcgccacccactatcggaggcattgtgtccagaaacatggttaagagggtatgctgtctgagcgccagggagatccgaacggtgatgccctctactcgcttcccattgtcctagagtcaggcaaatggaggaacatgagtcagtggggctgccatagttggagaatgcggcgtaagcaggccgacgacggcgagttcctcaacatgtactccggtgaaattttggtggtggttccgtgacctgacatctttccaatatcgaagatgagaaataccgaggctgttatagatctcttctttttttaggagttttctattttacaaaatagctaaactatggaatttggctaataactttagattagctctcggagttgctcttcatgcgccacatccgtagtcgcacgcacctaccatgtgcacccaacgagcatgtactattattattttcctaatctttcttggccccttacacagctgcttcgtcatttccagccatatgcgtgatgacagctcctccgtcattaccatttgttttatggtagcgagatgcgcgtgaagacatttggattcgtccaccaccacatcactagtctcactctcacctgtaatatatctgcacccaacgagcaggtaccaagcaattagcaagagaaacacaaggtcgaggtggtgaggtatggagctcgccttgggggccatgaccagcttggcccttaagctaggcgacctgctcatggaggagtatgtcgtgcagaagggcctcaagcccgacatcgagtctctctccagggagcttgtgatgatgaacgccgctctcatcgacgcgtcccgggttccacctgaccagctcaccgaggtggaaaagctttgggcacgcaaggtccgggacctgtcgtatgacatggaggacgccgtcgacgatttcatcctgcgtgtggctggtggtgacgactctgccgccgactcaaaattcttcaagaagacccttgccatggtcaaggacgtgatgtcgatgaagaagttcaaggatcggcgccagatctccgacaaggtcaaagacatcaagaaactctccaacgagttagctgaacttcgtgccaagtacacggtaaggggtgtgggcgctgatctcgccgcgagcaccggcatcgaccctcgtgtcatcaatctgtacaagaaagagacagatctcgttggcatcaagaagtcaaggaacaaagtcattaggatgctgtctatggagaccaaagatgatgatgcacttgagtcccatcaggctctaaagatagtgtctatagtcggggttggaggactaggtaagactactctagccaaaacagtgcatgacatgcttaagaagcaattcgactgttctgcttttatttctattggtagaactcctaatctgaataggacattcgagaagatgctattgaaacttgatcgtgagtataaacaagttgacatggccagatgggatctagaacaatttaaaaacgaactggatgaattcttgaaggacaagaggtacttgatcgttgttgatgacatatgggatgttgactcatgggaagcaatcagatatgccttgaaggacaataattgtggaagtagaataatcatgactactcgtaattttgggattgtcacgaaattagaagaggtttatagattaaaacctctttctaatgcaaactccaagaaattgttctacaaaagaatagagagtcaggaaggagaaagccttgatggtgaactctctagtaaaatcatacataaatgtggcggcataccattggctatcattgcaatagctagtttgttggttgaaagatcacgtgaggagtggtcagaagtgtacgacaagattggtcttgggaatgaagacaatacaacaaagataatgtcatacagctactatgatctgcctccttatctcaagccatgtctgctgcaactaagcatatatccagaagactgtatcattgatacaaactctaccatatggaagtggataggtgaaggtctagttcatcttgagaaagaagagggtagcctatttaaggttggagaaagatacttcaaggagcttgtgaatagaagcatgatccagccgacagaggacaaaaatgatcggtttgtagaagggttccgtattcacgacattgtgtttgatctcatctgtaagttgtccaaggatgaagacttcattaccattagcgggcaacattcatctcgggatagtttaagaagagagaagaaaacatgtgtgcctcgctcagactgcaagctacgtcggctggccgtccgaaatcaacgtgtgcagcgcttccctgaagaaaccatcgacatgccagaggtgttgagatcacttagcattatagattgtaatattgaggttatggccccaattgatagcttcagggtttgccgtgtgctgcatctggggaagagctacgtacccatcagcctaaagcatctggggaagctgttgcatctcaagttcctagagatagtatacacgcctattgatgagctccctaaggaaattgggcatctgaggtctcttcagacactgatattagaccgtactggactagacgagctgccaccggttgtttgctcgcttacacggttgatgtgcctgatagcccaggggttcgaaaggttgccagctgacaggatggggaacctaacgtccctggaggagctacgactacgtagggtagttggccggagtgccacccaagccctagtggcagagcttggcaagctgacgaggttgagggtggtcgacatcaccttttcagagcagctagaggagagcttgcaagaagcattggtgcaatctctgtccaatctgcggggactccaggaactaacgcttttgtttaaaatgacacggtggggaagcgatatgtggggagactgggagccaccaaggcagctccggcgcctgattattgaaggcatcatcgtcttctcacgacagcctcgatggatcaaccgctcctgtctgccacgcctctgctacttatctctgatggtgcacactcttgaagcacaggacctagataatctagcgaggttgccagagctccagtacctcacgctagatggtctcagctggcctccaaggtatactgttggcccagacgacttcaggaatctgaggttctgcaaagtgggcacaacgttcgagtttcgtaagggcgccatgccaaggctcgaagtgctgcaatttagagtttttgcagggtactattgttgggcatacaatggtgtgccgttcgagcagttcccaacgaaggatcttgacttggacctggataacgtccttttacttcagcaagtaatagtcaaagtcaactgcgtaggtgctactgtcacacaagtggaggaggtggaggccgtggtcatgcgtgccgtggaaaatcatgccaaccgtccaaccataaaaatgaatcgagcatatgaaatagctatcctatccgacgaagggcgggaggctctgcttcggcgacacattgaaaaggattgctgcgtgcgcacgatgaaggataaatctgatgctttcttcatcagccagctgcggaggtatcgacatcttcagaaagccattattttcatcgactgttcgggtgccagcatgtgtgaggtgcagaaagtggaagcagcttttagacatgcagccgaggttcatcctaaccatccaagtattgaacttatcagaacaaacaccgacggaatggcctcctcctcatctgaccatcccaacacagagcccaggaattgatggctcggtttgtcagatccttccaacccaggagcaggcggtgccggtcagcggagggttgcctgacgcaggagaagagatgcagtctttgacagcacaatcccagac

SEQ ID NO: 33605 - DNA, 914 bp, Zea Mays
gctggagcgcatgcagattcgacaagaggtatacgaaatcttgagtgagctgtacgtccatttggaagtagcaaagaagcaactcctgatgatgcaactgtaaggacaatctttcttatagctctaagttcgaatatattggttcctgattattgtgtctcgtcatggatttattgcgttcattgaaccagaaaattgcatcgcagtgtctacatttgtattctagtttaccaagaagagagggtacatatttgagcatatgtagagcccaggtacctcgctctacaacatcaaggattatcttgtcattcataagagttaaaggccctttcttcagtctttcactattaagacacaatttcatgttgcaaagatcttcaatggatgatattgatgacgatatataagggatatcactcttgagccacataagcttgatgaagagattgttgaatctaatcttgagcttgaagcagactttgtacaatttaaatatgatgatcgatcacaaaagatgggaaatggacataaacagtgaacatgaagaagggtgtgctagatggaaaggaaaccggtcaagctgattgaataagaagaagtctcttaactactataaatccatccatgaaatggagaagattaatgctaagccacttcaagaaaaaaggttgggtctagtcgttgttgtctctatactggcaaagggaatgcggagatacatttcgagaagaaaaaggcaatgatatggaggtgttttgtctttcattgataaaaaattagaaatgagcaggtgatgaatgtcacatgaatatatttagctatttcaaatggaaaccaactttgttattgtactggcttttgttcataataaaaacacagaaggcaatggaaaatctacatgcaaatgttttgct

SEQ ID NO: 33606 - DNA, 1003 bp, Zea Mays
gtcaaaatgggaattcaagatgactaaaagaggggcggtctacgagccgctgccctggagcctgaggctgaagatcctcatcggtgcagctcgtggcctcgcgttccttcattcgtcagagaggcagatcatctacagggacttcaaggcttccaacatcttactggattcgcacttcaacgcgaagctctcggatttcggattggccaagcatggtccagacggcggggagtctcatgtgacaacaagagtcatggggacctatggctatgcagctccagagtacgtttctaccggccacctgtacgtgaagagcgacgtgtacggcttcggcgtcgtgctgctggagatgatctccggcctgagggcgctggacccgagccgcgagcgcgagaaggtgaacctggtgaactgggcgaggccgttgctgtccgaccggaggaagcttagccagctgatggacggcgggctggaggggcagtacaaccccaaagccgccctcctggccgcccagctgaccctcaggtgcctcaacggcgaccccaagagacggccgtccatgaaggaggtggtggaggcgctggagaagatcgagtcgtcggcgaagggcaggatggcgagggagccccggaacagctcgcgccgtggcctggtgcagtcccctaggggtgacagcgctaggaacaactccagctccaggggcaggtagacgcatggtctaatcttgaggatgattctgatgcatgtgtaaaggtagtagatgaccacgattcttgttgtcatgacgaagtttacgccgatcatgataatcaatgtagcgatgctgctcgagcatgactttgtagcatatatatatgcgtaaattcaaccattattcttccatggaagtcttgtctgagttgagctagattgcacttacaataccagcaatgccatgaagtgttgtctgagttgagctgcatcaggctgtattaagtactatatttatagatttcgtatcaac

SEQ ID NO: 33607 - DNA, 240 bp, Zea Mays
tgcaaaagtatctaagttgattctttctaaagccttttccttggttcctatttaaccaacatatccttgagagtcatttttccttagtcgggtaagacttgcgaaagtacacttcgtactcagggttttcgaacccatgttgttgtaggtgatgaggagtactctaggtgttcctgtggctggagggcgtttccagttctggaggaggattagttaggcttgtgtataagctttggaggg

SEQ ID NO: 33608 - DNA, 2278 bp, Zea Mays
ccagtatcatctaaagtttgagaacttcattttcgcaagtaaattttatttctcttgggaaaatgatttttttaaaataaggttgtcaaactcgtcctaatatgttgcgtttccgtttttcctttcttgtatttggaagtgaagtggaatgaggcagcacagcctgctcctacagccgatgagatgaggtgattgaggtccgtccaggacaaaaaagcgaaacgactccttcagttccgtcccgttcgtgacgacctccggtcccgggagggggagggggagggggagggagaggcgaggtcatggcctccggcaccggctccggccagccgcaacccgcagcagctgatgctgacccgggagccggcgacaacaagctcgtcttcgagacgccgctgcagccgcagcccgtgagggaggactacgtcgagaacgccgtcaagttcctctcccacccaaaggtcaggggctcccccgtcgtctacagacgatccttcctcgagaagaagggcctcaccacacaggagatcgacgaggccctacgaagagtccctgatcctgaacccatcactacggctaccgcttctccacagcagcaggttggcagccagaatcaatcagctggggcgcaaacttatgcgccagcgcgatctatgcacccagcaaccgctggccctgtcgtccgaccccggttcagctggtaccaagcattcctcgctgcagggctcttgcttggttttggtgctagcacggctgtctttatcaagaaactgttccttcctaggctcaagtcttggatccgcaacgtcgtagcacaaggtgatggcgctgaaggcaaccaacttaagcacaggattgatgaggaaacggctgaggctgtaaaggcttctgcttcagctgtttctgctattgccaaaacaaaccagcagctgcttgcttcaaaggatgaagaaaagaagatactcgtgacattaacacaagctctagattcccaagccaaggagttaaaatccttgaccgagtcaatcaatcgtaccagggaacccataaacattaccagagacgataggttttctcagcaccgcccactggaagaccatgtccctcctgttacgaggaatggggcaattaacagttcatggagatcttctcagcaaactaacatgtatggtgtgtcacatggtgactttggttccgcaaggtctgcttcattcgtgccagcacctgctgaacctacagctggatcattttcaagatcttgtgccgaggtaaggggcttggctggtttatattggcatgccctgcaaatcacaagaccttcttagtttggtacccagtgggcacagaccagatggggaaaataaaacaacatagttaaaaggaggggaactaactgacgtcaatatacatttgtcaagttagttggattcacttggtgctgtctgagattgcagtgttgcacattcatgttaagtaacttttgagacagctagtatttgctggcagccagccttttcatgcttatgaacagttcacatctgagttgatcagctatggaaaatatcaaatttctcaaattagctagacacggttgtgtaccaaatggaattgtttgcaaatccactacaacaatacaacatttttgtatgtttttatgcatacattatttaccggatctgcaaacactggaatgattgtgtttataatagtgtcactccctgtgtgagtgctgtagtgtggccattggaagaacaggaactcttatagcgtgctacggttgctcgtcacctctatcagctaccctggaggctttcctgttcttgctcttggtcgtgttgctagtgtcttgcatagtgtataatcttagtgaggtgtgttgttggtgtgtgtgtgttgtgtgtgcatggtttgagtgcgtgcttatgcagctgccttttatctctttaatgaaaaaatgacaagctctccaagaaaaaacttgaccattaactaataagattacaataactgaactttaaaagatactgacattcctttcaaactgtctatatagaggctcatattattgacaaaggtagtccttttagtgtgtgtgagcgcgtgtgcgtgtgttggttattacatcttatcagtatacatgttgctcaatctccaaatacatgcatttgtggtatgtgcatatggttaccatattttgttctatagtgttctttattgatcagttgaaagttattcaacttgatcacgctgcaaccgatttctttaatcttgtggaact

SEQ ID NO: 33609 - DNA, 1493 bp, Zea Mays
gaagaatcatcgaatgcagtgatgcgatgcgcccctccttggttcccggcccagacattcccgtggaagtagaagcaaacatcgattgcaacggcgcatcctggatctcgtcattgatcccagtcagtcccagcagaacgagcaggagaaggcgacgctcagcgcggggttcttgctgtttctacagcccctaggtacgggcgcggcgcagtcaccaaggcgggcttgcggcctcgcgggtgcggggcgcgagcgcgaccccggccgcgaccttgtctatactcgccagccgggcgggcgggcgagctgtggcatccgcgcacaacaaagctagctacgtactcgtgaaattcgcggcgcagcgcaagcgcgcgggagccagcgtgccggcgaggcgcaccgatgggctcctcggcggcgggctccaccccgacggcgcggcagcagcgcggcgcgggagtggatgcgggcgcggcgccgtcgtcgtcgagccccgtcttcctcaacgtgtacgacgtcacccccgccaacggctacgcccggtggctcggcctcggcgtctaccactccggcgtgcaagttcacggggtggagtacgcgtacggcgcgcacgacggcgcgagcagcgggatcttcgaggtggtgccgcggcggtgccccgggtacgcgttccgggagtcggtggccgtgggcgcgacggagctgagccgcggcgaggtgcgcgcgctgatggcggagctggccgccgagttccccggggacgcctacaacctggtgtcccgcaactgcaaccacttctgcgacgccgcgtgccggcgcctcgtcgcgcgcgcccgcatcccgcgctgggtcaaccgcctcgccaagatcggggtcgccttcacctgcgtcatcccgggcaacggccgcgccgcgcgcccgccctccgccgcgagccggagccggagccggtccgcgccgccgcggccgcggaccttcttccggaccttctccgtcggcccgcgcaggaacatgacggcgccctccccgccggcacacgcctcggcgtcaacgtcgtcggggtccaccacaggacatgataatggtgaatcgggcgagggcgaatgaacttgaggggaaaattctactttgcgattagagcaacgcatcgcgaaatgcatcagtcgtggctcttgacttttttttgtcagtcacagcaccacaaattaatttgtgcttgcggagtcaagggcaatccaaaaaaacaaagctaatgatgacgcactgctacagaccgaattaaatatgcagaagagaatcagaacaaatcgccatgttttgaattcgtcgcccttttacggaccgagtcgccagccatagacgagcacaccggatcaaaactttgctcgcagattgattgttgatccagtttgacttgcctctccgtttacccggcatgcatttgtttccaaattccaggcacgagcgaagcaatcgatcttcttccatgcaat
